United States Patent Application Publication US 2024/0301345 A1 - sequence listing, part 16

SEQ ID NO: 2623 - DNA, 51747 bp, Unknown
  R222_15m  MAG No. k141_34078
catggattcatccatatattccataaggaggagaacaatgaaagcaaaatcatggatggcgggagtcgctgcggcggccacactgttcgcggccatgaccgcaccggccagcgccatggccgaagaggcgggtgcgccaggtgctgcgcagtcttccgcgtcttgcacggccacgagcaagaccatcacggtgaagggcaaggatgcggacgcgttcaagacgtggagtgacaagacccctttgggcaatcgtacgttcaaggtggcgaaggtcgccgactacaagatcggtaatggcgcgtccggtggttcgttgcatcttgagacggtgagggaatcgaaggcggccattcttcaggcggtgaaagatctgcccaccaatacgggccaaccgttgtatgaaggtgaggaaaatgatggcgacccgatgaactggcttgccaacacccagaacgatatacttatccgtaagtacgcggataaaccgggcgtcaccggcagcacgcttgaatcgaatagtgtgagtgtcgacgacacgagcaataccatgacgctcaccatgcccggtcccggcctgtatgtgatcttcgatgccacgacgcccaagcagcagatcaaggacacgggagacaaaaccattgcttatgacggcttcaacaatatgctcgtcggcacctcacttcccgatggctgcaacgtgtcgaacaacaatggcgtcgtggatctgacttccgacttgaatgccaagaccacttccacgacaaccaatcgcggtggcttcaagttcaccaaggtcggtgtgggaagcaacaaggctggtttggcgggtgccgaattcaccgtgtactccgacgagcacttcacgcaggttctgcacgacgccatgggcgaggaggtcaaggccacgtccagtgaaaacggcggtcttgtcgatttccgcaacttcaagctgaatgacggcacctattacctcaaggagaccaaggtgccgaatggctattggtccggttccgcggccaaactgaaggtcacgatgaagaacgtccaggggacgatccagttggagtcgatcaccgacatgagcattcccgccagcggactgctcagcaatggtacgaacggttacgcgtaccgcaacatcaaaagcatcacccagctgccgctgaccggtgccatgggcatggccatcctcggcgtcgtggcggtgctgtgcatcggcggtgcctcgatcatcatcgttcgggcccgcaaaacgaagcgtagcttcgcggcctgaacatagggccgaatgacgccggtggcaccttcgttcgagcagctggtcgacgttgccaaagaataccgggcgcatgcccgtatgcagcggcgattgcgtgtgatgtacgccgtcgcggggattttgatcgccgtggcggtgatatgcacggtggttccgctgctgatgcagtatgcgtcgcagacgtccatgtccgcgtcggcgtcttccgtcgaacagcaggtgcgactgtggccggaaagccggatcgacgacgaactgcgggcggcgcgtgcctacaaccgcaatctcgtccgatccggacagccggtgctgggagcccaggccgacccgttcagtaacggggaacgcctgtcctcccagtcggcgcaggatcaacgctacggcaggctgctcaacgaaggtcacggcatcatgggccgcgtgtccataccgaagatctcagtggatcttcccatctaccacggcaccggagacaagcaactgtcccttggttccgggcatctgtacggcacaagcctgccggtcggcggcaacgacacccatgcggtcatcaccggccatcgcggcatggtgcaggcgcagatgttcaccagattggatgaaatgcgcgaaggcgatttcatctacatctcaacgatgaacaggaccctggcctacgaagtcgatcgcatcaccgtaatcgaaccgaccgatacctcgcagctgcgcatcgttcccgggcaggatcggctgacgttgatgacctgtacgccatacggcatcaactcccaccggctcctggtctccggccatcgtgtgagcatgcccattcccgcccccgatccgaccgatctgcatgacggccggaccgtcggcgcatgggtgtgcgggtcggtgctcctgtgcggttggggcggcattgcggcggtccgtcggcgcaagcgcgcgccggaagggccaccgcgccatgccgtgcgggtgtgattggatcaaggtccggcatggcgatgccagccgttgcggacggattcggggtgcgacgcaggaggttcgcctggtccggagaaaacagtctacgcggcgggaaccgttcacgtcgaaatcacctgcacggcctggagtacccgcaattcgggaaacctgtgcaaccgtagaacgtgcgtgccggtgccgaaacgttcctcggcgtcatcggacgcagcctcggcgtgtgacggcggcgacgcgtgccgccgacaccgattgcgggcggtgacgggtgcgtgacgtgtgtgacggatggtcggatggcggggtggacggaccgagcggaaccgggcggtccgtccggaaccggctagagaccgaggaaggcgcggatgtcgccgatctcctcgtcgacgatggctgacccatgccaggatactcgcggtattcgagccggccggtggcctcgagcacgcgacgcgcggtctgctggtccgcaggtggaatcgtgcggtcccgcgagccgtacaagagcaggaaacgggtgggggagtcgaaaccggtgaggtccgtcgactcctcgcccttgaacgacgggctcatcaggctcgccgcgtcgaacacgtgcggatgctcgagcaccatgcgatacgacatatagccgccctgggagaacccgacgaggatcttgcggcggcctgcgaacatgggggagtcgagcagggagacgacggcgtcgcccatgcgcgagcactcgcggcggcgtagacagcgtcgatgatgcggatcatctcacgctcgtcattgccgtacccatggaacatgacgaacaggcggtcgtcctgttccgatgcttgaacttggggagctccaaacgtttcatacgtattgggtgtcttaggcgttcgagatatgtcgtgtgtctcgtcggggaacgacgattcgaatcgatggtcgcaataacatgtcggctccttcctcgcggcttgtaccgcttcctcatcatcccgcgccatgcaggcgcgtggaatagaatgttcgacttacggcgtcaatacgtgttgaaggtgttgagcaatccggttcgaaacgctttctcgcatggtgacatgcgggatatgaaatcggcatagtcgacggccgtatcgggaatcgacagtccgagtttggccacgatgatgtcctcccgtgctttgacgtctccgtggaacgtcgttccttgcagcatgtgcagctccttgcgtgaggtttgcttcgcatcggggtagaggaagatgccgagtttggaatcaaaccggtacatatatgccagaatctgccagtaatcttctttgtgaatattggatataggcttgtacttggcgtccgcaatgatgggatgttgtttggaacggctgatgaaatcaggatagatagggcctgtgccaccttcgaacaggtgttgttttccttctttcaatttgtttcgcggatggaagaagctatcgccaatcagggaatcgacgtattcctcccatagccaggagccgtcgaagagaatgccatgaagtcggttttcctgaccgttgaacgcgtgacgctgattgctaagaatgatgatgcataattgttgcagcatgcggtattgcgtaaaatacgcatgattgaccggatgtctgagattgtattccagaacggtgctgcggtttgcgcgacgatatgagggagtacattcgattatgtaacgtacctccttgcggatattgcctaatagcgtggaaccgtacggttgaagggctatatattccattgtgtgacgaatcagctgtgtgagaggattgtctgcagtaagctcgcgcacatcatatgcgatattgccggtgaaaggaatattagtggtgatatgccgtggaatatcaattcttccacggatgtggctgtcattgtacttgtgctgaatgtatgtccgataaatcccttgtcttaaagctccccgtaaacagtatggaaacatgaatacatggaattggaacagtctcgtcgataaatcggattgaatactcaggcttgacaggttgggaatattcagtacacgatacatcatgtattgcaggaagaaatcccctgcggatgaggcaaaacgtgaatcgatgaccaactgttcgtcttgatagccaaggtaccccatcagattccctgagcggtagcctccactgtccttttccaataccatctggcattcgtccaagtccggagaatcctgaatcgactgcgggaacaccagcagaccttcttgcgaaagccgggctatggaacgatcggacacagccgcgacgatatccttgacgggagccagcgtggttgcctcaatgcgggagttgtctttgatcgatacggtactcataccgaccgttccgctggctgcggcgaatccgaagcatcttcatatgccgctttcagcttctccatgatttctgtttcgttatacatgccgcgcacgtaatcgtgcaatagcggttgcaggaaatcacgccaaaggtcatcgaacgctttcgccgtggattcggatttggaaagattcaggaaatacgcagggccgacatggtaatccgaacccaaaccgatatcgggggaggatatggtctcattcagcttcgtcaagcggctctcggcttcctccgacaagcctccaagttcttcaagcatgtccaacccgtcttcggccttgacctcgatgaagcggaaccgtcggcgcatcgcgaaatcaaaggtgtcgacggatcgatcgatgtcgttcatcgtgccgatgatatagacattgtccggcacatacagctcatgaccgtactgggtggtcacattgccggcagggccgcgataaccagggtcgatggagaagaacagctcgccgaatatcttggagatttcacctcggttgatctcgtcgatgatgaacacgaagggtttccgaagaaccttttcggatgctcgtgaagccgacgaaggcttgtgcttttggatttcctgtagcaaggcgaatgcataggagtcctcccgctgtcgacgctttcgctcgagaatttgatgcacgtcttcaccatttgttggaggggtgctggattgcataagcgccagaaggtcttggacgcgtattcttaattcctgtttgatgccgtggggagcgtacacaagaacatgatgttcggtgacgttggttacttggaaaggcttaccagtcgagattctgaactgattgtcgtcgaaatcaagagaatcaaagtaggcgtccagacgttcccgaacggatggttccctccgttcctccttggaaagccgggactgttcgacgttgtcccgagccttgtcaaggaaacgcttgaatatgccgtcctggatggagaagccgtgagttcccgtcgcatccgtctcctcggtattggggcggatgccctccacgaaatccgtgtagtcgtagctgggatgaaattggacgaaaccgatgcgtctgcgctgttcatcatcaagcttggaccaatcgccgcgtttgccgtcgctgacgatatcggcggcgatttggcgggcaagataggttttaccggttccgggagcgccacggaagatgatgttcttggaatccaacagtgtctgcgaatacttattgttgtagacaggggacttctcatcatcgggtgaagcgtaacctttttcttcttctaccgaagcgtcagcattcgaggcttcttgggaggtcttacgacgataccgcaagatgaaggcgtcattcggtttgccgaagcgtttcagacactcctgaacgaagaatagcgtcgagaagatgttccagcagtagagatacatctgtacatccgttccgcgccaataacgcacgtattcgattgagttcttgcagccgcttctgaaacgttcctcatcggggaagatgccggtgattagcggcttatccagaccgtaccgacagatggggaaggactcgcgcttgtcgtacggcaattcgagaagcttatcttcgaatacctgacaggtcagacgtggcagtgtctgacatgagatccggcgttctcccttgttacgatttcgttcgattggttcgccgtccgcaggcttgaacttgacgtcttcgggggtatacgcacttcccatgttggcgaagaaggaagggtcggtataggaatcggtatcgggctcattcgactgaatcgagtcggccgtgatgatcatctcatatgttccatcgggttgtgtcgtcattgagcaccttgccttatagcgtctcgtgttgtcaactatcctacactgtgcggattcatggcgtgtttgtcttcataggaatcggcctgcggccgatgcggtgtttttgcggcctttggccgcggtctctccctcagtcggcttcgccgacagctccctcgtcagagggaacccgcgctgcgcgcgttttgtcggctcgctattacctgcatgatgcctacggcatcgtctcgtcagagggaacgtcctgtggccattgccggtctggtctgtaccgcatcgggaacgctccgtaccgtgtcggacggcgcgcgaggtgggggcgtgcggcgacgttgcgatgggaatcggtcagcgcgggcggcctcatgctggtgagaaaggccgtgtgcgttccggcccgaacaaaggacgatgggatgggccgagaccgatgaaccgatacggaagggactacgacatggacaatacggcgcgcagggatgcgggattgccataccactacgacgacccggccatcatggacggacagctcgcatggcagaacaaactatgggaatacaaccagaccaaacccaccgaacgggagcggcgcgccgaactgctcaaagacatgtgcgccgaagtcggcgacggcgtgcacatcgaaacgccattgcatgcgagcaacggatgccgtcgcgtacacctcggcaaagtcatctacatcaacgcgttcatgagcatggtcgacgacgcggagatatggatcggcgactacacgatgttcggaccgtccgtcaccatcgccaccgccggctacccgatcttgcccatcctgcgcgaacaccacactcttgttcctatagcccagaaatcccgcgtctctttcgttgtgacgcgggatttctgccggttgggctatcggttggattgactggtatgtttcagcgaacggctttgaccagtgcctcggtgaggtacttgccggcggccatcaccagcggcgcatagcggcgtccgggggcggcacccatgcggccggtcgggccggaaatcgagatggcggcgatgacctggccggaggcgttgcggatcggggcggaaatcgagcacacgccctcttcgcgttcgttcacggactcggaccagccgcgcttgcgtacggcggccagcttggtggcggtgaacttggcgtggcgcaatccctggtgcagacggtcggaatcctcccaagccagaagaatctgggcggcggaaccggcttccatcgacagcatggcacccaccggaatggaatcacgtaggccggaggtgcgttccacagcggcgatgcacacgcgctgatcgccttggcggcggtaaatctgcgcagactcgccagtgcgatcgagcagggtctgcaggatcgggccggcggcggtcagcagacgatcctcgcctgctgcggcggcaagttcggcgaaacgggagccgagtacgaatcggccatgctggtcgcgcagtacgaaacggtggcgttccagtgcaatagccaaacgatgtgcggtcggtcgagcgagaccggtggcggccacaagctggcccagcgtagacgggccggattccagtgcgtcaagaatctttacggttttatcaaggacgccaacgccggaatggatttccccatcgtccttggcggtggtgtcttcaaccggctcggactcggtcaagctgttgttcaatggttcttcccgggaatcagtcataataagggcgattatgccatctcacatagtgaaatggcaaattggggaagtgtctcacagggtggccatgaagttgaaagggcgttcgtggatgccgaagagacatgtctggagcggaaccgagtcatgactgggtcatgttcgagtcgggtccgagtcatattgaggccatcatttgaccgtatctcaatatccggcatgctcatggccgggcccatcgcaagcacataggctaataccacgaacaaggcgcgaacacaatacctcgcgcggaattttttggaggaatcactatgggaacgacactggccgagaaggtctgggccgatcatctggtgcgcaagggcagcgacggagctcctgatttgctgtacatcgatctgatgctcatgcatgaggtcaccagcccgcaggcgtttgagggcctgcgcttggccggccgcaagccgcgtcacgtggatcagctcattgccaccgaggatcacaacacgccgaccgttgatatcgatcgcccgaacccggatgagacgagcgcgttgcagttgacgactttggagaagaactgcaaggagttcggcgtgcgcctgcacccgctgggcgacgccgatcagggcatcgtccacgcgttcgccccgattctgggcctgacccagccgggcatgaccatcgtgtgcggtgattcgcatacgtcgacgcacggcgcgttcggcgcgctggcgttcggcatcggcacttccgaagtcgaacacgtgatggccacacagacgctgtctctgaagccgttcaagaccatggccgtcaacgtcaacggcaagctgcccgcggacgcgacggccaaggacatcattctggcgatcatcgccaagatcggcaccggcggcggccagggttacgtgatcgaataccgtggtgaggcgattcgcaacctcaccatggacgaacgtatgaccgtgtgcaacatgtccatcgaggccggtgcgcgtgccggcatgatcgcgccggacgagaccacgttcgagtacctgaagggccgtccgcacgcgccggaaggcgagctgtgggatcaggccgtggcgtactggaagacgctgaagaccgatgacgatgccgtattcgacaaggtggtggatattgacgccaccaagctcggtccatatgtgacgtggggcaccaaccccggccaaggtctgccgatcaccgcctccgtgccggagccgggcaagatcgccgacgccaccaagcgcgccgccgccgaacgtgcgattacatacatgggtttgaagccaggcatgccgatcaaggacatcgccgtggacaccgtgttcattggttcgtgcaccaacggtcgtatcgacgatttgcgccaggccgccgcgattatgaagggccaccgcaaggccgagaacatccaccgcgtgctggtggtgccggcctcctcccgcgtgcgtttgcaggcggagaaggaaggcctcgataaggtgttcaaggactttggcgccgaatggcgtaacgccggctgttcgatgtgcctgggcatgaacccggacaagctggtgccgaacgagcgctcgatttccacttcgaaccgtaacttcgagggccgccaaggcaagggctcgcgcacgcatctggcgtcgccggccgtagccgccgccaccgccatccgcggcacaatctcgtctcccgccgatctctgagtcaatacacgtgagccccctctgacgaggggctgtcagtcgaagactgactgggggagagatccccgaaaggaaaattgttatggaaaaactcaccacactgaccggcgtgggcgtgccgctgcgccgctccaacgtcgataccgaccagatcattcccgctgtgttcttgaagcgcgtgaccaagtccggcttcgatgacgccctgttctacgcatggcgccgagacccgaacttcgtgctcaacaagccggaatacgccggtaagggccagattctggtcgccggccccgaattcggcatcggctcctcccgcgagcacgccgtgtgggcgctgcacgattacggtttccgcgtggtcatcgcgccgagcttcgccgacatcttctacggcaacaccgccaagaacggcgtgctggccgcgattatgccgcaggagtccgtcgaactcctgtggaagctactggaggaagagcctggtcgtgagatgactgtctcgctggagacccgcactgtcacttgcggcgacgtgaccctgccgttcgaggtcaacgattacgtgcgttggcgtctgatgaacggctacgacgatatcgatctgacgctgcagcacgaggacgacatcgccgcctacgaaaagatgcgcgccgaaaagttccccttcaagcccaagaccatccccgccaaacactgggccgaagaaagaatcgagtccgcccgcgagcctgaggacgaagactggacagggccgttggccgatcgcggcattatttagccgcgatcggcctgctgaaagcccggtgggctttcagcaggccctgtgccgagctgcgacagcagcgaggccagcattgagcctcgccgaaaggcgagtccataattgcaggcccagggccgttggctctgtgtctgattgagattattgggtcgctcgcatcgcatcaaacaaaggtctcactggtgcccgcgccccacatccattgcgcggcgggcaggagttgcggcaatattcccttcagtgccaacaacgccatacggtcgttatccaccgcagccaccaacaccggcgtggcggcgctttcctcaacactcatgaactccgtcctagcgttcgaaatactgtgcctgaattcgtatacatttgtggacataatcacgattcatccagtaatgacggttaagttgagcatcatgaccatgaatgacatgaatccgtcgaacgattccgatacggctccggcgcaatcgctgtcagcgcaaccgttgccacctcgaccggcaccgcagtctgcggcacagtcacagacgccgatgccacagacgccacagtatgttcagcctgggccgagcatgcagccgcaatatgcgggtcagccggaggcatgggcacaaccgctacctccacaagatgtttcacggggtgttccacggattgtttcacaaggtgtttcacaacctgtgccgcaagccgcaatacctgctgtgcagcctgcacaatacgccgcgcagctcgtatacccgacatatcccgtccaacctacgtatcctgcccagccgatgtatcccacgcagccgacgtatccggcgcaatccgcctattccccatacccggcgcaacagtcggctccacagcccctcgctcatccgtactacgctcaaccagtgggctacgcgccacaaccctattccgctgcgccgcaaccattcgtgcaaacggctccggcaatgccagtcacaatgcccaacgcaatgcctgccacgatgcccgcagcaatgcccgtggtcatgccgatcgatcctcgccgtgtatggcgcacgtggcgtcgcaaggtggtcaatcgtgtaatgggactgactctcgcctatgaaggcatgatgctcttgggcgcaatggtcgccaccattatcgtcggcgtaataaccgcgagcgatttgtccggcgtgcagtgggatggcatcatcagcctgatatcggtgttcgtcgcgttcggatttctgctgctcatgcgccaccgtgacatcttcacctgcgaattctggcttggtggccagcatcgcgactcgtacggggagcccaatcagcttggccacatcagccaatatggcggcgggcgcatgcagcctctctgggcgttgatgttcatcgtgctgggcatgggtgtgcaaggcatcgttatgttggtgcaggtcgctttttccatgctgggcaccgatcttgcctctcccacgtcagacagcatcgccgaatccagcgtcaccgtaagcatgtggctgtacgttgggctggtcgctccgatttgcgaggaagtactgttccgcggcgtactgatgaaggagctcaagccgttgggcaagaacttcgccatcgtcacctcggcaatggtgttcggcctgttccatgacgacgtagtgcaaggcacattcgcgttcctctttggcctgattctgggattcgtggccatggaatactcgttggtttggtcgattgcactgcacatcttcaacaatgcgattctttccggcgccatcgatacccttgccggcaactatcttgatgacaacgcatatttgatattctcattgtcgctatctgtgatcggcgtgatcggatcgattatcatattcgtgatatacggcaaagagatgcgccaatatcaccgtacgaatcgtagtattccagacacgtactttggctgggcagctccgacgttcatcatctttgtggtagccaatgccgctttcgccattatttcgtttgtcggcgcgatgatgggttgagtgtgcgtgtgcgcatgcaggttggcttatcgttgaagcatgagtgattttgagccgttttacgatgtcagccgcagttacgaagacaactatgagcaagggccgttcggcgcgttcgccgaggcgctgaaggatggcaacggtgccgatgccgccggaaccaccagcgagggtgcctccgagggtgccttggccacctttttgggccagccggtcaacctgcctttcggcattcccgcaggcccgctgctcaacagccgtttcaccacggccgctttccacatgggtttcgatctggcgacctacaaaaccgtgcgttcgcgcgcctggggctgcaacccgttcccgaacgtgctcgccgtacaccccaagtcggcggacggttcactgacgccgggcagcgccgaactggacgaaggcgtgctggccgacaccaactatgaacagccgatttccatctccaacagcttcggtgtgccctcgcagagccctgacgtctggcagccggacatgcgcgccgccatcgaggccgccggtcccggtcaagtgctggtcccgagcttccaaggctcgcgtgtggagggcatgagcgaggaggaatacatcgccgaccatgccactaccgcccgcctggtcaaggagaccggtgccaagctcatggtgatgaacaccagctgccccaacgagggccacaaccgcctgctatgccacaatccgctgctcgtgggccgcatcaccgaggccgtgaagcaggagatcggcgacattccgctgatggtcaagctcgcctacatccccagcgacgacgctctggagcttatggtgcgttccaccgtgggccacggcaccgtgcagggcttcagcaccatcaatacgatttccgccaaactggtcgatgccaatggcaatcaggccctgcccggcgcgggccgcgatcactcaggcgtgtgcggcaatgcgattcgtggcgccggcctcgacatggtcgcccgtctggccgcgattcgtgaaaagctcgggctcgatttcgcgatcaacggcgtcggcggcgtggtctcgcccgccgactaccaggcgtaccgtgacgccggcgcggactcggtgatgtccgccaccggcgcgatgtgggacgccgaactggcccacaagatcaaggccagccggtaaatcggctccaaaaacaagcaacagcctgtacgggccgtgattcccagacgattcccagacagtgcccatgttgcattgaaactgttgctgttatatgtaatcacggccgaacaagctgcataacttaacctctttcttcttctctcctttctctccccggcgcccatcacgccggggtttcttttttgcggtgagtacggccgtcttactcggccgccgccttcatggccacggcgccgacgtagtagaccggcttgtcgaagttcggctggaacaggaagtccacgttggcgagctggtcgatggtgaagccggcctgaatcgccatggaaatcacgtttgccgcgccggagatatcggccttggaacagaactggccgcccttgaccttgcgggtttccgggtcccaggtcagaatcgacgtgactggggtggtggtgagcatgaagtccgggcgataatcctcggtgagcgaggtctcgcggaccgtgagcccgcggcgttcggcaccggcgcgggtcaggccggaggcggcgagcgagagatcgtacagctgcacggcggacgtggcctgcgtgcccatgtacttcacggtcggcgtctcgatgttgcggcccaccagcaggccctggcgcaccgcgttggtggccagcggaatgtaatcgtgctggccggtggggttgtagaacacggtggcggagtcgccggcggcgtacacgcccggcgcggacgcctgcatgtagtcgtcgaccacgatcgcgccgttcggcagcatgtccaccttgcccttgagcaggtcggtgttcggcaggaagccgacggccagaatcgccatttcggccgtgtactcgcccttttcggtgaccacagtgacggtgtcgtcgtcattgtcgcggaactcgaccaccttctggccgagcgcgagcgtgacgccgtgctcctcgaacgcggccgccacctgatcggtgatggtcttatcgaaattattggccagcgggcgatcaaggccgtcgaccagcgtggtcttgacgccggtgacgctgaactgctcggcgatttccgcgccgatatagcccgacccgatcaccactgccgacttggcggttttcgccttttccttgatggcgatggcgtgatcccagttcttgcacagcagcacatgcgggctgtcgatgccggggatcggcgggatgaccgggcgcgagccggtggtcacgaccagtttgtcgaaagcgagggtctgttcggcggggtctccggcctcgtccagcgcgcggtaggtgagggttctggcgtcgaggtccacggacgtcacgtcggtgcgcatgtgcatggtcgcgccggcttcggccagagcggcaggggaggagtagaacattttcttcgggtcggatacgtggtcgcccacccacagggcgatgccgcaggagaggaaggacagcgtaccgttgcgctcgaaaacatggacggtccaatcggggtgctcggcgagaatcgaggtggtggcgaacgtgccggcgtgcgtgcagccgatgacggcgactgtggtcatgaatgctcctttgcttgtggccatggcgtctgatgccattgccctgaatcgtagcgtagaagtatggagaacaccgtggcggcaaatgtgaggaagatcacgttatcggtttgattcgacggggggtatgggatccgttgtgcacggtgatcaaagttcggctggggtgcatttcacggagtcggcacatggcttatggcaaactggacggtagcattttttgaatcttgattgattgaggagagtggcgtggctgagaatccggatgacgtgttgcatgtcgagggcggcaagcctttgaatggcgcgatcaaggtgcgtggcgcgaagaacttcgtgagcaaggcgatggtcgccgcgttgctggcaccgggcaagtcggtgctgaagaacgtgccggagattcgtgacgtgcatgtggtgtccgatttgctacgtctgcacggcgtggacgtggatgtggacggtgcgaacggcattgtgaccatcgacgcctcgcgtgtgcagctggccgatgtggccgacgtggatacactgtccggttcgtcgcgcatcccgatcctgttctccggcccgctcgtgcaccgtttgggtgaagcgttcattcccgcgttgggcggctgcgcgattggcggacgtccgattgacttccatctggagacgctgcgcaagctgggcgccacggtggacaaggaacacaaggacggcatccacatcaccgcgcccaacggcctgcacggcgcgaagatccacctgccctacccgtcggtgggcgccaccgagcagactttactggcggccgtgctggccgagggcaagaccgaactgtcgggcgcggccactgagccggagatcatggatctggtgtgcgtgctgcagaagatgggcgcaatcatttctgtggacgttgatcgcaccttccgcatcgagggtgtcaaggaactgcaggggtacacgcacacgtcgctgacggatcgcatcgaggcggcgtcctgggcgtccgccgcgctcgccacgcacggtgacattttcgtcaagggtgccacccagccggagatgatcacgttcctcaacgtgttccgcaaggtgggcggcaaattcgaggtgacggacaagggcattcgtttctggcatccgggcggggacttgaagcccgtggcgatcgagacggacgtgcatcccgggttcatgaccgactggcagcagccgctcgtggtggccctgacccaggccaacggcctgtcgatcgtgcacgagaccgtgtacgagaaccgtttcggcttcaccaagccgctggtcgagatgggtgccaccatccagttgtaccgcgagtgcctgggctcgctgccgtgccgtttccggcagcgcaactacaagcattccgccgtgatcttcggaccgaccccgctgaccggacgcgacatcgacgtgccggacctgcgtggtgggttcagccatctgatcgcggccttggccgcgtcaggcccctcggacgtgcacggcatcagcctgatcgaccgaggctacgccgacttccgcggcaaactcgaagcgttgggtgccgacttcgattaatttggccgttcctcggctcccctctctgaggggagccacaatttttacaacagcccgtccgcctcaagtgcggcggccatgcggtcgaagcattccttcagtagcgggtagggcatggcaaagttcatgcgtacgcatccatgccctacctcgccgcattcgcggccgtccgtcaacgccacattggctttcttgaagaaatagtcggccgggtcgtcaatgcccagtggcgagaaatccagccacgcgatatacgtgccctgcggctccacatagcgcaccttggcgaatctcgtgcgcatctgctcgttgaccagcgcgatattgcgctcgatgtacgccatcacgccctcgaaccatgccgcgccgccgtcataggccgcagtggtggctatggcaccgatggtggccgtctggtgctcggaccattccgcgttcctcatccatagttccagatcgtccggattggtgagaatcacctgcgcgcacttggtgccgggaatgttgaacgacttcgaggctgaagtggaggtgaaagcctgcatggccgtctgccggttgattgaggcgaatggcacatgcgtgtggccttggtagacgaacggcgcgtgaatctcatcggagaatatacgcacgtcgtacttggcggccaggtcggacaatcgcagcatttcttcgcgcgtcaataccttgccgatcgggttgtgcgggttgcacagcacgaaggcatggcagccgttcgcgaacgcctgctcaatggcgtcgaaatcgaacagccattcatcattgcgcccgctgctctcgccggcgccctcacacagcatcggaatctcaaggacctccacgccatacaggcgcggcacacttaggaacggcatataggccggagtcggtaccacgatggagttaccggtgcgcacgatctcgcgcaggaacacttcgaacgcctccagcacgtccggcaccggacggatgcacgtcggatccacatcccagccgtatcgacgctgccatgcggcgcacgagcgggcgacctccttcttccacgggtcgggaatgtagccgagcgcgccacgttcggtggcctcttcgatggcttcggccacgcatggtgccagaccgtaatccatctcggcgatgaatgcgccgatgcagccggggtaacgggtccatttatccgaaccgacctgctccagatcctcgatggtcgtcacgtcgatgtgattggcatcaaagcaagaggcgccggcggttacgttgctcacagtcgttgactggggaatgttgttcatgctcataacatgccattgttcccggtgcagaagggccgctcaacggtctggctccccgaaatcgtgatggcgttcgcaagcttgcttatcgctgtccgactacttggcactcaaatatttgagtgacgtgcgctcgagctcttcgagcaatgaaccgagcgcgggacgatggtcgccggcacgagtcacgatgccgacctcgcgcgccgcaaaatcgtcggcgatgggacaggccaccagatcgccctgcaagttgatatgcgtatcgagcgccggcaccagcgagacgcccatgccaacctcgaccaggttctgcgtggcccagtaatcatccgtgcagtggcggatatccggcttgaatccggcacgggtggccagtttcaccaaatttgcgcggcaggtggggcagccggcgatccaatgctcgtctttggcggcggacagcggcacgggttcgccggtctcctcgaatcgtttggcgatgtcgctggagcggcggaccaacaatcgcatcggatcgtaacccagcgactggaaggtcagatcgtcgccgatgtgcaggaagttcgggatgctgctgtaccggaacacggcggcggcatcggccttgccttgggaaatcagaccgatcgcctccggcggctccatctgaatcaggctcagctcgatgtccgtgaacatactgagcttgaccacggtacgggccgcgatagtagagcagattgacggtggggccaccaaatgcaggtgagcaaaccgatgatgccgataatcctcgacctcacgggccgcccgctccagccgatcggcgatggcctcgccgtggcgggcgagcatcgaaccggtggcggtgagttccacaccatgcgaggtgcgttgcaccagagtcgaaccgcactgtgcctccagctttttgatctgctggctgatggccggctgcgaccaacccgtggccttggccgtggcggagaacgaaccgtactgttcgatctgccacaacgtgaccaatgattgggggttgagcccggccatatgcacctctttcgcgcgtcgttccattatggccgccgacaatgaccggacgcggcatggtgtcgccgtcgccggtatccttagaagaatgagccctgaagccttaagtgaactgatttccagcattgcccacaacctcgtcgccgccggccaggccggcgcgttgaccgacgagctgatcccgcccgtcggcaagctcgccgtgatgcgcccgaaggaccgcgcgcatggtgactgggcctccaacatcgccatgcagctggccaagaaggccggcatgaagccgcgcgatctggccgagccgttcgccgccgcgctcgccgaagccgacggcatcgccaaggtcgaggtggcaggccccggcttcatcaacatcacgctcgactccgcctcggccgccgccgtggtggacaccgtactcgccgccggtgccgtgaccgacaccgacaagcacctcaacaaggtcaacgaatacggccgtaatgcccatctgggcggccagaccctgaacctcgagttcgtttccgccaaccccactggtccgattcacatcggcggcacccgttgggccgcggtgggcgacgccatggcccgcgtgcttgaggccaacggcgccaaggtggtgcgcgaatactacttcaacgaccacggcgagcagatcaaccgcttcgccaagtcgctggtcgccgcttgggctgaggccaacaacctcggtgaggccggctaccagaccgaaaccccgtgcgacggctacaagggtgcctacatcaacgagatcgccgcccgtgttcaggccgaagccgagtccgacggcgtggacctgaccgcactggcccaccaggatcaaggcctgaacgacgacggcgaaccgctcggcgaggccgacaccgaagtgcgcgaggaattccgcaagcgcgctgtaccgatgatgttcgacgagattcagaagtccatgaaggacttccgcgtgaacttcgacgtctggttccatgagaacagcctgtacgccgacggcaaggtcgacgccgccatcgaagagctcaagtcccgcggcgacatcttcgacaaggacggcgccacttggtttgaatccaccaagcacggcgacgacaaggatcgtgtgatcatcaagtccaatggtgagttcgcctacttcgccgccgacatcgcctactactgggacaagcgccatcgcgccgaaaacccggctgacgtggccatctacatgcttggcgccgaccaccacggctacatcggccgcatgatggccatgtgcgcggccttcggcgacgagcccggcaagaacatgcagattctcatcggccagctggtcaacgtgatgaaggacggcaagcccgtgcgcatgtccaagcgcgccggcaacgtcgtgaccatcgacgatctggtctccgtggtcggcgtggacgccgcccgctactcgctggcccgctccgactacaaccagaacttcgacatcgacctggccctgctcgcctcgcacaccaacgacaacccggtgtactacgtgcagtacgcgcacgcccgctccaagaacgtggaccgcaatgcagccgccgccggcatcagctacgagggtgccgacctggccctgctcgacaccgaggccgacggcgaggtacttgccgccctcgcccagttcccgagcgtgctcgccactgcggccgacgaccgccagccgcacaaggtggcccgttatctcgaagagctggccgccacctatcacaagtggtacaacgtagagcgcgtggtgccgatggccctgaccgatccggaaacccgtggcgacgatgaggctcgcaaggccttggagatcgccaagaatccggagccggcccgtgccgccgcccgcctgaagctcaatgacgccgtccagcaggtcatcgccaacggcctcgacctcctcggcgtcaccgcccccgaaaagatgtgattatgcccatttctccaatttggccggccgctacggctgtgaatgccgacggtgccattacattccacggtcgtaccgccgaatcgctgcttgacgagttcggctcgccgctctatctcatcgacactgatgaagtagtcgcacgtgccaggcacttcgtgcgcgctgccgccgaagcattcaacacatccactacgcacgtgagctttgccggcaaggcgttcctgtccaaagaagtcgtgcgattggtcaccgaggccggcatgttcgtggacacctgcacgatgggcgagatgaaaatcgccctcgccgctggcgttcccggacgtcgtctggtactgcacggcaacaacaagtccgatgaggaaatcgcgctggccatcgaacagggcttcgccaaaatcgtgattgacgagcccgacgagccggagcgcgtcgccgccatcgcccgcaagctcggcaaacgcgcccgtgtgatgctgcgcgtcaccgtcggtgtccacgccggcggccacgagtacatctccactgctcacgaggaccagaagttcggcgtgccgctgctggccgccggggccgacgccgctgtgctcgatgtgctgaacgacctcaaagacgtgacgcctgccgctaccaacgcgcgtatctctgcgacgcattccctggaaaatggcgcggaaaagaccgagaaatcagagcgcgagctgcactacgacgtcaagtacccgtacgacctgagccacgaggaagtctccgacaccgacaaggcgctggccgccgcgatggaagccattgcggacggtccgtccatcgccgtgctcaagaccatcctcgccgaccaggacgtactcgaactggtcggagcccactcgcacatcggctccaacatccacgatgcggacgccttcattcacgcggccaagcgcatgatgctgctgcgcaagaccctgtgggccaccgacgcctacatcctgcccgaaatcgacctcggcggcggctactccgtggcctacaccgatggcgaagattcaatggacattgacgtggaactcactcgcttggcggatgcggtcaacagcaccaaccgtgcgctcggcatgcccgccccggccatcagcttcgagccgggccgttacatcgtggcacccgccggcgtaaccctgtaccgcgtgggcaccatcaagcacgtgcacttgtccgatgccaaagacagtgccggcaacccgattgccgagcgcgtgtacgtgtccgtggatggcggcatgtccgacaacattcgcccggcactctacggtgccgactacaccgcgcgtctggcgaatcgcaccggttccgctgaaacgatgcttgcccgtgtgtgtggcatgcactgcgaatccggcgacattgtggttcacgaggtgcagttgcccgccgatttgaagcgcggtgacattctcgccgtgccggctaccggcgcatacggccgcaccatggccagcaactacaaccaggcgctgattccggcggtggttgctgtcagcgagtccggcgcgcacgtcatgctccgccgccagaccgtagacgacctactcaacctcgacgtcagcgagtaatcagcgtgcagaggtgagcgcctgacagtctgtaatgtgcggccaaaaccgtcataatacgaaaagggccgtcagcttgatgagtactttcggtctgctgtcggaaataatccgtaaaataggcgtgggacatagaaaactttttggaaggaccctgaattggctcacaacagcgaaaccccgattcgcgtaggcctgcttggtgccggcaccgtcggctcccagaccgcccgcctgattgtcgagcagaaggacgaactgtccgctcgtatcggccgcccgatcgaactgaccggcgtcgcctgcctcgacccgaaggaaaccgagaagttcccgtggatcgaccagtccatcgtcaccaccgatactttgagcgtggccaccaactcggacatcgtcatcgagctcatcggcggcaccaccgtggcccgcaagttcgtgcttgccgccatcgaatccggtgcttccgtggtcaccgccaacaaggcgctgctggccaagtacggcccggagatctactccgccgccgaggccaggggcgtcgacatctacttcgaggccgctgtaggtggtgcgattccgttcctgcgcccgctgcgcgagtccttggtcggcgacaaggtgaccagcatgctcggcatcgtcaacggcaccaccaactacattctcgacgagatgaccaccaagggtctccagttcgacgacgtgctcaaggacgcccaggccaagggctacgctgaagccgacccgaccggcgacatcgaaggctacgatgctgccaacaaggccgccatcatggccaccctcggcttccacacctccgtgaccatcgacgacgtgtccgtcgaaggcatcaccaagatcaccgccgacgacatcgccgccgccgccgccgagcacaaggtcatcaagctgctcgccgtggtcgagaacggcgaggccggcgtctccgcccgcgtctacccggccctgatcgacgagaaccacccgctggcctccgtgcacggctccttcaacgccgtgttcgtcaaggccgaggccgccgacgacctcatgttctacggccgtggcgccggcggcgctccgaccgcctccgccgtcgtgggcgacgtggtgaccgaagcccgccacattgctgctggctgcaccggcccgtccatcccgctgtacaagaatctgccgaaggctccgattaccgcctccaaggctgcattcgccgtgcgcttcctgatccacgacaagccgggcgtgctggccgccatcgccgccgagttcgccaagaacggtgtctccatcaacggtgtgaaccaggatctgaagcccaccatgaccgaccccggctacgacggcgagattcagcagttgcgcatcgtgacccacctgaccgacgaggaaaccctgcgcaacaccgtcaaggccgtgcaggcgctcgacttcgtcaccggtgacccgtccatcctgcgcgtgctggactgacaccgtctaggctccctctgatgaggcggtcgaacggctgcccgtgagttgaaagctgaatacccaagctcccctgacaaggggagctcctttttaaggaacaaccatgaacccaatctgcaatagcgttcacgtgcgcgtgcccgccacgtccgccaacctcggctccggcttcgataccgtgggtctggcgctcgactaccatgacgagctcactttcacgctcaacgacgacccgaacgacggcattgcccacgtgatcatccacggcgagggtgccgacaccctcccacgcgacgaaacccacctcgtggtctccaccttccgccgtgcctgtgccacgttcggcctcggccgactcggcttcacgctggaagcgaccaacaacatccctcaggctcgtggcatgggctcttccgccgaggccatcgtggccggcatcgccgccgccgcggccttcgcccagaccggtgacctcaaccgtccggccatcttcgatatggccgcccagatcgaaggccacccggacaatgtggccccggctgtgttcggtggcctgaccgtctcttgggacttcgaaaccgcggaaggcgtcggctcggtcgccgttcctggtggtgaaccgctgcacggcggattccacgccgtcaactacccggtggacccgtccatcaccgccgccgtgttcgtgcccgactatgagctgtccactgagaaggcccgtcaggcgctgcctagggaactgccatacaaggacgccgtctacaacgtgtctcgcgtgggtctgctgcccgctgcgatgaatcccatggtgctggcccaggccgcccagcagggcaagtccggcgtcgccgctgccccggctcaggatgccgatacgtgcgcttgcgctggcgggacccgtgaatcgccgttcgctgacgagcttgcggccgctcaggcccagtccaacgcgctactgttcaccgccacgcaggacaagttgcaccagccgtatcgcggtaccctgatgccgccgtccaccgagctcattgcgctcttccgctccaagggctatgccgccgccgtctccggtgccggcccctgcgtgctcgtgctgcactacggcaacgcccgcgaagccatcgaccagatcgcatcggagcagcttgcttccggccactggcgtgtgcttcacctgcccatcaacaccgccggcgtcgaaatcgagcgtcgctaagtcgaggagaaggctcccgctggcgggagctggccgccgcaggcggtctgagagtggtccgccataccggcagagaccaccctcagtctcacttcgttcgacagctcccgccagcgggagcataaggacttaagtcatgtccattccgctaattcttgcttccaagtccaagcctcgccgtgacgtgctgtattcggcgggtatctgccccacaattcgcgtctcgcacgtggatgagcctgctgcgctggaagcggccgcccgtgaggaaggtgtcaccgtcgacgatttgagcatcaagcagcgtgtgatgattcttgccgcagccaaggccgaggccgttcaccgtgcgtatcgcgatgtggccaatactgccgccgccgcaaccggcgatcgcgtgattgcctacccgctcaaggccaaggaaatcaaggattcggaacgcgaagccgtcgtcgaagacctgcgcaaagccgccgctggccagcccatcgactattccaaggcggaagtcgccaccacgcgcgacttctccggcatcgacatgccgaccatcaccgaacccatcgccaccgctattgccggacagtcgggactgaccgaggcgacggtcggcccgctgattctcggctgtgattcgatgttcctcctggacggcgaatgctacggcaagccgcacagcgaagccgtggcccgcgaacgactgaagcgcatgagcggcgcgaccggcgaactgtggaccggccactgcctgatcgatttcgcgaccggacgtaccgtgcgcggcgcaagccatgccaaagtccatttcggcgaattcaccgatgacgacatcgaacggtacattgccaccggcgagccgctggaagtcgccggatcgttcacactggaaggcttcggcggcgcgttcatcgacagcattgagggcgatccgcacggcatcatcggcctcagcctgccgttggcccggcatctggccggcgaactgggcatcacgtggaccgacctgtggaatgtcggccgtggcgaactggagccggaaagcaaggcctcgggcaaccagcacgctggcattctgccgccggtcgaaaacgtgcatcagcccggcgatggctgggtggactgcgcctgcggccgcaagcattggggcaccaacggtgcgtccggcattctgctggctcgccgcgacccggcgagcggcaaggtgactcacgtggtcatgcagcaccgtgccgcgtggagcgccgaaggtggcacgtggggtatccccggcggtgccactgcggacggcgaatcgtccatcgaaggcgcgctgcgcgaaagctacgaggaagccaacatcacccccgaagacatcgaggtggtcggctcctaccgcgaggaccatggcccgtgggcctacaccaccgtgtttgcctttgaaaagcccggccacaccgtcgagcccaaggcaaacgacgacgaaagcatggaaatctgctgggtcccgattgacgacgtgcccaaccgcaagctcctcaccgctatgaagaccgactggccccgcttcgccgcccgcctggacgagctggcctgtgctggacatcggtagtggtgttggctgggccaatgttttgccgatgagtttacttgggtaatgccgtgtggaccgcgtgtggaccgggacggattctgctgtcccggttcgtcatttcgtctcttttgggacaaccgggacagatttcgctgtcccggttcgtcattttgcctctttttgggcaaccgggacagaatctcattcacctgacgccctatcgtgcgatggtcgccgtcggggaatggcggaattccggtgttttggatttgcatatatcgggtgttcatggaagggcctgtcccggttcgccaaaagaggccgaaatcccgaaccgggacagccgaatctgtcccggttcgtatgtcgatcgattgaccccgccaccgggacatcaaccgcgcatagacaggacgcttcaatgtctggcgggcatgaccatatcggatgacacacgttccctcgtgcgtttcgccacgacctccgccccaagtcagtgcgaaaatggcatttttagcggtgtggtcagctgtcgcatgcggaaaatcctaaatcaaccgccgaagagacacatcgccgactcggcggaactcgctggtctgcgcgcaatgaggagtgttgtgtctgaatgcgattcagacaatggtcggcgtcaaatagcggtctccagccattaatcattggtgattgtggacattgagcggagtaaacattctagatgattcagggatatgccgaaaatcatatcgttcagagaatgaagtaccgcatctcggagtaactgactgtcgacgtgcatggtctgaaatctgatatccacgcccatcatgcctagcaaaattacgggaatggggttcgaactatttcgcctcagccaaccgggagcttccgaatgctcaatgctgtatgcacttagtgtgtggaaaccagccaatcattgaccaatggcaggccgcagtcgaaaccagaaatatcctcgctcgcagtcaggtgccgaggctcagtgaagttggtcacgtccatatgggatcacgctccaacaattcattcagacgtaggcccataggttcgtttaatgctgcggtgaaatcattccacgctttactgttgggccgaatgatatgagcttcatggatgtcccgatctgcggcggcgagcagattcgataatgcccattgcaacgaagtcatgcctttggactcggccgcttggtcgattctggaacgttgctcttaggtgagtctcatttcaaaacgactgttcttgttattctctgtagtcatactcctgttgtacgacttttgtacggacacgattggtgtgtgcgggatgtcgattgcgatggccatgtgggctcctttgcttggtctgttgtggttccagcttccgaaccggtcttccactgttcctcgtcttctcgagcaatgaacatctgatatatggattgtcgcgtcgactgcgtatctctaatccttgcggatgaggagcgggccggtgatccagaaaggttcataccgcagcccgatggtcggctgggcgttcgctccgtacgctcgggagtatgaacacagcagcatcgcaattgcagcagcctcagccggcgtcgggaccggcggctcagcctcagcagtctcagcaaccccaacagttccagcagccggcatcgcacacccagcagtgggccccggtcatcgaggcgcacgacctggtcatggactacaccgccagcatggcccgcgcacaggcagggcacggcgtcaccggcgtgatgccagccggcacgggagccggttatgcgtcggcgaatcccgctgcggccggaccgggtgccattcaggccggccagccatcccagccagcccagcccggcttcgccatgccgaccatgcacacgctcgccctgaaccacgtgaacttcacgctccgggagggtgagacagtagccgtgatgggcccgtccggctccggcaaatccactttgcttcacgcgttggccggcattatcaagccgactgccggcacggtcgtcttccgtggcactgacctgagccatatgagcgacgccgaccgcaccaaactgcgtcgtaatgtcttcggattcgtcttccaatccggccagctgctgcccgaacttccggccgtcgaaaacatcgccctgccgataatgctcgacggcatgccctaccgcaccgccacggacacggcgatcctgtggctggaacgcatgggattgcgcgcgctcgccacgcaccggccgggggagatgagcggcggacagatgcagcgcatcgccatcgcccgtgcgctcgccgtcaaacctgccgtggtcttcgccgacgagccgaccggcgcgctcgaccaagccaccggccgcgaggtcatgggcattctcatggccgccgcgcgggacaacggttccgccgtggtcgtcgtcacccacgaccccaacgtcgcttcgttctgctcgcgcaccgtgaccatgcaggacggccagctgggaggcgtacgatgagcgctttcgcattgtggcgattgttccatcgccccggctcgcgtggcagtgcgggtcatacttcggtgttggccatcattgcttttgccgcagccaccactatctttctcaccgttttgggtggcgtgcatgggttcatgtggcgcgcctccgccgaccacaccattggatgcgcaatcaatctcgacgcttgcaaacccggaacagcggaaatctggaagcagcgtatcgccaatccccacagcctggatcaatacgccacggcatacgtcgtgctggcgttctttgcctgcctgctgctgattgtgccgttcgtggcgcttgccggttccgccgcgcgattggctgcgtcccgtcgtgacgctcggctcgcatccctgcgcttggcaggcgcgaccacggggcaagttattcgccttacggcgcttgatgcggctgggcaggccttggtgggggcgctgattggcatcgcggggtactgcgtgttgatccccctaatcatgttgctgcatttccagaatcagacgtttacgttcgagcaactgtgggtggggccgattgccttgatcattacgcttgttggcgtgaccgtgttggcgctgatctcttcgctggtcacgcttcggcgcgtggccatcacgccactcggcgtcacttcacgcgttgcgactacgctgccgtccggctggcgtgtggtggtgttcgccgtcatcatggtgattgccgttcttctgttcaagaatccgatggtgctggctcaggccggtgaagtagtgatgtatggcgtgatcatcggtttcatgctgctgtgcttcgcgctggtgaacctcgtgggctcctgggtggtcaccgctcgcgccaaggccaaggccaagcgccccaaggatgcggccacgatgattgccatgcgccgtattctcgacaatccgaagcgcgcctggcgcaatgtgtccggcattgcactggccgtgttcatcgccggcatcacctcgatctgcggattctttggctcggccgccgtggtcggtgacgccaacgacccgtccaccgtgttcattcgcgacatcggcaccggcggcatcctgacgctagtgttcgccgctgtgcttgccgcggtcagctccggtgtgatgcaggccggcagcgtgtacgatcaggccggcgaatatcgcatgctggtgttggagggcactgatgtcaagaccttgaaccgtgcgcgattcatcgaggtactcaccccgctcaacatcgtggtgatcgtggccggcggctgttccatgctgcttatggcccctctgttcgccgcttcgatgaccgaaccggccacgctggccagcttcttcggcgggcttgcgctgtgctatgcgctggtttcggtgggtgcgttcgcgtccaatcgggtggccgccagcttgaatctggccgattatcgggccgatgactgaggcggtacggtactttcccgggtgacgacactggtggggaggatgacgtgcatatcaccctgattgcccttgcggctgtcgatgatcatctgcacggcgcgttgggctatttcgctgaacggctgatgcacgctggtcagggagggcatgagttggccggcggggaaaatgtcgtcgaaccccatgacggacaattgctttggcaacgcgatcttatgctctcgtgcggcacgatacgtgcttactgcagataagtcgttgcagcaaaaaatcgcggtgggtcggtcggtgagttccagcagccggcaggctgcttcatagcttgtttcggcggggaagtagtcgccctgttcgatataggactccggcagatccaccccggcctgttgcagagcggcggtgaatccgctatagcgcgcgatgctggtctgtaggttcgccggcccccggataacggcgatgcgtcgatggccgagcgacagcaggtgtttgccggcctggtatcctgcggtccagttatcgatggacacgctcatcacatccgaatcgacggtatcgattgggtcgatgatgaccacgggaatactgcgcgatttcaacaaagacttcgcttgagtggtcagaccgcccatctgctgcataatcacaccttggggatttctatcgatgatgccgcggaaacagtcttccgtggcatcgccatggttggtctgggtgaccgtgatggcgaggcccgcctgctgcgcccagtatgaggcgtatttgatgagttccatcgtgccgttgtgctcaatgtattcgacgacgagctctatggtgggggagagtttggtgttgaccagaggccttgagtaaccgtgatctttgaggatttgctcgacttgtctccgcgtctcgtcggaaatgcctgacctgccattgatgactttggaaacagtggatgcggatacgccggcgatttttgcgagctcgccgaccttgagcttgtgggtggatgtatcgttaaccatcggtgcttccctcttggatattcgccgttcaattactgagacgatttcgtcgttgttcccaccattatgacgcattgtgccgtaacaattccgtgttttcttgccctttgtccggccttgaataaaaattttcgcaaataggcttgcaaatttctttattcggacgtacgatatagccgttggttcacaccaggcgaaggagcccgaacacatgagtaccatcaccaaagtcaagacgtatgacttccgattccccacttcaacgacgctttccggctcggatgcaatgaaccccgatccggattattcctctgcgtacgtggagatttccaccagcgccgacgacggcatcacgggtgtgggattcgtgttcaccatcggccgtggcaacgacgtggtttgcaaggccatcgaatcgatgtcgcaggtgctgattgggcgcaacaccgaggaactgctcgacaacatgcgcattgcatgggacctgttcgtgcatgattcccagctgcgttggcttggccctgaaaagggcgtggagcatatggccatcggcgcggtgctctccgcgttgtgggatatcaaggccaagcgtgcgggcaagccgttgtggctgctgctgggcgagatggagccggaggagctggtctccacgctcgatttccgctacatgaccgacgccctgcgccctgaggaagccgttgcgattctcaaagagggtcagaagggcaaggccgagcgtatcaagcatctgctggaggtcggttaccccggctattcaaccgctcccggttggctcggctactcggatgagaagatggtggccctcgccaaggaggagacccaggtcaagggcttcaagcagatcaagctcaaggtcggccagaacatcgacgacgatctgcgtcgcctggccaaggcccgcgaagccatcggccccgacgtgcgtcttgccgtggacgccaaccaggtgtgggatgttcccaccgccatcgactggatcaacaagttccacgacttcgatctggcttgggtggaggagccgaccagccccgacgacgtgatcggccacgccaccatcgcccgcgccatcaaccccatcaaggtggccaccggcgagcagatgcagagccgcatcctgtacaagcagtatctgcaggccaacgccttcggcatcatgcagattgacgccacccgcgtggccggtccgcaggagatcgtgctcgaatacctgctcgcgaagaagttcaacaagcccgtctgcccgcacgccggcggcgtgggtctgtgcgaggccgtatgccacttcgcgatgttcgattatgtggccgtgtccggcacgatggacggccgcatgatcgaatacgtcgataaccagcatgaacatttcgtccacccgaccgagatcaaggacggcaactacgtcgctccgaccgctccgggcaacggtaccgaaatgacgctggagacggccgagaagtacctgtatcgcggctgaccgcaactggaaattcataactgaacaacacaactcaacacaacaacacacaaccactccggctggggtgccgaagccccggccgggcgtgacatggaacacccatgaaacgcagaataaggatggacgaaggagttcccatggatctgcatctcgaaggcaaagtcatcatcatcaccggcggtttcaaaggcatcggcaaaggcatcacgctgcaactggcccaggagggggccatcccggtggtgattaatcgacccgacagcgctctcgacgagttcaagaaggatatcgagcagtacaccaccacctatgatgtgcacttgcttgacctcaacgacaccgacaagatcgccggcgtcgtcgaagcaacatacaagaagtacggccatatcgatggcattgtgaataacgccggaaagaacgacaacaaggatctcgagaccactacttggcgtgagttcgaggaatcgcttcacggcaacctgactcactattacgagctggtccacgcggccgtgccgtatctcaaggaaagccgcggatccatcgtgaacatctcgtccaagaccgcgcttaccggccaaggcaagaccagcgcctatgcggccgccaagggcgcgatcctgggcctgacccgtgaatgggccgccgcattggtgcacgatagcgtgcgtgtcaacgccatagtcgtctccgagtgctggaccccgctctatgccgattggatcaagacctttggcgatgaagcggcccagcaggcgcgcctgtcggtgatcaccgacaagattccgctggaacatcgtatgaccaccaccgaagagatcggtaatgaagcggcattcctgctctccgaccgctccagccacaccaccggtcagtgggtgtacgtcgatggcggctatgtccaccttgaccgtgcgctgagctgacaagcagccctttcccgaatattcgcgcggcaattccggagctttgatcattgctccatccgtacgccgtatccgcgtatgccgcccgtatcacccgcgccctgggtcatccgtttaccaacatggcccagggtggtccacttctcgctaggcaatatcggggaaactcgtatcactaaggagtcaatgatgacatccaaaaacacaaccggttccaaggcgaccatcgccattgtgctggtgacctcactgttctttatctggggtttgaccatgaacctcgtgaacgcgttgaactcgccgttcgcaaactacatagaactcagcagcgccgaagcgtcattactgcaggtggcctattacggcgcatacttcgtcatggccattccggccggcttgatcgccaagcgtttcggttataagggcggcgtcatctccggtctgttcctgttcgctctgggcgcgttcatggtgatccctgccaccaacatggccagctacggtctgttcctgttcgccatgttcgttatcgcgctcggcgcggcatcgctggagaccaactgcaatccgtatatcaccaagctgggtgatgaaaagggcgaatcgttccgtatcaacatggcgcagagtttcaacggcgtcggcaacatcgttggcccgctgattcttggccagattctcggcaccaccgtcgcatcaggcgagtccggcttcgacgccgctaaggcgcagttcctgaatgatacccgcacgatatacattgtgatcggcgttgtgctggtcgtggtgctcgccgtgttcgcgctgttcaagctgcccacgcctccgggagacgaagaggaggccgcgggcggcgcctcctccgagaacagctccttcttcggcctgctcaagcgcccgcacttcgcattgggcgtgcttgccgagttcattttcatcggcctgcaagtggccggcatggcggtcttctccgcctacgcgctcaagcactggggcgcgggcatcacagccggcaccgcggcgatgatgctttccgtgctttccctgctgttcaccatcggacgcttcgccaccaccccattgatggccaaattcgatccctcgaagattcttggcgtatacatgaccatttcagccgtgctgatgttcgtggtattccttggcctgggcaaggtctccgtcatcgcgttcatggtggcgtatctgttcatttccatcggatacccgaccatattctccctgacgctgaaaggtatcaagggttccgcggcgaagaccggttcctcggctttggtgatgagcattgtgggcgccgcgttgattccgctgctgctcggtgtgattcaggatgcggcaggcatcgagatcgccatcctggtgatggtcccgggcttcctgttcgtggcatggtacgcattctggggttccaagatcggtctgaaggaggcctgacatgacactcaacgtaatcgattcccacttccatatctgggatccggatgcgcaggatctgccatggctggcaggattgccctcgctgcaacacaagtacacgattgaagacctagccgcacagtacgccaaatttggcgtgaatttcctcggcggcgtatacgtggaggttgacgcggccgaccatgagctcgaggaccggttgttgtacgagaatgccagccctctgatcctgaagcgcatgttgcaaggacgggtaagcccttggatgcgtgtcccgatcaacgccgatggcatcagggaaccgctgcatgtggattccgagccgcggggccgtgcgctcgaacccgaattcatcgccggtctacgcgcgatggccgccaagggattgccattcgagctgtgcaaccggggcccggagttgggcgacatggccaaggcgttctcgcaggttcccgaagtgacggtcatcatcgatcatctcggcaacgtgcccgggcttgatgaggaatcgtgcgccgcgctcgcagcgttggccgaactgccgaattcgtatatcaaggtttccggcgacaacccggtggacccggacatcgtgaaatacgtgcgggacacattcggcccgaagaaggtgctgtacagctccaactggccggtcgtggaactcaactcgacctttgccacgcacttccaactcatgctggacacgttcggcgaggacgaggacttcttcgaaaacaacgcccgccgcgcttacaacatcgactaaacccaagccccctctgatgagggggctatcgtccgcaggacgactgggggagaggccgcaaactcggtgccgcttgtgcggcacccctattccgtaacgaaaggaacaatcatgacgagcagcgccgaattctcaggcatcatctgcccatccatcaccatcaccaaggacgacggtgacatcgactatgaacgctgggggcagcatctcgatcatctgatcgaggccggtatcaacggcgtgctggtgtttggcagcatcggcgagttctatgccttccctctggacgtcaagaagcaggcggtcgacttcgtggccaagcatgtcgccgggcgcatcaaggtgttcgcgggcgtgggcgataccaacttgaacaatgtgatcgacttcgcgcgggcagtcgaagcaagtggagtggatgcgctcgtggtcgtttcgccgtattacttcggccctactgcgggaggcgcgaaggcgtacttcggcgcggtcgctgaagcgacgaatcttccggtgatcctctataatttcccaccgcgcaccggcagcgacttgaccccggagctcgtggccgagcttgccgccgcgcacccgaacatcgtcggcatcaaggacacggtcgacacaatcagccacacccgcaaggtgattcgcgcggtcaaggccgtgaatccacggtttgcggtgttctccggtttcgacgagtactatctcgtcaaccgcgtctccggcggtgatggcgtgatctgcggcatgaccaatgtggagccggagaccttcgttacgctgcaccgtgcatatgaggccggcgactatggcaccgcaattgaggccgccgaacgcatcagccacctgatggcgctgtacgatcagaccgacctgttcatctccgccatcaagggtgcggtcaaggccaagggactgaacatttccaccctgatccgtgagccagcggtgcaactcactgctcagcagtatgaggcgattaaggcgattctcaagtagcgtatatctcaggcttccgcggaatcctacggtggatttcgcggaagtttttttacggtgattacagttgccggctcagctcagcagcgccgcgatgatcgcgataaacaccgggctggtcatggtgctcatcagaatgccgtcgcgcgcgaaggtgaggcccacgttgtagcgggccgcgtagttgtacacgttctggccggtgggcagagcggcgagtaccacgcaggcgtacagctcggagccgcggaagcccatcacgaaataggcgagcaggaacgcgatgattggcatgatgatgttcttgaggaccgcgaccgtgaagatggccgggcgatcgcccttctgctgcagcggcttggtgccgtgtagggacatgccgaacgccatcaggatcattggcaccgctgaatcgccgatcatgtcgatcgggtcgaaaatgaatttcggcactgggaaccagccgcttttagcggaaatcgcagagaccacaatgcccagcagcgaaccgataagcagcggttgatgcagtggctgcttggcgatttccttgatggagaccttgcccttggtggtcacgtccagcactgtcaggcccaccggtgtgaagatggcctgctgcatgaccagaatcggtgccaccagagccggattgcccagaatgtaggtggcgattggcaggccgatgttattggaattgaggtacagcgaattcagggcgccgatggtggcgtccggggcgttcaggtggaagaacatgcggttgagcaccaggaacaccacgcctaccagcacggcggagaagaacgccacgataatcgagggatggaagatgtcgaagatcggttccttggagaggatggcgaacatcaggcacgggctcgatacgaagaaggagaaacggttgagcaccatctgagcggacggcccgccgattcgcattcgtgcggcgacatatcccaccgcaatcacgatgccgataacgcagaagccttgcatggcgctgattagacctgacataatcctccctttcgccaccccagtgtggcacataaaaatgtattcggccgcaaaatctcatgtagtgggtgtgctgggcccgccgcccacgcggtacgctgttcacatgacgcttgaattgaaccgcaccgcatccactgccgagcagctgaacagcctgctcacccagatcatggagaacttctccgtgtccgaccacgagggccccctcaccgacgaggtcgaggccttccttaacgagcaagagcacctgaccgtccgccgtcacggcgacacagtggtggccagcaccgacttcggcgagccgaaccgtgtgatcttggccgggcacctcgatactgtgccggtcatcgacaatttcccaccgaagtggctggagcccggcgattcgctgattcgcgaagaaatcgcccacgctcatcccgaagaccgcgtgctgtggggccgcggtgccaccgatatgaaggcctccgacgcggtgatgctctacctcgccgccacgctcgacggccgcacgccggaaaccaccccgaaagtcgacctcacctacgtcttctacgaccatgaggaagtcgtcgccgaaaagaacggccttcgcaaagtcgtcgaggcccatcccgattggatcaccggcgatttcgccatcatcggcgagcccaccaacagcggcatcgagggcggttgcaacggtacgattcgcttcgacgtcgtgacccacggcgtggcagcgcactccgcccgcgcgtggatgggggagaacgccatccacaaggcggccgacatcctgagccgactcaacgcttacgagccggccaccgtgaacgtggacgggctcgactatcgcgagggcctcaacgccacgctgatttccggcggcaaaggcacgaacgtcattccggatgaatgccgcgtacacgtcaactaccgcttcgccccggacaagtcgctggccgaggccaaggctctgatgatgggcgcggatgccggtgccgaactcggcaatggcgagcatgtggccactggcggcgtgttcgagggctacggcatcgaaatgaaggacgaaagcccctccgcgcgcccgggcctgaacgccccgctcgcccaagatctggtccgactggtcaaggagcgcaccggccgcgacccgttggccaagctcggctggaccgacgtggcacgcttctcccagctcggcatcccggccgtcaacctcggtgccggcgacccgctgctggcgcacaagcacgacgagcaggtgcccgaatccgacctggccgccatgaccgcaattcttgccgactggctggtctgacacctctctagctcccctctctgaggggagctgtcaccgcagggaggggagccgagagaacgtcagcctcgccgggccacgcccgcacaaaatatgtggcatactaaaggatggtggttctgcataaccatcagcgtgcgagatggcgtcgatccccttgcggctctcgagaatgagacaacgcaagcgccggtgtccgccacccgcaggacagacttgagacgaagttgcctttacgcggcgcgttttcgcgcggccacggtgagagcgtggtgtgagtcaagcgtataggcctggaaataggcgtcgtgatgcagcgcgccgcgaggagcattgtgcccactgacaaccgtgaaggtttcgtcaacgacggaaccgataattcaaccgtatccaatgccgattcggctgcagccgtgaacgctgcgcctgccgccgcctcccagcccgtcgaacctgttcgccgtcgtcgtggcggccgccgcgtggtccgcggcaccggtgctgccggcgcctccctggaactgcaagtgcaggaacgcaccccgctgttcgaagcccccgcgcttcccaatgccagcaccgcggccgattccaagtcatccgattccggcgattccgatgaacccagcgattccaaggattccgccgaacgtccaacccgccgccgtacgcgccgcgtttccacggccgacgatgccgccgaaacgccgcgtcgcacccgtcgtacgtccgccgcatcttccagcgataccgatgatgacgacgagactccgcgccgttcgcgccgcgccgcttccgcagtggccgacttggatagcgaggatgatcgtccgcgccgttcgcgccgcacggtcagtgccgatgatttcgatgacgatgacgccccgcgttcccgccgccgttcagtcgtggacgatgacgattacgacgaggaccgttcggttcgccgccgctctcgctcccgccagtccgacgatgatgactacgaggatcgcccggttcgctcccgcctccgccgtgcgcctatggatatggatgatgatgacgaagaccgtacggttcgccgtcgttctcgccgtgcagttgcggatacgcacgaggacaccccggatgagcgcctgttcgacgcggtcgaatccctgccctctggccacgagaccgtgcgccgtggcaagccgatgacgtccctgctgttccaggaaccggtgctgcccgccgccgtggatgcgcacgataccgctgacactcgtgatgacgatgttgacgccgacgaacgcccgtctcgtcgctcccgccgctcgcgcagccacgacgatgacgatgcccagccgcgcagccgtcgccgcgacgatcgcgacgaccgcggccgcgcctccgccgaccgtgacgcttcccgtgacgccgcgtccggcgataccaacgccgatcacgacgatttcgacgccgacgacacctcggactcccgccgtccgcgccgctcccgccgtctgaacgcccaggagcgccgtgcagccgccgaagtcgagcagattgaggaagacctcgagctggacgatatcgcctactcgccgattgccgaggaggagggcgacgaggaatccgacgtcacccgcacccgttcgcgccgtcgccgccgtcgtggctcacgcggcgaaaccggtgccaacggcgagcacgataccgccgagaacgatgccgaggatacgcgttcccgccgtcgtgacgatcgcgatgatcatgaccgtgatcgcgatgaggacgatgaggagcagaccgtcactcgccgtcgccgccgccgtcgtggcggcaagaacggcgagggcaccgacgaccagagtcagaacagcgaacagccgctggtccgccgctcccgcaagcagcagtacatcgacgaaatcaccgatgtggaaggctccactcgtctcgaggccaagaagcagcgccgccgtgacaaccgccgtgagcgcagccgccaaagccagcttatggaacaggacttccttgcacgccgcgagaacgtggaccgcctgatggtggtgcgcgagaaggaacaccacacccagatttccgtggtggaagacaatgttctggtcgagcattacgtctccgacattcaggaagtacagaccgtcggcaacatctatcttggccgcgtgcagaacgtgctgcccagcatggaggccgcattcgtggatatcggccagtcccgcaacggtgtgctctacgccggcgaggtcaactgggatgccgctcgtctcgaaggtcagccgcgccgcatcgagctggcgttcaagtccggcgacccggtgctcgtgcaggtcactaaggacccgatcggccacaagggtgcccgcctgacctctcaggtcacgcttgccggccgcttcctggtgctcgtgccctccggtggcatgaccggcgtgagccgcaagctttcggagcgcgaacgcagccgtctgaagaacatcgtctccaagatcgccccgaaagacatgggcgtgattatccgcaccgcggccgaaggcgcatccgaagacgccatcgtcaaggatctcgaatcactggtccgccagtgggagcgcatcaacgccaagcgcgaggaattctggcacggcaagcgcccgaaactcctgcagggcgagcccgacgtggccatccgcgtggtgcgcgacatcttcaacgacgacttcagcaagctcatcgtggaaggtgacaaggtctacgaccgtatcgaggaataccttgacaccatggcccccgacctgaaggacaagctggagaagtgggacccggccgagcacgaaggcaaggacgtgttcgacaaatggtccatcgactcccagctgcgtaagggcatggaacgtcaggtctacctgccgtccggcggctcgattgtcatcgatcgcaccgaggccatgaccaccatcgacgtgaacaccggccgctttatcggcaagggcaagtccttggaagaaacggtgacgcgctgcaacttggaggcgtctgaagagatcgcccgccagctgcgcctgcgcgatatcggcggcatggtgatgatcgactatgtggatatggtcatgcccgccaaccgcgatctggtgctgcgccgcttggtcgaatgcctggcacgcgaccgcaccaagcatcaggtggccgaagtcacctcgctcggtttggtgcagatgacccgcaagcgcatcggccagggtctggtcgaggcgttctccgaggaatgcccgacctgcaagggccgtggtttcatcctgcatgatcagccgaccgtttcggccgactacgacgatccctacgcgcttcgcggtggcgacccgttcgtcaaaaccaacaagcacggtcgcggcaccgctcccgctcccgaaccggctggttccagcgccgacgtcaaagccaaactggctcagattgccgccgctgccgtcgccgccaacaatacggcggaagagtaacaggtgtgtcgtgcttgacacgcgggcaaaaatcatttgatttagtccgcatggtggtgtagatttgaaactcggtgtctgaccgcaggctcggtgcgtgttaggcaaggtagctttccaaaacataaaaggaacgataatgtacgcgattgtgaaggccggtggccatcaggaaaaggtcgaggttggcgacgtcatcctcgtgaaccgtctcgacgccaagaagggcgataccgtggaattcccggtctccctcgttgtcgatggtgacaaggtcaccctcgccgccgccgatctggccaaggtgtccgtcaaggctgaggttgtgaacgatgaagccaagggcccgaagattgacatccagaagtacaagaacaagactggtgttgctcgccgtaagggtcatcgccagaagctgactatcgtcaagatcacggcgattgcctgagttatagaaaggaccatgaatcatggcacataagaagggtgcgtccagctctcgcaacggtcgcgattctaacccgcaatacctcggcgtgaagaagttcggcggcgaagccgtcgtggccggcaacatcatcgttcgccagcgtggcaccaacttccacccgggccacaacgtcggcatgggcaaggaccacacgctgttcgccctcaccgatggctccgtgaagttcggtgtgcgtcgcgaccgcaaggttgtcgacgtcatcgcctgagcgatatagcgtcaagctttttcaagccgcgcccgtaaggacgcggcttttttgtaaggtaatcaatatgagtgattttgtggatcgagtaaccgtccatgtcaagggcggcgatgggggcaacggttcggccggcatccgtcgtgagaaatacaagccgttggccggtccgaacggcggcaatggcggcgacggtggttccgtggtgttcgtggccgaccgtaacgccaccagcctgctcgactatcgtttcatgccgcatcgtgtcgccggcagcggcaccatgggtttgggcgacaataaggacggctccaagggcgaggacctgattctgcccgtgccctgcggcaccgtcgtctttgaggcgcgcggcgaacagggcaaatccaagcatcccggcgcacagctcgccgacttgcgtcacgagggcgaccgctgcgtcgtcgcccagggcggtgccggcggcctcggcaacatcgccctggccaacaagacccgacgcgcccccggcttcgccctgctcggcgaactcggcgaggaacgcgacgtgattctggaactgaagtccatcgccgacgtggcgttggtcggtttcccctcggccggaaagtcgtccctgattgcggcgatgagttccgccaagccgaagatcgccgactacccattcaccacgctggtgccgaatctcggcgtcgtcatcgccggcgactctcgatacaccatcgccgacgtgccgggcctgattcctggcgcctctgaaggcaagggcctgggactggagttcctgcgccacatcgaacgtaccgaaatcatcgcccacgtgattgattgcgccacgcttgaaccggaccgcgacccgatgtccgactaccacgcgctggaaaacgagttggcactctacgccgacaagctcgaactgccattgggcgccatcccgattcccgaacgcccgcgcatcgtgattctgaacaagatcgatgtgcccgaggccaaggaattggccgagttcgtgcgtccggagttcgagaaactcgggctgaaggtctttgagatctccaccgcctctcatgaggggctgaaggagctcaacttcgcgttgtctgcgctggtgcatgagatgcgtgaggaagtggccaaccgcgagcaggccgaagaggagacgcgcgtggtcatcaagccattggagaccaagggccgccgtccgcgtcgcgctgacgagggcggcagtgcgcttgagttcacggtcgagcgccgcgaactcggcaatggcgaagtgttcttcgaggtgcgtggcgtcaagccggagcgctgggtcatgcagaccaacttcgacaacgacgaggccgtgggctatctggccgaccgcttggccaagctgggcgtggaagacgagctgcgccgcaagggtgcccaccctggtgacgaggtgcgcatcggtcgcggtgcccgtatggtcgaattcgattgggatccgaccatctccgccggtgccgaaatgctcgacggctccaacctcggtgcccgaggcaaggatctgcgtcttgaggaacaggacccgcgcacgcaccgccgctccaacgccgaacgtcgtgcccaataccacgagatgatggacgcccgtgccgccgtgcgcgacgcgatgatggccgaacgcaaggccggccactgggccgacccgaccgttgacgacgatcgccatgacgaaaccagtctgttcggccacggtgagtccagcgaagatggtgaaaccgaggaataaatgagcactccgagtcaggccgaggtgcggcgcatggtcgcagcagccggaaccattgtcgtgaaagtcggctccagctcgctgacccagccgagcggtcacctcgacccggacaagctcgacgctctggccgctgcccttgcccaaatacgactgatgggcgggcgtgtagtactggtttcctctggtgctattgcggccggcttcggcccgctgggctttgacgaacgcccggccgacgtggctactcagcaggccaccgcagcggtcggccaaggtttgcttatggctcgctacgagactgcttttggccgtttcggtattcgcgtcggccagattctgatcactgccgaagatacgattcgtgccacccagtaccgcaatgtggaacgcacgctggaccgattgctggaccttggtgtggtccccattatcaacgaaaacgattcgctggcgtccaacgagattcgattcggcgataacgaccgtctgtccgcattggttgcgaacctagttcgcgcggaagctttggtattgcttaccgacgtggacgcgctatacacggcacctccttcccagcccggctcccgccgtgtggaatatgtgcccaacgttatcgatgcatttggcgacatccaggtttccggctccggctccaaggtcggcaccggtggcatggtcaccaagcttgaggccgcgcgcgtggcggccgtctccggcatccccacggtgctcacttgcgcctcgaacgcgggccctgcgatgatgggcgatccggtgggcaccgtgttcgcaccggttaaggcccgcggctcgtcgcgtcgtctgtggattggcttcgccgccgacccgcgcggcactattgtggtcgatgcgggtgccggccaggcgattcgcggcgggcgtgcctcgctgctggcggccggcgcgctcgaagtgcatggcgatttttccgccggcgatccggtctggatcgatgccgaaagcggcgaacacctggcccgaggcctcgccggcttcgattccgaagaaattccgcagatgctcgggcgtaacaccgcccaactcaagcgtttcctcggcccccagtacgcccacccactggttcatcgcgacaatcttgtacttgtgtgactgatgggatctgtcacacgacagatcccatcaccatagtgcggctctggcgatttttcgtgctgtaggtttagcatggaagccatgactatggcgcaatggcagactctttccgaccgtatcaacactgtggcaccgagcgctacgctcgccgtcgattccaaggccaaggccatgaaggccgccggacttgacgttatcggcttcggcgcaggtgaaccgaatttcccgacccccgcaaacgtggtcaaggctgcggcagatgcctgccttgacccaaagaattacaagtacacgcctacgccgggcctgcccgagctgcgcgaagcgattgcggctaaggtgctgcgcgattccggctacgaggtgtccgccgaccaggttgtggtgaccaacggtggcaagcaggccgtgtatgaatccttccagatcttgctcaacgatggcgatgaggtcatcatccccgctccgtactggaccagctatcctgaagccgtcaaattggcgggtggcgtgccggtcgaagtattcgccggtgccgacgtgaacttcgagccctcgcttgaggcgctggaagcggcccgtaccgagcgtacgaaggcaatcatcgtcaactccccgaacaacccgaccggagccgtctggaagccggaaaccgtggaagcgatcggtcgttgggccgtcgagcaccacatctgggttatctccgacgagatctacgagcacctgaactacgacgacgcgcgcaccacctacattggtgccgccgtgccggaatgccgcgggcagctgctggtgctgaacggcgtggccaagacctatgcgatgcctggctggcgcgtgggctggatggtcgcgccgcttgaggtggccaaggccgccaccaagctgcaggggcatatgacctccaatgtggccaacatctcccagcgtgcggctctggccgccgtggctggcccgctggacgaggtgcatgagatgcgcaaggcgttcgatgcacgtcgccgcgcgatcgtggctgctctgaacgatattgagggcgtcaactgcccgactccgaccggtgcgttctacgcttttgcggacatcaccgctttgcttggcaagccgctggggcccaacggcactgtgtccgatacgtccgctgattttgccgccgcactgttggatgaggcccacgtggccgccgtccctggtgaggccttcggtgctcccggttacctgcgtttctcctacgcactggccgacgaagacctagccgaaggcatgcgtcgattcaaggaatgggctaactgagctaactgagaagagtcgtgtgccgcgcacatgccacgcgcgcgacacgcgatttgcgataatccaccggagccgttactataacaacttggcggtttcgccgtggcgaagcgttctctacggaatgcacgccgaggtggattttcacctagggaagtggcgcaattggtagcgcaacggtctccaaaaccgtaggttgtgggttcgagtcccgccttccctgccaagttttcaataatcaagcagctgacgcgaggtacagaatggctaagacgaacaacagcgaaaaggtagtcaagccgaatgtcttcatgcgtatcggtctgtttattaagcagatcatcgacgagcttcgcaaggtcgtaacccctactgccaaggaactgttcttctggtctctggctgtgtttatcttcgtgctgctgctgatggccctcgtcacgggcatggacttcggtctgggcaagctcgtgctgtgggtgttcggctgatccgcacaacctaaggtgaataacaacgcatgagtgatgaactgaatctcgagaatctcgacgccgtgccggctgaggagcctgttgtcgaggcttccgaagctgctgccgatgaggcagctgccccggctgaaccggttgctgacctttccgcagaatctgacgcatccgtcgacaatgcagatgttgagtccgccgctccggccgcgactgaatccgctcccgttgcttccactcagaccgagaccgtttctctggatgaggacgaggaagaagtcaacgaatccgagcaggccgaggaaaccgatgccggtcagcaggccgttgacgaattctccaagtccctgcgttcccttgatggcaagtggtatgtgctgcacacctactctggctatgagaagcgcgtgaagaccaacatcgagtcccgcgtcgcctccttcggcatggaagatcagatcttccaggtcgaggtgccgatggaagaagtcgagaagcacaccgaaaagggtaagaagatcatcacccgcgtacgtgttcctggctatgtgctgattcgtatgtggccggatgagaacgctcgccgtatcgttcgcgaaaccgaaggcgtgaccggcttcgtcggcccgaccaaggatccggcgccgctctcccgcaaggaagtcgtggcgatgatggctccgatgatcgcttccgaggcactcaaggccgctggcgacaagcccgccgccgccaagaagcgcaaggtcgaagtctcctacgccgttggtgatcaggtcaccgtcaccgatggacctttcgccaccatggccgccgttgtttccgacgtggagcccaccacccaaaagctcaccgtgctcgtgtccatcttcggccgtgatacgccggtggagcttggcttccaccaggttcagaagctggattaaccccaaactttgcagagcccgaccatcgtggtcgggctttttgcgttgtccgggtggatttgcataatgggaaagcttgtgtctggagggaagacccgctagcacagcacagcaatataagttgcgggaggagaccgaccacaggccgattgcctacagcatgcacggataaataacgagtcaagaccgagcgtgatagcaggcaagcggatctgaggacggcgaccattcgaaccgcgttatagaaagaagaaccataatatggctcccaagaagaaagtctcggcgctgatcaagctccagatccaggctggcaaggccaacccggccccgccgctgggcccggctctgggttcgcatggcgtgaacatcatggacttctgcaaggcatacaatgcccagacgcaggacaagatgggtcaggtcatccctgtcgagatcaccgtttacgaagatcgttccttcaccttcgttctcaagaccccgccggctgcagctctgctgaagaaggctgctggcattgagaagggtaccgagaacccgctgacccacaaggtcggctctgtcaccaaggcgcaggttcgcgaaatcgctgagaccaagatggaagatctgtctgctcgcgatatcgaggccggcatgaagatcatcgagggcaccgctcgctcgatgggcatcacggttacggactgataaggagaaggacagatggtaaagcgttccaagaagtaccgcgaagccgctgagcgcgtcgatcgcaacaacctctacaccgccaacgaggccatcgctctgctcaagagcatgcctgcctacaacttcgaccagaccgtcgaggccgtgttccgtctgagcgtcgacccgcgtaaggccgaccagctcgtgcgcggtaccgtcaacctgcctcacggcactggtaagaccgccaaggtcctcgtgttcgcccgtggcccgaaggccaccgaggccaccgaggctggcgccgacatcgtcggtgatgacgacctgatcgcaaaggttcagggcggcttcctcgacttcgacgccgtggttgctactccggacatgatgggcaaggtcggccgtctgggccgtgtgctcggtccgcgtggcctgatgccgaaccccaagaccggcaccgtgaccatggatgtcaccaaggctgtcaaggacatcaagggcggcaagatcgagttccgtgtcgacaagaacggcaacctgagcttcctcatcggtaagatgagcttcgatgagtccgctctggacgagaacttcaaggctgtggccgacgaagtcaagcgtctgaagccgtccaccgtgaagggccgttacctgaccaaggcgaccatcacctccacgatgaacccgggcgttccggttgacccgaacaccttggcctgaggctagcgagcttcaatagctactgaaagggacttcccgtaaagggaagtccctttttgcatatgcgatgaccggttgcgagaaggtgaacctggatggtcacgcaatcgaattcttgcaacacgccggtgaacgcatgaatttgttacgcatcggcaatgcaaaacggattattctggtatcagaacagcgcaaataggctgtttgcgacacgccgaaggaaccgtgtgattgcaacgattcctgaggcttttgcgcgccttgatttgcgcgaatccaaacatgcgtgtaagttattcacctgttgccgctcagcgcggcgggttccttcttctggttggtttcctgtcttgctggtgtggtggtggtttgagaactcaagagcgtgtttgtactacttctttatagtcaatgattgccagttcattcctcgcctgattgcctgtcgtggtggtcgggtacccgggagggtttgatgaggggtgaggttttttgaggg

SEQ ID NO: 2624 - DNA, 40344 bp, Unknown
  R222_15m  MAG No. k141_35871
ggtctgcaccgtgcaggtctgcatcggtcaggtcggctctggtcaggttggctccgcgcaggttggctccgcgcaggttggctccggtcaggtcggcgtagcgcaggatggtgccgcgtaggtcggtgctggtcaggtcggtaccggtcaggtctgcaccgcgcaggcagtcgcgcccgtatttttcgaggatggcttcgatgttttcgccttcgaggatgccgtttggtgtggtgattttcattggttttcctttgctcgttgaagttgtacgcccctcccggcccagctaggagagggggtgatattacattttcggcggtcagagagtggccgggtatgcgctccggtcgagttccgtcacatccactacctgattcggctgcgggccgtctaccgcgaagtcgccgatgccggccaccatgtcgttcgcctgctcgatgcagtaatcgacgtcatcgaccaagtagccgtcatcatcgcagccaaatgtaccgataccgtcaataatgcggccggacggttccactacatcatcaagctggattacggcacgcggcgggaagcccaagttccgcaagatcagcatccgtatagtcgcttagattcggcacctgtcgcaacgagccgacctcgaaaaagtcggcggcccagtcgtagccgtactgcttggactcatcgtcccattcgttgatgctgatctcgactgccttgttgttgtcgatgagtttgaccatttttgctcctctttcttttttatgtggacatattcagtataacatgtatctcatatatcgcaaaaatgcagaaaaccacctcccacaaaaaagaaggaggtgggcttttgcgtcagaacaaatcagccaagcagcggcacgctgtagaagccgccctccgaaagcatcagtagcgacccatcaccaatgggagagccatcgctcatcgtggaaaacgtgtcgcagaaccacgcatcatgctcatgcaacactgtgggcacgggcgtatgcccgaccacctgcgtcagacacatgtcaccgtccttggcgaactcgctacgatcacaccacaggggagagggagtgcccgcgccgccgcgcgccggacctatgtcagacatgggcaccaccagcgaagccgggtggagaatcatctggttcaaacgttcggctatctcttcgaccggcatgctcatgtaatcgacaccgagccgcctgcgcccccaggagcaggcgaggccggcatgtgtggccagaacgttcccgtccgtccaagccagtcggaacgggatgtcctgcatcagctcatgcaccttgcgatgtgcgccaggcttgaaaccgggcgctattgcgcgaaccctcgcataggaggaggagccttgcttcaaaaaatacggcacatcatgattgccgagcagtggaatcacctcacggtcgccggattcaagtcgataccatgtggcgaacgtaccgaagaaccggatcagtccattgttggacacgttccagtcgtcgcagacatcgcccaacaggaccatacggtcagtgttctcgcgttgcgccacccgactaatcagcggcagcagatctgctttcgcatgcaggtcgccgacgaacaatgcgcgcatcaaattgtcgcccctagggtgggcaggatgcccatgtccggtgtggtcaatgcgattcgacccttgttgactatgagaatggcggtgtggatgcgattctccctgccgtctgtataccaagcgacatactgtccgccttcggtgatgacccggactggctggttcatgtcatctgcgttcaggagacggacgaccgccacaccgtaaccatgttcgatggttcgacgaacggtttccatgggagtccagccgtaggtcgcaagccgccagccgacgaatgcgatcagggcgagcaggcagatgaccgccaatgcggtttgccgtgccagcagggatacgatgaccaggatgagtagtccgacggcttgcagtagctgggggagtgccgcatgggccagctcctgccatgtgggtttcggaatgatgcagaacggccttccggtttgaggctgccaggtttcttcggcctgctgtggtggggtttctgcagcggttttcgtgtcctcatccgtttttctcggtgccggtgatgtgcggtggcgtttccctgctggtttcaccgagggtggttgctgtttgaagtcttcggtcttcgcgttcgggccggcatgcgggtttgattccgcgagcctacgttccatttcgttgatggcctctgccatgtgctatctctcctttatcgcttgtcgcccggtgtcgtgtagtcgtgttcgcgtacctgtcgttcacggttgaaacagttatgcagcaggttgacggtgctgaagttcgcggactcgtcgtcgcggacggcttgtaggatgcgctgccggttgtcccagatcagcttgtcagcctgtttctcggtgaggccttccaagtcgccgtcttggttgaagtgcacgtacttgtgcttgtcggggtcccatccaccgtacttgcgggcctctttgatctgttcctcgctcatgtcttccagatgcaggtcgtgggggctgatggatggggctatgcgcaggtcgccgatcgtggattcgcccttgttctgctcgtcgtggttgatggtctgccatgcggcggccttcaacgcggtcatgttctcctcgtcgggtttgaagaagatctggtctcggatggcggaatccatcatgtcgtggcgtttctcctccagttcagtgtcgaggtcgaagtcgtcatccccggatttttcggcgagatcgtccacgaggtcgttgtcggtgaagccccagtcgtcgccgtggatttcggtcagttggccgctgtctatgcgttggctgaggtcttcggtggtgatgaagtccatcctgtggttcacgtacccgtcatggtcgatggacagggtggtttccccgtcttcgtcgccgtcgctttccattacggagtaggcgtgccagccggccggcaccttgttgcggtcgattcgcccatcgtccaaggcgtagccgttgagggtggatccgtcgggcatgtcgaattcgatatggcgtgcctcgtaggggtcgtcgaatgcgccggtggctgtgagcagctggttgaagtcaggctccgtgtcgtcggtgaggaggctggccacctgttggatttttgtgtcggaggggaggctgtcctgcttgtcttcgtccgcgaatcgtccgtccgagctgcggcgtcgttggcgggcttgggctgacttgttttggttggtcattggaactctccttctatgtggacatattcagtataacaggcatattgtcgttcggagacaattctaggggtccggcctcccgttttggcgagaagccgtgatgtcgcggaatcggcaatacctgttatactgaatatatccacataagaaatgaaagaggaaacccatgtacgtcaatcaaaggcgacgcctattccccgtatggctccgaagtagtgccccagaccgagggcgaggaccgcttctgtggtgaacctatcaagggcaagcgcatccagatcggagcctatgccaagtcgcgcgtgtatgtgcggatttcctcgtatagcagcgcgtacaagatggaagagaaggatttcgagcagccttactatgagaatcacatggattgacatgttatactgaattagtccacataaaaatttcgtagaaggcaccaatcatgctcggaaaacatcaaacaacaaggcagcaaacctgatggcaatcgacccaggaaccacgctcatcctcatcacgtgcctcatctgcacgatagtgctcgccttcgccggaaaagaaacaggcgacaagacggacaccagacacgacaacgaacaacgaaagcgcaaacgttgaaaattcactcgaccgtacgcgggacgccggggaatggacgctctcctatatcggacagctcggacgccggcggcatgtgaaaggcggacgacgatgaggtacggcgcatcatcccgacacatgggggagccccggccggcggcgggcgtggagccgggactgctggccgccggcctcgccatggcgctcctgctcatggcgttcggcgccctcgccaccctgggcggcgcgctcctgctgcggctcctgtccggcatccgcatcatgaccgccatctcgcaggccgccgccgccacgtttttcatactgctcatgccggccggcgtctgccggctcatcgcacgcatacgcggatgggatccggacccggatcccacggaaaggaactgatcatggcattcgactacatgcatccgccggaggatttcgaatatctgggcgaatggtgcaaagcgtggcgggatcccgcgacgggggattggacgataagccaattgctcgacggcctggagaccgagcagatcatcctgtccggcgaggaggtcagggaattggcccggctcgccgcccaacacgatccgaccgattacgagctggagtacggggagctgcgccgacccatgttcgcctcgccggacgagaacgggacggccgtcaacgccgcggagggcgcgggcggcgaacaggcccgcatccattcggtcgaagccctgcaccggttggggcggttctgatggacgggtactggtggggcgtgctcaccccgttcgcgatcatactgggaatcctgctcctgtatctgacgggcaatctgttcggcgcgatcgtcagctgggcgtggaagaaggcgcattacggcctgttgaagaagggttggatcgccgaggactacgacgaggattcaagggaatggaccacccgccccggcgcggaacgcctggcggccgcgttgacccggtccggcgaataccggatgctcccgtgcttcggctggatgatcctcatcgtccgcgaccacaagaatgagaaacatgatgagaaaaggaattgatccgccccatatcgtcgcgttgacgatagtcgtctgcgctgccatcgcccccgcgttcatgctgtggggtcggacgatcggggaatgggctgtcggaatcgccgtttatacgctgattacggcagtagtgctatcgctgctcgtcctcgattttgttatcgtcagatatgatgtcatggcattgctgatacaagctctgtccggttcggaaatcgtcggttcggtatcgcgcctgctgtttgtactgggccagatatgggtcatcatcctgtccatacggattcccccatcgttctgggaaaagcgtttggcggtattgcctttccaagcggatccggataattccgcactcgcgctctgcattggtttagcctcaggcgcttttcttcttgtcatagttgcgctttggatgcctaaagaccttccgggggtcccggaattctggaatgcgcaggtttgtatggattcgattttcggggtcggtcttccatggtccaagccggtcatattcaccgtgtcttcgaaaggctacacgatcatacgtcggaatgggatgctgaagctgaacgagcaggccgacgagttcttggactattgcccaacatgggtttcgattcgcaacgaccatcatcggggactgctcctgatcgaacggtaccacccgggcatgcaggacattgtcaacaggttggatcgagaggccggtatccggcatccggcggataaggagacagaaaattgaacgaggaggaatacgaagagctggcacgctggctgccatgccaccccggccgatgggtcgcatggccggaaccgttcggaacccgggccgaggccgacgcgttgttcgaatcgttgcgcgacggcgggcttgaatcattcaaggtcgattcggccgcgctccgctggcggatagacgagttcaaatcgattgtggacgggcgcgggcttatctggatggaggtgagctgcgcatggtgaaaagcctcacaatcggattggtcgatgatggcgttgcgacatggaacccggtttccgatgggaacctactggtgacgggtggcgcgggatgcggcaagacctggtggctgacacacaccctgatacctggtctcaacgaaatggggcaacgggtctatatgtttgacgggtatgtggatcgaggttataccaagcccgtgcaaggtgtgattccggtgaacgatcccacgtccatcttggaagagccggattcctttctgattatcgaccatgtgaatccgggtcttgaagacgattcagctttgatggagacggtaagggagagtgacgcccgtatcccgattatcctgtccgtccaactggttccagaccgggagcaatggtccgcatgggcagaactggacatattttcatccaaatacaccggcatgccgtgggctcggatgggaatctgggaatccacgagtcgcgagagaccacaggtggtggctatatgagattttctgcgggttttggaacaagaggcatatcgaggggaaacctgatgggcaaactggttaacggaatcatcgcggccatcgccacactgttcatcatggccggcatttccatgccggcattgaccgcaaccgatgatacgtatgttccgaagaacgattctgctggcaatatcttcgtgcaggatcaggcgaacgtactcagcgctgaaactgaaaaacatgtttacgacctgaataagtcgtgggagtcacgtgaggacaagccgcagctgctcgtcgtcaccgtctccactttggatggtgtgcccatcgaacggaaggcgaaggaactgttcgaccggtacaaacccggcatgaaaggcaagaacacaggcctcgtatacctgctgtccatcaaggaccataaggaccggctaaccgtcggcacggggattggacagacattcaaccaatccacgtgcgagagcatcatcaactccgggcatgcggactataagaaatcatactggaacgccggcatcagcaaagtcctggacaatatcgcttcaacagtgcaagacatgcccgagatttcatccgcatcaacgtcggctacaacccccgcaccaatgccggcatggaccggggttctcggcgtggtgattgttgtggtcggctcggtgctcttgctgatatggggattgcagtcagatgacaagaggttcagctgatggagcttgtcgaatacgctcaggcggtggaccattcgcggatgccattgctgttgagggtcctgaatgctctcggttggtatgccttcctcgcggacattccgctcatggcgtatgcctattgcctggtgatggcacggaacggctttcctaatctcacgatggacgagggcaggctcgtcggcgcatcggtgctgctgctgttcgtcgccctcgcgctcatgtccccggccgagaactggaacccccgaggcccgaagccgaagaccatggacgagtatgtgggcgacgtgtggaatctcgatggtctcgcgatcgccgaacccggatatatggaaccgttgtccggtttcccccgaatcaaaggattctaccgggtttcatggaagcggaacgggcggcgcgtcgaaggcacgctgggcatcgacggggcaaacgtcgaactgcgcgataaccaagggatgattgtttccccggtgaatccagggacaccggtatggaagccgggcgcgaaacattcgaaagggtagccgatggaattcaccgacagcgacgaactacgccgcgatattctcgccaaccaatatctgcccgaacatctgcgcgaacgggcgaagaacgatacaagcgaatactgccgtgccgaggatgccgacaatctgctggaagtcgaccggctcacgggcaacgggctcatccgcttctatatggaggccggcaacggttccatgcaggtggacgtgcccgaggagaccgcccgaagcatcgcccggtggatcctcgaccatacgaacgcgtgaaggagcgcatcatgaagaacatctttgtcctgaattccgtcatcagactcatcgaacggaacacagcccatgccatacggtttgcgcggatcggggcggctctgctgctgattgcggtaggaacgctggtattcggcgcttgtgttctcctgacgggaacccctcttgtcgttctgtttaccgcgttcgtgatctgctcgtttatcgggagccaactgttcggcggcgcgattctggtgatggaggaagaccgacggaaacagccgacgcgacggggcgaacggtaatgaaaatgtcaagtgcgcgcgttcggtgcaagtccgttccgtccagagagctctccacgctcatcctgcaccgggatacgggcatcacggatccggagcgcccgttcaaacacgaatgctcgtgcggccgctggttcaccgcattggactggcatctgcacgggtgctggacgggttccgaatgccagtacgacgagccgccgagcatcctccacgaatatgagaggttcctcgcatacgacctgttgtgcgaggcattggggcaggtcggagtgctggcgcccatccgatacaaacacccatcccgaatgggaagagggaggggaaaatcatgcgtggtttcatgcgtttcgtcaggtcgagccgtctgctgacggtcggcgcgatcgcgttcatcatcaccctggccgcggcgctggcggcgttcctttgcgaccggctgggtgtcggcgttccgtggctcccgtccggcctgcacgcggtctccgcgctctccgggctgaccgccggcgcaagccccgtattgcactcggacatgggatggcagtaccggcacccgtggtggcgcgaacggctcggggaactgggcatacgacagtcgatgagccgcaagggcaactgcctggacaacgccgccaccgaacaggtgttcggccatctcaaggacgagttctaccgcgaccgcgaattcgactcgtacgagcggttcaaggccgagctcgacgactacatcatccactggaacaccaaacgacgccagatacgactcggtggacacaccccggaggaattccggagagcgtccaccgtggtctgagcctgtatcctaataaacagcggccaacaatcggggcgcagttcaggcaggtggccgcccctgtttttttcgcatgccgtcaggcgttgaattcgagtttgttgaacgcgccccggtattgggtcatgtccatgccgccgtcgcgccagtcaacgaaccgatccatgccggcttcggcgcggctgatgtagaagtggcgcaggcccttgctgtcggccttcttcgaatcgagcagggcctggaactcctcgggcgtgaagatgaagaacacgggcttgcgcagctcgtcttcgacggagaggatgtatgcgccgaaccgggtggtgtcggcgttgcgcgggttgatggagtgccatccggacatgggtttgccggtgtcggagccgaggttgcggctggcggcgatgaacacggggtggcgcctgccgtcgtgtccgatgatgtagcggcccttgcgtccctcgttgctgaacgtctcgcccatttggccgaccttgtcggcgagggcttcgatggcgcgtttgagggtgccgccggtcacgggcttcgggttttcgagttggctgacgcgggtttcgagctcgttgaggcgttgttcgaggatcgcgatccgctggctgtcgatgttttccatcttttgctccttgatttttggattgtatttctttcatcagtatagattatatattagatgtaagttatatacaagtagattgcataaaataagtaagatttttttagaaaaacgcacccaaaaccacgctccgactagactggaaaacagcaccaacgacgggagccagccatgaccaagaccagaaccaccacagccaccagcatcatcccattgctcctgctcgccaccgcatgcggaacgccaacagccaacccggaatccgccgcaccgcagacgaaaacacagacacagacgaaaacggaaaagaagccggcgcccgaacctaagaaagaaaccccagccgaggaaaagcccgaagagcagaccccgaccgcaccagaaccggccacggatccaacctccggcgaatggacggaaaccatgaactcgccatccgacctatccggccagctcgacgaagcgtggctgcgctgctcaccacagaacaacccgaccccggaactgttctcatggaaacgatcagtgaatcacgacggcgtatggctgcacatcacggaaggcggaatggacggatctgtccagcaagcctgtatggatagtctgttcggtggagctaagtcggagccgtccggcgaatggacggaaatggatctgaatggaataagtcgctggcagaaacaggatgacggggctgctgacatcatatggaagtccgcggattgactaataaggacaaagcaatgagcgtcacgaaatcgaagacagcggaacacgatgcagacattaaggacaactctcacgaacgcgcgaagctagaggctttcgcagaagctcaggcactcatatcgaaactgccgcgcgaaaccgttctagacacaatgagccacgaagatatggaaacgcaatttgaacgccgaagcgtctaaaccacaatcaggcttcgctacgaccggctaggaggctaaatcgagcgtggctcagaatgcctacacgatatatactcaaatagtcccaatgcggaatatttgagtatatacttgcaatatggctatagaaacagcagagactttactgactactcaagaggccgccgaaaaactcggcgtaggtgatcgaaggattcgctcactggtcagtcagcatcttctgaatgcagtcaaagagggagaccgtctttacataaccaacgaatccgttagacgactcaatcgcgttgaccgcaagcgaggacgcacattctctccccgtattgcctttgcctcgctgtacatgatctccggagagagcgttaactggctcagcgcttcggagaagtatcagctcaaaaaacgtctaacgacattgaatgcaactgatttggtctccttgtgcagaaatagggcaagactgtgttccatgtggtgcagagagagccgactggaaaaggtaattcaggagatacgtttatccgcaggcaccggcgagctggctgcagagttcaatttgactgaaacaagcgacgtggaaggatatctgctggaaagcgatctgcagcgaatagtcgaacaggcaaaactgcgttctgactttcaacccgcaaacgtcagattgcatgtatcctcctacattccgaatggttccggaaatatgccaatcggagtatgctcagccgatctcgccgattcactagatgtcagagaatgcggtgccggttttgataagctcacgcaattactatcccgtttccaatccgataacaagggtaaggacagccgatgaatacaatcgatatttcggcccaggctcaaccgtggagtacggtctttgccgtcgctcagcattttacgtctgatgaatggctgctcactggcggtctgatggttcaagcgcatgccatgctccacgggcttcctgtccgccctaccaccgacgctgactttttattgaatatcctgacctatgatcgaatagccacacagatggaaagctatcttgccactatgggatacaggttgcaaaaagacgccctaactaaatatgcaactcgatttgaaaaccctgcccacgacaaagtggacatactggtaacggattatctgtacggaaagaaaaaaagagaaggtgccactctttcgggaatgagattatgcggtatgcccggaggtggtcaggccatcaaacgaagcatgcgacttcaacttagatatgaccagcaatccgcatccatcgcaattcctgatctactcggcgcattgatgctgaagagcgctgcgtgggaagtcgataagacagctagaagagaccgccatctcattgacgctgcattgctgctctctctaatcgacagtccagatgaggaagcaaaaaggctccatagttccaatgaccgcaaacgaattttgcgcttgcatgagttacttgctgcagattccgactattggtcgagcttggatcagacgcatcggcaggatggaatcgatacgttagacacgctaaccaattgggcaaaaggagaacatcattagggttcgctacggccggctagggctcggccgagggtgatttcgtcggcgtattcgaggtcggagccgaccggcagaccactggcaaggcgcgtgatcagtattctgctggctgcccgtagtcgtcgtattgttcttccgtctcggctttgcgccggcctttctcctgtacctcgtcgacctggtcggtgccgctgatttcagttcgtcggccgatccagccgatgatggtgaatgtgatgcagaagatgacaagcagtatcccaatgacggcgacgatgccgaggattcgaccgtagctgtgtgcttggccggtcaaccattggatgaggttgccggccgttatatcattcgcgtattcgggactgtctgacaacagttccgcacgccggttgcccacaccgagaaaataggcggcgtagccgatcaggggagcggctatcgcggtgatcgagccgactgcccacatgaggaactggtagcggttgtaccatttgctgattttccaaagaattcccatagaacttattgaaccagccacagacgagaggaagttcccagagtcctaatccatttagacagtttaagcgcgaacatggtaggcaacttgaatcaacaagggatgccgaaaggcatccctattattcaagaaaaaactttgggaaataccgaaaaaatgttggaataaaccgattttgcatgtacgttgaaggaaacgaagacgaccattcccatcagccgtacgccgaagccgataagcgagttcggtctgaagccgggcaaatacaggccgtccgcggtgaaagtcgccggattcgacccgttggatgccaaccatgccgcatctaccagtggggtcgcttccctgcctcgacaggacgtgcaaacaaggaaaggaaaacactggaatgagagacaaccaaacgacacggcgcatgccaatgatcgtgacggcaatggcctgcgcgaccgcgagcatgctggccggcctggcactggccccatccgcaatggcagccgacacgaccatcacactgcaaggtgcagacggagcaagcctggccggacacacgttcaacgtctaccagataggcacatacaccggagtggtgctgaaaggcaaccagatctccagcctcggaatccaaggcaccaccgaatccaacgcatgggcggatgacgccatcaccatcgccaacggctacgacaaggacacgtccgacgacatcaccaaggtcggcggatacgatgccgcaggcagcatcgccgccatcgacatggccaagcaggccaagcagctgagcaacatccaagccgccctcaacgcctccagcaggaagccggccaccgtcacgggcggagccgacctgaccacgcaggatgccaccctgaacatcaccgtgccgaaagaaggcctctactacatcaccgactccgcaggcagcccgatcatcatcggcacaaaatccggtgcaggcaccgccatgagcggcgcccccggccgaaccctcggcgtcgcggtcatcaagtcgaagagcgtgacaaccgacaagaaggtcgtcgtggaccgtgacggccgacaggtctccaagcagggtgatgccgccgacccggtggccgtgaccgtgggtgataccgtcacccacaccatcgacgtgactgttccgaacacggccgtcaaattcaagctcgccgatgcccctgccggacaggaatacgtgaaaggtagcctgaaggtggctctgagcgggactgccactgacgtgaccgccgataccgtcatctacgacggcgaaacccagcacggcgcgaaagccctgccaggtgacgccactctcaagaaggaagacagaaccccggccgacccggatatcaccgttccggccggaggctgggctctgaacgccaccaagctcatcaccacgcagggcggcaagaagatcaccatcacctaccagagcgtcgtcaccaaggccacggccgagaaaccatccgaaaactcggtttccggcaccgccatcttcaaggacggagcccactacaccgtcgtcaccaatggcgacaaggttgacctgaaatcctacgatttcaccctcaagaaggtgagcgcagccgacgtgaacacgctcgtggatggagctgaattccagatccaacgcggagacaaatacctgaagctggatacgacgaccggcgaatggtccgaagccgccgaccaggcttccgcgaccacattcaccaccggtgactccaacaacgacggcaaggtcgaccataaggacaatgccgcgcaaaagggtcttatcgcattcaagggtctcggctacggcacctatacggtgaccgaaaccaaggagcccgccggctatgcctcctatgcgaagccgagcttcaccgtcaccatcgacgatgcaggcaccgccatcaggttcgccggcaaggatcagccgggcctgaccaccggtatcgacaacaacacggtccaagtcaagaacatcaccaacctgacccaactgccgcagacgggcggcgtgctcgcgttcgcgttctggctggcctgcgccatgcccctgctcgcgaccggcggcaccatggccgtgcgcggcgcgcgcaaccgccgcgacgcgctgacgctcacgcatgacggcggcaatccggccgcctgacacatgtcccggcccttcaggccggggttccgccgatagggggcggggtcgcgtcccctatcggcctctcatcaccgaatgattcttttttatccggcccgccacgaggggttcgtacgggtcttggcccatccgtcggaagacattgcgagggatggggggaaggaaaaccgataatgcgcacatggctgaaacggatggtcgccggcatcgtgtcggcgggcaccctgatgggcggcgggctcctgacggcgggcaccgcgaacgcggacgagatccgcatgcccgacatcggcaagaccatcacgagcctgacggcatcggccgccacgacgtatccaagggagctcgtcaacggcggattcgactacctgcccgcgggcgcttccacgctgcccgaccatctcatcaacggcgacttcgaatacccgaccgccgacatcatggggaaatcggacgggcaattctggtatatcagccagaacgacaattcatggtggacgaacgtgaagctcaccggcaaggagaagcgctccacgctgcccgccggattcgacaagagcaagttcgcatggcattcgacgcagaccgggaacacgccctatccgaccctcgaacgcgctgatgacatacaggtcgattacaagggcgacggcacgaaccattacagcgagatcaccgccgcgcaggccggatccacgctctatcaggacgtggccaccacgcccggcgtcatgtaccgttggagcctcaagcacgcgagcatcaactcggcgaacatcgaccgcatgagcgtcatgatcggcgaacccggcaaggagaccgctcaggaggcgacgcgcaccaccgtcaacgggaacggcgacaagaccggcaaggtcggcaccgagatcgccaccaaggtctccaacagcgcgtccgacgggtggaaccgagtcggccagtgggagacctacaccggcacgtacatcgcaacctcgaccgtcactcggttcgcgttccgcagcatcgaaggcggcggcaagacgcagggcgaagcgtgggacggcaacctgctggacgacgtgcagttcaccaaggcgtacaagctttcctacgataagaacgcttccgacgcgtccggttccgtcccgtccaacggttcggcagacacgacccaacccgcatccacgtccggcgaaagcggcgtgaagaccgcagcggatacgtcggacgacgtgaacaaggtcgtgaacggggacttcgagttcccgaagtggagccagtacgatccgaaggcgggcggcagcgaagcgctcccgtggatgtacctcgatacccaaaccggtaaggcgaagacctattggcaggcgatggcgggcaactccggcaagaccatcaaaggtctgaacacgaccacgttcccatgggttgacttggatcatccgggacagttcgagatccaccgcgagaagaacggcaacctgtacgccgacgtccataaggaccgcaccgtcggacaggtcctccagaccgagccgaacacctcgtacacggtcagcatccggcattccgcacgcagcaagaccagcgcggggcatgagaacagcgaacccggcgcaatcaccatgctcgccggccccgacaaggatcacctgaccgcaatcgaactgacccgcacgacattgagcgagaccggacgcaaggcaggacagaagctcggccccgccggaacgaccgtcaccagccccgacgacagcgtggacggcaccaccgaccatgcgggctgggatcacacgaacggctgggagacgtacaccggcacgtacatcgtccccgccggacagaccagcacgctcttcgcctaccgcggcagcgtggacgactcctgcatcgacgacctgagcttcacgaaggcatacccgctgtcctacgacaagaacgctcaggatgcttcgggttccgtcccgtccaggacgaaggccaacggcaccgaaaccgcggccgcgaccggcaccggttccgtgaagaccgcggcggacacgaccacgaacaaactgccggaccacctcgtcaacggcgacttcgaatacccgagcatgaagagcctgcaacactacttcgccggcatcgaccgcaaccgcagccagtggatcagcaacggacagggaggcgacttcgccaaatggtccgacatccccggcggactggacacgaccagattcggctggtccagcacccagacacagggcgccatgtccgaacagcgcgcgaacgccgtcgaactccagaaggccaccggcgaaaccacccagatgggcgaactgtgcgcaagccagaaaggcaccgcgatctaccaggacatcgccaccacgcccggcacgctctacaggatcgagctcgaccacgcgagccgctacagcatccaccttgaccagatgcaggtcatggtaggcgcgcccggccacgagcagcccgtcgaaatgacccgcaccagctcgaacaagtacggcgacaagatcggcgagaagtccaccaccatcgccacgcactcgaccaacccgttcggcaaccagtccagcaaggacgacttcagccactacgtcggctactacacgatccccgcaggccagtccgtcacccggttcacgttcaggcaggtatccggcgtgaacacgaccagcggcaacctgctcgacaacatcgtgttcacccaggcgtacaagctcgactacgacaggaactccgacgaggcgaccggccagaccccgaacgacaccgccaccgtcaaacccgccaaaaccagcgccacgggcggcgtgaagcccgcggtcgacgacacgaacaacctgccggaccatctggtgaatggcgatttcagcgtgaactacaaagaccaatggctgaccggcggttggaactggacatccatcacccctgatggcaagtacctgaactccgtccgcaactggaacgacagcgccacaacctggaagaccgtcaatggttgggacaagaccaaatttggctggtccagcacccagaaggacggtaccgacaacatccagcacaaggccggcgcgaccgaaatccaatacgatgaccaggccgacaacgtgtacgcggaactctgcgcctacgagaagggcaccgcgatctaccaggacatcaagaccgtgcccggcaccctgtacaaggtgagactgcggcacgccagcctgaaccagaactacctcgacaagatgcaggtcctgattggcgcgcccggccacgagacgcccgtggagatgacccgcaccaccgtcaacgggcacggtgacaagctcaacgagaagtccaccaccatcgccaccaaggtcacgaacaacaacgaccgccaccacgagagccagtgggagacgtacgaaggcacctacctgatccccgccggccaggccacgacccgcttcacgttcaagagcatcgacgccaagcagctcgactacggcaacctgctcgacgacatcgtgttcgacaaggcgtaccgcctgacctacgacaagaacgcgtccgacgcctccggccaggttccgtcgaacgaacgcggcagggagaacaccgtccagcccgccaagtccaagaccacgggcagtgtcagactcgcggctgacaaaaccgcttccggcctgactgtgcatgatctgaagaacggtgaaatcgcccccgtgcagtacggcgatttcaagttctccacgaccgatgggttcaccgcggaccagatcaccgatgtgaacggcttcgacgtcaaaacgaactgggatcccacggaggagaaccaggcatacgccggcaagattctgtccaccatgtaccagccgaacaagaatggcgcgaacctgatcctgcaccatgtgggacagtggcgcgactcctccggcacgcaacggtggctcaacgccaagatcaccgtgaacggacagaacctcggctccctggtgtacctcgaatcgaagcacgagttcagggcatcgtatggcaagtgggacttgcatccctcgtcccgcccgtacatggatgtgaccgtcgacttcctgctggacgacgggtccacgccgcagggactgcgcggtgcgaccggattcaccgacatcgacggcggcaccagcggatacaacgagggcgtcgaactcgtcagcggcttcgacggcgcgtacgtgcgctccgacgcgcatctcgcccggttcggcacgaacggctgggccggcatcacggacgagaacaagaacaatgccgacgcgcatggaatgaagcattacgtcggtgccacgttcaccggctcgtccttccgcgtccgctggtcggtcgcctcgggacaggcccgccagtccggcttccagccggtcgattcgaccatcgcctaccgtctcacctacgacaagaacgcgcaggatgccaccggttccatcccgtccgacacggccgctaacaccactcagcccgcgaaatcggagaccgacggcaaggtgtccgacctcgtgcagcgcaccaccacgcatgaggacggcagcgtgaccgtcaagaccatcgacacgagcacggacgtggtgtccggctgccaggtctattatccggccggcaccaggatcacattggcgaccgcgaagatggactccgactgctgggattccagccagatcggcaggcccagccgcacgttctacgggtggagcgcgaacacggacgccaacgacagggacgtgcccgtcggcgacaccatggaccggaacacgctgaacgcgaacgtcaggacggagatcgtcatgcccgccagggcgaagaccgtatacgcgttgtgggccgtcaaccccaccctgtcgtacaacgtgaacacgcccgccggatccaatgcgcccggcacgcccgccagccggaccgtgccctacaacacggccgcatccgatacgagcggctggacgacgggtgacacgggcaagattcccggctaccggttcgacggctggtacaccgccccgaacggcggaaacaaatacgatttcaacacgccgctcaccaacaacgtgaccgtctacgcgcactggatcggcaacgggtacaccgtcagattcaccggcaacggcgcgaccggcggcaacaccccggaccaggcgttccaatacaacatcggccagaacctgcgccggaacgggttcacgcgtgacggatacacgttcaccgggtggaagcgcgccgacaaccagcaggcgtacggcgacggccagtgggtcaacaacctgaccacgcagccgaacgggatcgtcaccatggtcgcccaatggtcggccaacgaggcccacctccgctacaatccgaacccgcccgcaggcaagaccacgggaggccagggcacccccaactgggacggccacaccggagacacgcccgccatcggagggaacggctggacgatcgacgggtacacgttcgccggctgggccaccagcccggacggcggcggcgccaggtacgcgccgggagccaggtggacggcgaacggcacgctcaccctgtacgcgcagtggacgcccggccaggccagcctcacctacaacggcaacggggcgaccggcggtaagaccgacccgcagactggcaagaccgacgagaagatcaacgtgcgcgacaacggattcacccgcgacggctacacgttcgtcacgtggaacactcaggccgactgcaagggcaatgcagtgaaacctaacagcgagtggacgttgcgtggttccagcaccctatatgcctgctgggccggtaacgcacaaaccctcacctatcacggcaacggcgcaaccggaggcaacacggcggcgcaatccggcaagaccggtgacgaactgaccacaaacgccaatggtttcacccgcgacggatacacgttcgttcgttgggacaccgccaaggacggttccggcaccgcatacggcgaaggcaagaacggcgtcagccagtacgtgatgaagccagcaggcaacgacctgtacgccatctggaaggcaaacccggcaaccatccagtaccgcaacgactggccgaacaccacaggcagcacgcccgacacgacgggcgtcaccggccaggacgtgaccatcgcccgaaacgggttcacccgccccggctacacgttcaccgggtgggccagggacaggcgcacgaatccgagcctccagcccggaggccggtacacgctcactcccggcaccacgaccctgtgggcccaatggaaggccgatccggcgcacctgatctacaacagcaacagcggctccaccagccagacccgcaggacggacggcgtggtcgaccagacgctcaccgtcatcgccaacccgttcacccgctccggctacacgttcaccggctggaacacgcaggccgacggcaggggcaaggcgtatgcggcgggcaacgggttcaggctcgtcgccgacgcgaagagcaacccggtcaacacgaccgttctgtacgcccagtggaggatcaacagggtcgccctgaagttcgatccgaacgggggcactggcggataccctgacatcaccgcggacgcgttcacgacggtcaccatcccggccgacgcgaaggagccgaaggtgcaacggcccggcttccggttcaccggctgggccatgaaacccacgcccggcaacggcgacacgatcctcggccccggcaagggcacggtcgccatgcccgaccagggcagcatcaccgtgtacgcgcaatgggcgccggccatgaccacgctcccgttcaccggcggccacgcccaggtgccgaccatcggcctgtacgctggcctcgcgttcatgatcctcgccatgggagcgctcatgcccgtgatccgactgcgcatgggagccggcagcaaaggccgtcacgccggaacgccgaccattggaaggcattcccggtgagcatggccgtagcgacatcgcgagacgtgtgggagtccatgcgtctcgccgtcgatgacaggcgggcccgtgacaaccggacccgcctgctcatccgccgttcccgcatatacaccgccgccgctctcgtctgcttggcattggggctgatactcattggcatgccccgaatccagcagctcatcggagatagggcgaccgacgctcaggcgcgttccgtcagccaggccgcatcgctgtttcccgagggtagccgtcagagcgcgatcagatcagcggtcgaatacaaccagcgactttacgagtcgggccagccgcagatcggcgaacccgtgttcgacggcaaggccaagggcgacttcgagggcgacgacgaataccggcgccaactgtccgtcaacggactggatgcgatgggcgagctcctggtcccgaagatcagcgttgacctgcccatcatgcacggcgccggccaggacgtgctcgaacacgccgccggccatctcgccggcaccagcctgcccgtcggagggaaaaacacgagggccgtgattaccggccattcgaacctgaagggcgccaccctgttcacccgtttgggcgaactcgagaagggcgacccgttctacatcaaggtcatggacgccaccctcgcctaccgggtcaacgacatccgcatcgtcagccccacggacacgaaggcgctgaagatccggaaaggacgggacgaggtcacattattgacctgcaccgggcagggcaacacgctccgcctcctcgtcaccggggaacgcaacagcatgcccgaccaggccccattgcccggcgcatcgccgggcgacacgaaacaggctgctcttgtttccggtgtcactgtgacgggggtgttggctgttggtttttcgctttgtcgcagtcggcgtgccgtgggtcatcatataggtttgccacagacacatgatagtgacaatttgcgttagtaaaaaaaggtgttactatatgtttgtgaaacaaaaacacgtaatctcccgacatcggggtaaacccgaaaaggaagacacatacacgagaaagaagaaactccccatgacacacggcatcaccaagatcacagtggcaaccaccgccgtgatggcaacccttgccgctccggcagtcgcaatggccgaagaaaccacaaccaccggcgaccaaaccaatcaggcaatcacacaggcccaagacagcatccagcaggcacagcagagcaccaccgaagccaatcaggccatcgcacaggcatccccgaccggcgtgaccgaagcacaggccaaggccgacgccgccgcagccgcactggacaccgccaagcagaacctcgacgacgccgccgcccagcagcagacagccgcaaacaaccagcagcaggcgcaggcgaactacgacgacgccaataaggcccagcagcaggccgcacaggatgcgaccggcacggccgacaagatcgccgccgcccagcaggccgcgaacgacgcgtccaacgccatcaatgacgccagcaaggccatgcggcaggcctccgatgaccagtcgaaggcagaagccgacaagcggaccgcacagaccgcgaaggatgaggcctccgccgaatccgcctcccatcagaaggacgccgacaaggcccagaccgatattgatgcggccgacaagcaggccacggacgcgcagaagaaggccgatgacgcagataccgccatcagtgatgcgcagaagaaggccggccgggccgacgcggacgcaaagaaggccgcggccgacaaggccgccgccgagaaggagctggccgcggccaagcagcagcaggccacggcgaccggcgacaagacgaaggccgacgaggcggtggacgtcgcgcaagccaagctggatgcggccaggcaggccgaggccaaggcgcttgaagccaagcagaaggccgatgccaaggtcgagcaattgtccaaggatgatggaggtctttccgacctggccgcgaagctcaaagcggcgaagaaggccgcagccgacgccgccaccgcccagcagaaggcggaacaggcgcagaaggatgccgacaaggcggtgtccgactcctcttccaacgccgaggcgaagcagcaggccgccgccgatgccaagagcgaggccgacgccaagaaggaagcggcagacgaggctcaggacaagctgtctcagggcgcagtggcctacttcggcgacaagggtgcctctcaggcagtcaaggttctcaccgatccgaccgtcaccgagtatcttgacgccattcataatggtgccaagggtgatgcgaccacgttggacaacatgatcgaggccctgaagttcatccaggaagccaatcagcttcgcgcgaaggaaggcctgcagcccctcaaggtcagtgacaccctgatggcacaggccatggcggatgcggattatgccaacaacaacgtgaaccatccacttcaattccccgccagcgaaaacctcgcctggggttacactgatccctttaagggctggtacgacacggagaagtccatgtatgagaaggacatgtccgacggtgtcctggattgcaaggcctcggacggcaagcccgtcaaaccctgcgcttatggccattacaccacgctggtcaaccccgatttgaccctcactggtttcggcgtcagccagaacggcaacatcacgggtatcggcgggaacacccatagtcagctgttcaccgaaaacgctaacggaatcggctccgacgcgggccgcatcatggacgttgacgcatacctgactgatttgactgcctaccgtgattccctgaccggagccgacgccgcataccagaccgcattgtccaagagcaagcaggccgcacaggacgcttccgatgcggccaaggcgctggccgccgcccagcaggccgcacggaaggccgctgaggaagcccagcaggccgcgcagaaggccagggatttgcaggctgccgccgccgaggcgcagaaagcgtatgacgaggccgtgaaggcgaacgaggacaaggccaaggcgttggaggaagccaagaaggatcaagccgataagaacgcggcttattccgccgcccagcagtccaccaaggaagcccggtccgaagccgccgccgccaccgacgcccagaccgcagcccagacggcagtggacaaggcgaacacggcagtcgccgccgcacaggcgaagatcgataccgccgacaagctggcccaaaacgccgccaggaacaagacggatgcggaagccgcgatcaagcaggcgaacacggacaagacgaaggccgaagccgacctggccgacgccaaggcagccaaggccgaggccgagaaggccaagcaggccgcgctcgaagccaagaccgtttccgacgcgaaggttgaagccgccgccaagcaggtcaaggccgccgacgaggccatcgccgacgccaaggccgcatacgcgaaggcgaaggacgacctcaacacggccaccggcaagctcaacgacgcccagaacaccatcaagcgtctgcagaacgccgaggagaacctcaagaaggcgaacgcgaagctggccgacgcccaggcgaagctcgacgaggcgaacaaggccaaggatgaggccgacaaggcatatgagaaggccaaggccgactatgatgccaagctagccgacaagcaggcgtccgacaaggagcttgccgccgcgaagcaggccgaagccgaagccaagaagcaggccgaggaggaagccaagaagcagcaggcggcccagcagaaggccgaccaagccaagaaggatgcggaagccaagaagcagaaggctgaacaggccaagaagcaggctgcaggtgtgacgaacaatggtctggcctccaccggatcggacaccaccgcaatcgccacgctggcggcgatcatgaccatcgccggtgctggctgcgtgctcctgcgtgtacgttccgccaagcatgccgatggatggcatgcagtcgaggactgattctcaccgcaccaaacgtgttttgcccgccttcgacccgaaacaggggagaggcgggcaaaaccgtattcccacataccgaagcaaaacggtagcttcttttgttactatcagaaaaaagtcagtgaattgcgtgaaagggtctggctatgaacgatgtgggccatgcgccactcccaggcgacgtgctgctacaccaatacctgcaaccaaacaacatcaccatgtaccgtctggcgaaagccatgaacctgccacaaaccaccatcagtggcctgatacacgggaaaagacgcatcaccacaagcctcgcataccagctcgcctacgtgttgggcacatcaccggaatactggctggaattgcaaatgaattacgacattgaaaactacgacaaattcgacgaaagcggactgacggtcctcattgataatacggtcggcgacactgtccaatcagaacgatgacgagcagaagaatccgctaacgccagtttcgtccatgcccactttgatggcctcgattccgccaattcgttttccgctgccgcgcattgtactgctgagaatattctgtgccggcgcttgtccttgtgttctctccctcggagtggctgaatagggctcgtttccattggtttgcgttcatggaattctttcttagttgggagaggggacttcttattgagaactattcctatctgacataagatacattatcggctaaaaaaacgattttaggataatgcttgtttcgcttcctcctagaagagctcgttttgtattggtttgctgagtcgtgcgtggatcagcttgatgaagtttttagcccgcaaacccggtatttcaatgccgggttagggcgtcccgaagtttacatatggtagtaaatatgctacgattattcctatgagcgtaagcgatgaacggttcacacatggtaggacttcggtgtacaatctgaactaccacatcatctggtgcacgaaataccgtcgcaaggtgctcaagaacggaatcgactcggatttgaagaccatcctccaagagatagccgatgagcacggctaccgcatcccccacatggaggtcggcttggacgaccatatccacctgttcgtgtccgcgccgccgaaaatcagtgtgagcagcatcgtcaaacagttgaagggcacgtccagtctccgactgttcgccatgcaccccgagctgaaaagccagtattggaggcgcaggggcgaacggagcctgtggtcgcccagctatttcgcggaaagcatcggctcggtcaacgagcaggcagtggccaaatacatcgatgaccaacggtcgaaggagcgtgaatcacaatgaccatgcgcaaagtggcgcagcgcataccgttcacgccgcccaagacccaagcctcattgttggaacggtgcttcggggacaggcgtttcgcctacaaccagcaggtcgaggcgttcaacacgtacgacaaggagacgaacccaaaacccgcgtatccgaacgtgaccagcatgaagaacgcgaacggatggctcagggacagtccgatcccgtcgaacgcgttgagcaacgccatcatggacttccgcaaggcacggtcggcgtacttccgcaaagcccagtacgagaagcatcgtccccgtttcgtctcaaggaacgacaacatccaatcgttccgcaatgccatgccgatacgccgtatggacggcgaccggtacccgttgtccaagaagctcggctcggtgcgcatccgcaaacgagaccggccgcgctatcccatcaagaacctgtccagctggacggtgaaacgtgagaaccggacgtactatctcgtgctcctgttcaacgtggaaatccagccgaaaacgcaggccaagggtagtatcggcatcgatttgggcgtcaaggatttcctcaccctatccaccggcgagaaaatcaattaccccgaccggctgcgccgattggaggaggacgtcaaacgggaacagcgcaaactgtcccgtcgaacgagagggtcgaacaaccaccgcaaacagaaggcaatcgtagccaaggcgtacgccaagctccgccactaccgcgataacttccagcaccaactgtcccacaggctgatagaagagaaccaattcatcggcatggagaccctgatggtacggaacatgacacggaaggcacagaagaggttggacgccgaaggcagacccatgcgcaacagccagtcacgcaaacgcgcgatgaaccgttccatactccgcgacgggtggagcggcctcgtggacaagctctcctacaagacggaatggtatggtcgcaccctcgtccaagtggacaggttctacccgagttccaaactctgccacgactgcgggcacaagtacaaggaactggtgttgtcggaacgcgaatggacttgcgaaaactgccacagcagacatgacagggacgtgaacgccgcgttgaacatccgggacgaagcgatacgtatcagtcaggaaaaccaataacgggaaaaagaaccgaccgacaatcggggatagcccgctaaaaatgggaagcctctgggttcagacgtatcgtctgaacccaagcaagcccagttcgcaggaatcccgtggtttcaaccacgggagtgtcaaatagtcggaatcgagttcgcttgccgtgcattgcatgtgttcgagcagacatgcttccaatgtggtgccgcttccggcgaacggctccagcacgagaccatccgccggggtgacgagacggacaagccagcgcatgagttcgaccggtttgactgtcggatggaggatgccgtcgactttcggccgttcagacggtgaggctttcggacaatacctgaaaaccgggtagaatcgactcgcgccgcccatatcgtcatattcggcgcccgtatgggtcataccccagccgtcaccgggtttcgtgcttgcgcgtggtttgccttttcggctgacggtgacgccggactgtcggtcgagttccttggccgtggactggtcgaacagcatgttcggcgtgaaacgggcggcagccgtgtagtcggtgcgattcgctttgtccgcaccatatacatggttgtctctcggcccggagccgaaccgtccatgctggttcttgcccttcgactccgcctcgtccgccgtgttgcggaatgggacgcggcatgcgtcgatatgcagtgcgcctgtcccgtgtccgagcagattgtgggcgagattcccgtccaacggcttgcgggccagacagatgggttcgtgcgcgggcttcagctggctgtaccagcctttgaacggtttcgccgtctcggatcgcgtcggctccacatcctcgcggcgttcccggtcgatcatgagcgtcgcatccgaaccgtgtggcatgccggacgcgtacacccagtcgatctggtcgcggatttcgaagcccgcatcctcgatggcgcatgccagccgatgataggtgcggctggctgcgaacgccgccacatgcccgcccggcttcaggacgcgcaggatatccttccacaggtccacgtcgaacgcgatgcctgtggaatcgaagctgcggttcatgaaaccgatctcatacggcgggtcggtgacgacggaatccacgctgttgtccggtaaggaggcgatgagccggcgacaatcccccttgtataggcggaggttgtcgcccagatcttccagctcgatcaatgtcggaaccgtttagaattccgggtcggtgccgtcgccgttcggatccgtgctggctggcgtggtcgtagctcacggatccatcgcgggctgtgagggtgctgcaggttgcgccggtgtctgtgcgggagcctgttggctgtaaccctgctgctggtagttgttgtatgcgccttgctgataaccgttgttcggctgctggtatccgccgccgtaattgttctgccggtagccgttgccgttggactgttggccgctggtcttctgaaattgcgtgacgccgaaccggaggctgacacccaaatcggtgacgatcatttcaagattgctacgctgttggccggtggtcttgtccgtccaactgttggttttcatgtaaccggtggctaccacgcgcatgcccttataacaggagcgcatgatgttctgggcgaggtctccgaatgctgcgcatcgcatgaatacggcatccccatccacggtctgcccgttacggtcacgtcgacgcgtattgtgcgcgatggtgaaagtgaccgtatctcccctctgctcggggtttgctgtgatattgcctacgagtgtgagtgtcggctctcctgccatgggttcctggtctccttattttttctatgtgaacatattcagtataacaagcatatacgaagaaaaggcatgtcggataagcatcaggacagaggagaaaaacctgacaccaatccgacataccccttttagcaggatgggctcactccactacggcggaatgagcccatcaaggtttctatccgatcagcgtgaccgtcttacaggcggatacgcttcctcgaaccagccagagcgagagcgataccagctccggcgaggaccccggcccacaggagcatcggggtgccgacaccagtggaggcgagacccttctccttgacgagcacagtctcgttcgacttgcgcgcgtcaccataggagataagcttgcccgtctggtcgtacaccttctcacgccagtagtaggtgccggtttcatgcacggtcacggtcggcgagtggacgccgtccttcgcgtcgaccttaccggtgacggtgatgagcacgtcgcccgactggtcgccgttggactgcttccacaattcgaattcagccttggctgcctgctcgcagttcttgagcaggagctcgtcgtgcaggtcggccctgccgttctccatcgtgacctcaccctggctcttggtggacacctcgcacttcggcacgtcgggcttcttgccttggacgcgcacgatttcggaggcaagaccgaaagcgtgctgtaccttgccgtgggtgagctgacgccatgcgagggcggtgagcggattgtggttctggtcgccggtcaggcttggggtcatggtccaatgccaagcgtaggtgcccgattcggtcagggtgaacgagtcggtcgtgtaggtgccgaacttggtgacatccttgatgtcggtttcgtgaaccttcaccgcgttttcgggcacggtgtcggtttcctcgatcgcggcggacgggtcgtcactcaccttgtagaggacgccgtggaagtcgaggctcagcggggtggccttcgggatctcgccttcggtgacgttggtctccgggtaggtgggccacacgtccttttcgttggtcttggcgacgacgagcttgtcgacggtggtctcccccgccttgacttccttgctggacactgtggagtcgagcttcggggtgaggcggaacatgacggtctcatccgcggtgaacggagcctcatgaacatccttggcgaacggataatcgtcggacggtttgataccggtctggctttccgtgtcctgatccttgttcgcgatgtcgaacacgaacgtcgcgtatccggatggcaggttcgtcagatccacaccatcctcggccttccattgggcgacaggcttgtcctcgtcactgctggaaatcaggtagtcgccggccttgttcgtggtgaacgtcgcggtggcgagcttcacagcctgcttgggcagttcgacggtcttgcctgcggcggtatccttctgagcctgttcggcctgttcgcgggtcataccaccgtagatggcgccattcacggtaagcgtgatctggttgtcttccgtttccttgccttcgccctgaccgtccttggtgtgcagccagtcctgggtgtcgaccttgccgtcaccgttcacgtcggtcacgttgagcgtgaccttatcgcggatgacgctgcccttttcaaggtagacgacatcggtcttgtcggatgcctgagcggaaccgatttgcacgctcggacgttcggtgccatcggcgccggtcaccgtgctctgatcgttcttgtaagcgtcgctcacactcgacgtgatggtcggctgcatgttgcgcacgtgctgagtggtttccgcttcgagcacgttgtcggaccagtcgtagtccgtggacaggtactgcttcatgttggcgtcctgcatgtcgggcgtgatctgccacacccacgtgtaccagccggtgtccggcaggctcgacggggtggctcccgggtgcgtcttcatgaagtcggggtccatggtgatggaggcggcgtccacatgattggtggcgccatccttgtcgccggtgacggtcgcggtcgcggccttcaccccatccttgacggtcgtctggccttcgaccggcttcttcgcgaagtagtagagggtgccggtgctcttgatggtcgcgccttcaatccagtcgccgcccgtcgggtccacatgccaggtcagatcatcctcgggcgcatgcccgtattcgatgcgatggtccgactggtcggactggatggtcggcttgaagttgttcagcacctcgaactggatgttcttcgacacggtctgggggtcggtcgggcccatcagattctggttcggagaggacagtatggcggctttcgggatcttgcggctaagcgtataagtcacctcgccgttgccggtcgcggtccatgcaagatgctgatcggagccggtggtggtgccgctgatggtgttctttccgttctggtcgaacactgccgggccgttcagggtcgccgtgtactgggcacccgcgatgttggctccgttcccgttctggatgccgacgttgatggtgcctttgcgtttgccttgcgtgtactggtattccatgttcaggccggcgggcgtgttggcgaccgcctcattccacaggctgttcatcttcgccgtgtacgtgtcccagctggtcccgtcggcccagccgagccgccggaggccgtccaggtattcgttgcccctcgggtcgagcttctgatggatcaggcccgcgatcgcggcctgcgtgagatcgtccctgtccccgttgtacctgtcggtcagccatgcgagccgctgcgcgtccggtttcgtccgctcgtccgtccactcgccccacgtgcccgccgtgcccgtgtagagcacgtcggcctcgatgcagtacgtgttcttcccgttgaccctgtctacgacgcccagcgactgcgccatgttcttgtattcgtgcccgttgctgaacgtgatcgtgcccacgttcgtccacaaaccggggttgccgttctggatggagcgttcgaacgggtcgcgcatggtggccgcgtccgccgtgcccgcgacgagcatgcccgccgccaaggtggcggctgccgcgacgcccgccgcgatcgtgcggaccacatgtcggattgtggaaccgcgagtgggattgctgtttctccccatatcgtctcctctgataagaaggacattttgtcaccagtgatgttcactgacgtcttgcggtttttaccataacgtcaaatcttgtaattaaccggtttttcattgaaattgaccgatattttctgtgagcggccaccttaccgttgcgcttgcaagcgcatatcattggatgcagcctgaaattgtccacgaaacaaggcctggacggcgaccatgtattggaggcacggttcagcctgacagtcaacgacatagtataaggaaagacaaatgaatgagaaagaagaacctatgaacatgaacgtcacgccaccggttgagccggtgacggaattcgaagtccccctacctccggatcgaaagcgcccgaagtggctggttccgttgattgcggggggtactgccgtcgttgttttggcggctgtcggcaccggtggatacctgtattggaaccataatcagttgacggcggcttcagaggaatgcgccacctcatacgacaaggcggtgaaggggcagaagaagctgacggagtatctggagtcggatgcgatgaaggccgcaatcacggtcaaggattcggaggtcgaggacgcgaagacggtcgccgtattggcctcgaccgtgaaggccgtttcgaatacgaagaccgatatccccggatgcccggcggatgggttgaagggcatccgggcggtgaccgcgcagctcgacaagaccgcgaccgcgtatgcgaagaccgtgaacgagatcaggggcaaggcggatgcggtcaacgcctcgaagaccgacaagaccgtcgccgacgcgaccaaggtcctgaacgactccaagggcagggtggaggacgacaaggttcgcaccgcattggagaacgccatcaaatcgaaggacgggaaggcgatctcggatgcggtgaaggcggtcaacgactccgtcagggcgaagtccgatgcggacgcgaaggccagggccgaaaaggaggagcaggcggcggagagcacggcccaggcgccggacaacggctcctcctacacgggcgatacgaccggaggctacaccggatacacgcaatcccagggcggatacacgtacacgccgcagcaatccaccggtggcgggtacacgcccgcaccacagccacagccgcagcccgcaccacagccacagccgcagcccgcaccacagccgcagccgccccagggcggcggcaacggtggagacggtggatgggttgaagataagttctgtggcgtattggggagtgatccacacccctgctgattcttttggagccggctcgggaactgccagcgaatcctgtccgagaaagcctcgtcgaccgaaaacgtcgataaggcacacgagccgttccgccccatgtcgttcagtagtggtccttcgcggaaaggatgcagagcctgtcgtcggcgacggtgtagatgatgcggttggctgagtcgatgcgccgcgaccatgcgccggacaggccccatttgaggggctcgggcttgccgatgccctcgaacggggtacgctgcatatcccgtatgagcgcgttgacgcgcttgagggtcttccggtcctgggattgccagtacaggtagtcggcccaggcgtcttcggtccagcagagcagcatcacgcgcccgcttcgacaaggtcatgggccatcgtctggccctgccgtacctgcgccatgccgcgcatcaccttgtcgcttagatacgggttctggtagacgcgcagcgtctccatgagcgaatcgtagtcgtcggcgctcatcacgaccacgttgtcctccgggtccgcgttggtcacgagaagggtgtcggcgtcctcgttgaccttgcgcatataggtcttgagattcgccctgaaattgctgtaggccacggcctgtgtcatcacgcacctcctatttgtacaagaaattgtaccaccatgttgctggaacgcggcgtgctccgtgtcggtcgtagcgttcttgtcggctggtgcggggcatatgtccccaccttaatagaacatctgttcgaatattggttcggttttgttacgggaaggcggtaggtcatggcttggagattcgtcacgcacgcatgcgggcaccaggagcggatcaacgtggacggcccgtacgtggtcgtcgaacagcgcgtgaagaacgcggaacgggtgtcatgccccgcctgcatcggcatcgcgtcccggcagcgcaacaggctcgacgggttctgcgaactgtggggctcgaaagcccagtgcgaccgcgcggagccgatacgccgccgcacgctcagccaagtcgacgtgctcgcccgccacgcgcgcatcgaggatcgtgacgcgttcgccgaactacgcagacaggtgctgcgcatgaacgacgcggcatggtggatcgaacacaaaaacgacgcggccaccatgctcgcccaggacatcgagctttaggattgcggaaagctgaggaagcccgtggacttcggctccaagagactggacgtcccatgttccgaagaggcgtatcttcgcttcaaaaaacaagggatgcctttcggcatccctgatgttgctgccatgctgtgaggagccagttgcaggagggtcccgcatgacagcaagctttgcggacagactgcaagtcgaagaacggaggcgttcgcctcacagcctgttgattggatcagacgttttgagaccgatcaggagacggcgtcgcgtcgttccctggttccggttcggaggattcgtctgcatcattggatttcgtcttgcgggtcacggccgtgattcccaatgctccgccgatgacgacgaggatgccgatgagccagccgacccagccgattcccacgccggtggaggcgagcgggctcacgccgttcgccggcggcttggaagtcgtgccgtcattgttgttctggctgttgtttccggcattgtcatcagggttgatggtggctccgtcatcgtccttgccttggtattcgaacgtccatgtgacggtcgtgccgtccttggaggcggtgaacaccagcttcgagtcggatgcggtcttgtcaagcttccaatcggatgggacgttcgagatcttcacctcggcacctttggcgaccctgtaggtgccggatttcgtcgggtcgaagctcgggagcggtttcccgtcaacggtggctgccacgcccttcaatgcgtccgcgcccgtggcgggcttgtccggatcggtcgtggaatcgtatgtgaacgtccacgtgacgacggtgacgtcgcccttcttgatgtcgtaggacagggtgccgggtttcgcgccaagattcttatatctcgcccaaccgtcgggcaggccggagagtttcacctccgcgccgtcgggaatggtccatgtgccggtcttcgtcgggttgaacccgtcgaccggtttcccgtcggcggtggcggtcacccccgccagttcgcttggatcggccttgtccctgatgctcggcgtggtggttccgtcatcgtacttgaacgtccaggtgacggtcacatcatccttcgtgcaggtgaaggtgagcgtgccggtcttcgaatccgccttatggtcaagcttccatccgtcgggcacgtcgccgatcttcacctccgcgccgtcgggcacggtgtatgtgccgtccttcaccggattgaagtccttgacggcggtgccattggcggtggcggtcacgcccttcagctcgcccggatcggctttgctgctcgcatcctgtgaggcggtgtgcagcgtgtaggcgacggtgccgccgctcttcttgccctcgatcgtgacccggtacgccaggtcgccggaggtagacttggactgcgtgatcttcccgtcgacgagccagccggcggcgttcgtgtcaatctcgagcggcgcgcccatcggcttcagcagtcccgtgttcgaggtggggatcttgtccgcgatcgtgtcgagtgccgattccttgactccgaaatagtcggtggtggatgggtcgaacctgtcgatgcccagggcggatgcgatctcgtccttgtgattgttgaggaacgccttctctgcggtgctgaacttgtcgagcggattcggagccgtcgaacgggccgaaatcgacgaggacgggttccctgatacctgatccgcgaaagcggtgggcaacatgatcatggggcttacggacagggccaggccaagtgctacggcgacaatccgtttttgtttcatcatgttctttccttttcttgtttttttgcccgacatttcatgccgagtcagagaaaattaatggaaggcttgcgacctgatgcggtcgcaagccgttgctattagaagctgcgtccgcgctggcgccgacgtgcaacgagtccgagaaccgttcccatagccatcaacaccatcgacaggaacgctacggttccgccgccgactcctgtggaggcgagtccgagagcattgtttccgttgccgccgaatggtttgcgagtgacatgcaccttgtaggtggtcttgaccaatccgtcaccggatgtgacggcgatggtggcgtccgcacccttcttctcggtgctgacggtcatgccgcttgccttgtcgtactgcggggagaccatccactcgtccgggtcattcacggatgcggcatattcatgtttggccggatcgaatccgttgacggccgtaccgtccacgaggatgccggtcagctgcgccttgtgggttgctgccgtgatataggtgacggtgtacgtgtgttgcgcgaacgtggtgccgtctggggcgagtacgttgaccgtgtatgtgtaggtcattccctcgtgggctaccgtgactgttgcggattggccgttctttggcgtgtaggcgaaagtgccgccttccgggatgatgtaagaatccttgtcggatgtgacgtatttgccggttttgtcggtgtacccgtgcgatgcgagcgcggtgtcctgttggttggccgggtcgactgtggaagcctgtttggctgggtcggcgggcttgaattcggttaccgcggttttcacggggcgggtgacggtcagactgtagatgcggctggttccggttgcggtgtcggtgacgatccattcctgacgggtggattgcgcgttctgcgtgatgttgccgcctttgacggtgaccccgtcggaggcttcgggtagcacgtatgggcttggatccttctcccccaacgcgagcacgtagtcgagtcggttcggattccagttgtcgatgagctggcccttcgtgttttctccggtcttgttcacgtacaggccggtgagttttgcaggggaatcggctttcaggtcggccggctggaatttcacgttcaccgtgtagtcggctccgttcacgttcaccttgagcatgcgggaggctccctctccgagcgcgagcgtcggtttggatgcctgggcgtcgacaccgtgggtgaggcccagcgtgtagctgtcgccgaccgcatcggccggtagggtcagcgtgtattcgtgggtgtcggggttgaatttcacattgaagtctttggccccgtcgtatacggtggtttcgcctttagcgttggtgcgggtcacggtcagatcggtgaagcttgtatcctgggctcgatccgcggtgacatccacttccaccggcacggtgacgcttttcttgctggcggcatcctggatggtgacgtcgccggaagccgtcccggtgaggcgtacgaacttgctgacggtgtcgccggttcccttgtcgacaacctgcacgtctttgccccatttgatgggcagtgtggtcttgatgccggtgagggtcaccgtgtccgtgctgggcttgttggattcgtccagtgtcggaccggcgtaatccgcatggtattttccgccgtcaaccttggtgagttccgtttcggtgccgtccacggtcaccggggtgcccgaggtgtaggcgaacggcagtgtcacgtcgaatgccggagtgggcttcgtcgcgtcggcggcctgcttgtagacggcggtgccggatacgttcagctggcccagcttgtcgccggattccacggtgacgttctggtagtcggggctcagcgtgatctttcttgctccgtcagtgacggtgatgtcgcccgggtaggaggcgctttgatccaggaccgcggatgcggtgttgtctttcacgctgagaaggtatttcttgccttcaacggtggtgttccatggttgggtcgcctggtcgtcgacgattttgtcgacgatttcataatccgtgacggtcaacgtgaacttgggcgcggaatcggcggcgctggtgtagacgacgcttccggtgattttcccgttcgtatcaggtttctggctggtggtcagagtgttctgggatttgtctgtgccggacacgaccacctggttctggaacttgcctttgacggtggcgacggtcgccgcgtaatcgccgttggcgtccttttcgaaggtgacgggcgttcccgccacggtggtcgtgtattcggtgtccttggcggtctgagtttcactgctgccgttgttcccgtttgcggtgttttcgtcggcggtggccgtcatgactccgggccccgccatgccgagggtcaatgccgctacggtggcgatggtgcccgcgttgcgcagaccgctgctgttacgtttggccattttcgagggttctccttgcctgagttttctcaaacagttctcactgtaacctcagggtttgtaattaaccgattttttattgaaaataaccgatttgtttttcgcggggttgcaaccagttaacttaattgcttgctttcgattgttttcgtatgatatacttgagtcatgcgtgtcagggaatgggcgaggcgtgagggcttcaacgagcagacggtgtggcagtggtgtcgcgagaaccgtatgcccgtcccgttcgagcgcatgaacacgggcacgattatcatccacgacccgaaatacga

SEQ ID NO: 2625 - DNA, 2970 bp, Unknown
  R222_15m  MAG No. k141_38180
gctgattacgaacgggaattaccgtaaatgagcgctcgttagcgagataagccactgttttcggtgtccccgcgccatacaattaaaagctatggaacaaaaggatgttttgaaggcgctgcagcgtgatcatgcagccgaactgaagctggccgccaaacgtctcaaagggactgcccgtcatacggaaattatcccttcgccggtattgagcgagatgaccggtcatgagattctcctgaagccggaaaacctgcaggtcaccggttccttcaagattcgcggcgcgtacaacaagatcgcatcgctcaccgaagagcagatcgcccgtggcatcgtcaccgcatccgcaggcaaccatgcccagggcgtggcctatgcggcccgtgagcgtggtgcgaaggccaccatctgcatgccgcagatcaccccgccgctgaaggtcgatgccaccaaggcctacggcgccgatgtggtgctgtacggcgatgtgttcgacgaatccgccgcccacgctgctgagctcgccgacaaggaaggcatgatttacgtgccgccgttcgacgattacgaagtcatctgcggccaaggcaccatcggtctggagatcctcgaagacgtgccgaacgtcactgacgtggtcgtgccgctcggtggtggtggcttgggtgccggtgtggcgctcgccatcaagacgttcaagcctgaagtgcgcgtaatcggtgcgattccggagggctccccggcctggaaggactcgctggccgcgggtcgtgtgtctccggctgaccatgtggtcacctccgccgagggcgtcgcggtcaagcatcccggcgatctgccgtttgcgctgatcaacgagttcctggatgatctggtcaccgtcaccgagcgcgacatcaacgaaatgattctgctcatgctcgagaagcacaagctggtggtcgaggcggccggcgccgtttcgctggccgcgctggaacacctgaacctgcgttcgcgcaagttcgccgccgccaccggcccgcacgtggtggtgccgattatgtccggcggcaatatcgacaccgtgaccatgggtgcggtgattcagaaaggtatgatcgcccgcggtcgcatcatgaacttcgaggtcgagctgccggatactccgggccagctcgtcaaggtggccaccctgcttgccgagcagcgtgccaacgtcattcagcttgaccacgaccagttcaaggcatccggccactacaccaacgcggtgtctctcggcgtcacggtcgagaccaacggccccgagcacatcgaccgcatcctcgtggcactcagggaagctggattccagcccaagcgcatctactgattccaataccgctggcgggaggccgcgcagaagtgtgctccaatacctcccgctagcgggaggtggcgcgaaagcgccggtgggtggttaaccaacaatcatcagttgcttaaccacccaccggcgctttcgttatgctgaggactacttgttctccgcaatcgtctcgtccaccaacttcggcagcgcgacggcgatatcctcatgaatcaagcggctcgcaagatggtcatattgcgtgtgacccatattcatgatggtgatgggcacgcccgcctgcgcggccaccggcacaatgctcgctgccgggtacacctcaagggtcgatccgattacccatagttcgtcggctttggtggccaagctgtacgacttctccatcgctccgtccggcagtgcctcaccgaaatacaccacatcggttttgataatgccattgcatggcatatcgccacgatacttcagtttgcgatggcaatgtggatcgggttcttcatccaaacgggccatgatgtccgccgtggcatattcctgatggcacttcatgcaatgcgaggtgccgatagtgccgtgcaggttcacgatgacgttgtcgctgttgccggccttctcatgcagcgcatcgaagttctgcgtggccagcagcgtcaacatgccggcttgttccagcttgaccagcgccttatgcgcagtgccgggctgcgcattccatactggcgattccttttgccagcgccaggagtactcgcggtcctctttgttgcgcaggaacagatcgatgtcgtaaacgctcatttggtcaggatgcttggtccacacaccgtctggaccgcggaaatcagggatgccagcggacgtggaaatgcccgccccggttaatacagcaatcttcttggtcataactacaggtatacccgtgattcatgaacgaaatccgatgatggagcgttgttgccatgcattgattgtgcgccggtggtgtggttgccgaacgatgaacatggagctgacagtccgaaaactcgtgcgacacgccagccgaataatggattcgatgttttccggaaacattcgaggggttacgctagccctatcagagcaaattgggctctgtacgacacgccgaaggaaccgcgctgttatgccgattccttgggttcttgtgcgctttgatttgcgttgtggcgtggttgcgtgtaagttattcacctgttgccgctcggcgcggcgggttccttcttctggttggtttcctgtcttgctggtgtggtggtggtttgagaactcaagagcgtgtttgtactacttctttatagtcaatgattgccagttcattcctcgcctgatcgcctgtcgtggtggtcgggtacccgggagggtttgatgaggggtgaggttttttgagggcgtccttccttaaggacgtgctcgtcgatttttttttgagagtcatctgtcgatgtctcttcgcatttttttgtggagggttcgattctggctcaggatgaacgctggcggcgtgcttaacacatgcaagtcgaacgggatccatcgggctttgcttggtggtgagagtggcgaacgggtgagtaatgcgtgaccgacctgcccca

SEQ ID NO: 2626 - DNA, 39429 bp, Unknown
  R222_15m  MAG No. k141_39119
acaaccagaaaaccgcccttggcgacgttgcctcaggcggtttttcagcggaaggagagaaaggagaaagaaggaatggaaaggtgccatgcgggcataacacaacaccgcacatggcgaaactatcgaatcagcccatcgggcgcactggcatcataattgatgtgtacacgcccgatggagcgaattcaatcggtcagaccgatggtcactcgacctcagccagggcatcaatgatgtagttgttgatggtggccttgacggactcgaggtgatcggacttggtggcggcgatgagctcggactgcggcttgtcgaggctgtaggcttcgaggtcggccaaggtgacgttgccctcgtcgatgtccttgccgatgccggagtcgtaggagctgtagcgctcggcctgaagattctggatgaagccgtcctggttcatcttgtcggcaaccagcaggccggcggcgtaggcatccatgccggcgatgtgggagcggaacaggtcctcctcgtagaaggaggtacggcgcggcttggcgtcgaagttcagaccaccgtgaggtccgatggagccggcctgcaggacttcccacatgacggcgacggtctcgtacagatcggtcgggaactcgtccatatcccagccgatgagcttgtcgccctggttggcgtcgagggaaccgaggaagccggactcgcgggccacgcggatctcgtgctggtaggtgtggccggccaggttggcgtggttgccttccaagttcagcttgaagacgtcggtcaggtcgtggttgcgcaggaactcgatggcggtggcggcatcgaagtcgtactggtgcagcgtcggctccttcggcttcggctcgatcaggaactgggcctcaaagccgatttccttggcgtaatctgcgcacatgtggaagaacttggcgatgtggtcggtctcgcgcttcatctcggtgttccacaggttctcgtagccttcgcggccaccccagaacacgtagttctcggcgcccaggcgcttgccgatctccaagctcttcttgagctggccaccggcgtaggcgtagatgtcggcgaacggagaagtggcggcgccggacacgaagcgcgggttggtgaacagggaggaggtgttccacagcagcttgacaccggtggacttcatattctcgtcgatcttgtcaacgaccttgtcgaggttggcgttggtctcgcgcagggtgtcgccttcgggggcgatgtcacgatcgtggaagcagaagtactcgacgcccagcttctggaacagctcgaaggcgtagtcgaccttggccagagcctggtccatcggatcggtgtacttgtagtacgggcggtgcgcggtgccggtgccgaacggatcaaccagttcctggttgaaggtgtgccaccaagcaacgccgaagcgcagccaatccttcatcttcttgccggcaacgaccttgtcggcatcgtagtaatggaaggcgaagtcttccttcggtcctttggcgcggccgacgtactcgatcttgtcaacatcccacagacccatttgggcgctcctttgcagtaggcgatattacggattgcaggaccaataataaaacgaacgaactaagtttgtcaaatgattgaattaatatgccgcgtctcagcgtgttgctagtcattgcaatggttttcgaatgcagtcaaggcacagatagtatggacaagccaagaaagacaactcagccaagaaaacgagacttgataattgacgtcacgcaattcctcgccggccaccgctgaggccggctccaccaccccgccaactccaacagcaccacccccgccaacaccaccgccatggtcatcaccctgatgatcggctcgtttgtggccatcctcaaccaaacgctgatgatctccgccctgcccacgttgatgcatgaattcgatgtgcccggcagcaccgtgcaatggctgaccaccggattcatgcttaccaacggcatcatgatcccgatcaccgcgttccccatcgagaccttcaccacccgccagctgttcctgtacgcgatgggcatatttgcagaatgatcttggcgttaatgcactggtgtccggtctggtgatgatgccgagcggcatcgccatgggcatcctgaacccggtggcaggcaagatgtatgaccgtatcggtggccggccgctcgccttactgggcttcgcgatcatgacgtctgcggctgtgctgctggtcaccatcatgaacacgcacaccgcggcggccatgcgcaccggagtgccggaagcggcggcatcggccattggcgtgcgggcttcgttccgcacggtcgccattgtgtgcgcggtctgtttggttgcgtcactcttcattcgtgatcgcggccgccgacttggacagcagcgttaggcgaatccttcaccgattgctggccttcttgatcagcgcgtccaaagtaccggcttggcgcgcggcttccatatcttcccagtcgagaccggtgtctttggccctcccgtagaaaaaccgcaccagaccggcaaagtccggtttatatccggtttcccggaatgaacgggccagcgaatcaccgatttgcgggtcatcaggccttcgtgcctcatagatcgggatggaacaggatcgccacacgcctctcacatgtgcgatgcgattgacgatcatgccgccgtgcgcaccatcgtattgcgaggcggcatgtacgtccgccacctcgtagacaccaccatgaatgatgtcctcaactgtcagacgacctttgaccgcgctggcatcgcgaatccagaacatcgaagcgaaattggtgtcatcaagttcgcgaaaatcacgtatctcgcgtgtgccgatacgttcgtccttgtcatacatgaattcggccaaggctaggaatggcgagatacctgcgcccggaccgtactgcaattcgatacgtaaatcttcggattcattgccggtcagtccaataccgctgacggcgcagtcataggcaaaccaatcccagaaccaccattcgatcctttgcagcacctgcttcggatactttttgcatgggttcagattcacttcgcgataatatatgcgtctcgcttcggcatagacggcgagattgcagcgtttgaacatctcggctacgtctttggtgtccagcattgctggcaaaccggcattttcggcagtagtagtggttgcggtgctcatggtgtttccccttcatgtgatgtggacggcgggctacgttgcccgccgtgaggcacactgtatgacgttcgtgcggtggcccgcaagcccacatggcgagatggtggataagtggaaaacccaatgattccaaggggtatggaatgtgcataacagtggctaccgtcggtggataaccgcactttcttgcaggttatccactgatcgcgcagctgttatccaccgtctctgggttatccacatcgtctctggcgtgtcgtccactgtcagcagtcgatttctgcttcgtttggcgtgtataagtgcacggtgaagtgtataactccgcgcattaggcatatttgctactgagaaaggtcccgaaatcgccttcgaacgcatagctacactcagcagatgtattcagcatggcaatagacccacttaggcaccggcgaatgattttccctcgcttatagagtcggcaaaggcccaacacctgtcccaacgccgacgctactgcactggcagcgtcggcagaggaccacaacttggcacagcaacgacgctaaaaccgcccagcatcgttacacgtccaagttttggccgctaacgacgcttaatgaacgcttagcgtcggcagcaggtcacgcactggttctccaccgacggtaacgctccttagcgaagccagcccgccactctttggcacatcaccgacgctgagagaacctccagcgaagccaaccagccaaccgctggcaacatgacaccacccacacccctcagcgaagccaaccggccagcgcatggcaccccaacaccgctgagaacacccaccccaccagtgcacataaaaaaaactggtcatagcggttgcgatgtaattgcatcgtaatcgcgatgaccagcctcggggggtgggccgcaacgagcaccgaatgaatcagatgatgatgccgttgcagtgatcgacttcgtgttggatgatctgcgcggtccagccggtgaaggtggcgtggcgggcgcggaaccgacggtcctcgtagttgacctcgatacggcggcagcgcagtgtgcggcgttcaccggtcagcgacaaacagccttcctgggtgtcgaaggcaccatccgaagcggtgatcacggggttgagcatcaccgtgatacggccaccgagatcttcgtccacgaagacgatgatgcgcttgctcacgccgatcatgttggcggccatgcccacgcaccgtgaacggttggcctccaacgtatccacgaggtcctgaatagttgcctcgtcgcagggcccagccgcttcagacggtgtgcgcaaaaacgaccgcgaagtcataatagggcgttgcatgttggaatcacgcttcttcgtgccagtggatgttggtgataagcggcagggagatgccggtaccgagcgacatgaccagtcgggcggcgagcagcatcgggaagttgaccgcgagcgcgcccagtaatgtgccggcggtgaaaatcacgatggccatgatgaacagtgttttggtggcgaatttgcgcaccatgaacggcgagctcggaatcgacaccgacagcaagagcagataaccggtgacaagccactgcaccaccgaggcgccgatggagaactcctccatcggcgtggagtaggcgatgttcagtgacgtttccgataggatgccgaggaaagtcaggatcgcgagcgagacgaccgcgatgacgagtttgttggagaccggttgcttgccgccgttaggcagctgtgttgcggaatgagtcacgatcttgttctctcctccattcattcagatattctgactacgacgttggaagtcttcctgcatgagtcgcagagcctcggtcaaggtgcgtaccgtggtttcgcactggtccgaggtcaatccgcccagcagttggctcaaatgcgcgtgatattcctccacatagatgcggcggatatccaagccgcgttcggtgagcgtgagcgtcaccgcacgccgatcggcggcatcggcgtgtttgacgacgagtccgaggtcggccatttcgccgacgagcttggtgatgctcggcgtagtgacgccgaggaatgcgctgacgtcgcccacgcgcgcggtgccggtatcttgcccattcggttcgttgatatgccagacggcgtcgatcacgtggacatagcgcggtttcatacctttcggcaatgccggcatcagttcggtgatggtcttggccttccagcagacatccaggaggctccgcacctcattcaccggaagcaagccggtcttggtatcggttcgggaatcgcacatcgctggcccaacctccaattagttaccaatagtcattaccataagtaactacatgcaggctctagacaaacccaacgacctgcgcgcccgtgtcgagttccgtttcggcataaaaaagccaggggatccctggcttgcaatgcacatatcgctgcaggtttgccgggacctatatgttcccggcaacaacagccgtatatacgttaccgatcagtgctgccctcatcatccttggcacccgccgtggcggcctcagtctccttggcgttccacccggtgacggcattccaaccactccatccgatgaccactagcaagcacagcgagaagacaatagtggcccaattgaacagcgagccatcgttattggcctcgaccagtgactgccagagccagataacgcaggccaagcaggtcaatgcatacatacgggaggtggagcgcgcggtgagtttcatggcggaaaaagtcctttgattacaagaatgacggcagataacagtgtgggatccgcaccagcggcaccggcacgaatcccacatcgaggaggagaaaggggaaggtcagctcttcttgcgcttggatatgatgtccacggcgacggccagcaggagcacgaggcccttgatggtcttcaccacggcggtgtcaacacccataatcgacagaccctggttgataacacccatcacgaatgcaccaatcacagcgcccgggatggtaccaataccaccggtgacggccgtgccaccgatgaagcaggcagcgatggcgtccatctcgaactccataccggcctgagcagttgcggaagccagacgggaaagcatgcagacagcggccactgcggacaggaagcccatgtggacgaacagcaggaagtccacgcggcgggtgttgataccggagaggatggcggccttgcggttgccaccaacggcgtacacgtggcgaccgaacacggtcttggtcaggatgaagttgtagatgaagaccagcacaccgacgatcaccagcatgatcggggtaccaccctgatcagcgttaccggaggaagccagcaggtaggtgacgaaggcgatgacgaccgcgacaagcacaatcttgaggacggtcaggctcatcggctcgggcaccaggccgaccttggccacacgggcgcgcttgcgcagctggctccaggcaaagccgacaatgcacaggatgccgagcacaatggtcagaccgtcgaacggaccccaccagccaaggatgttgggcaggtagttacgggcaatgccacggaattcgagggaggtaatcggcacggattcgccgacgatcacggtggcgagaccacggaagatcaacatgccggccagagtggtaatgaagcccgggatgccgatgacggcgacccagaagccctgccagacgccgacgatcaggccgacgaccagagcgatgacgatggcgagcatccagttgactccggcgcgttccatcagcagtgcacacacaccaccgatgaaggccaccaaggaaccaaccgaaaggtcgatgtgggtggcgatgatgaccatcaccataccaatggccaggatgatcacgtaggcgttctgctggatcagggacacgaaggagttcggcttcagcagcacacctccggtcaggatctcgaaggccacgacgatgaccagcagtgcgccgacaataccgtattgacgggcattgttggcgaccgtggccagcaggccggtcttttcttctttctttgcaggtgttgcagttgcggcgctcatcaggctgccacctccctttccttggtcatacccttcatcaggtattcctgggtaaatccattcttctcgacattgtcggtgacgacaccgtaggacaccgtgtaaatgcggtcgcagataccgatgagctcaggcagctcggaggaaatcacgatgacggccttgcctgcatcggcaagcttatcgatgatttcgtagatctcatacttggcgccgacgtcgatgcctcgggtcggctcatcgaggatgaggatgtccggctgcgagataacccacttggcgagcagcactttctgctggttaccaccggagagggtggagacattcacatcgatgtcatgacacttgatgttgaagtccttgcggtactgttcgacttccttgcgctcaaggttgtcgtccacaaccccgcccttgctgatcttggtcagggaggccagggatgcgttctctcggatgttctgcagcaggttcagaccgttgcccttacgatcctcggtggcgtaggcgagacctgcgtcaatcgcggactgcacgttgggcatcttgacttccttgcccttgacgaacaccttgccggagatgttggaaccgtaagagtggccgaagatggacatggccatttcggtacgacccgcacccatcagacccgccagaccgacgatctcgccggcgtgcacgttgatgttcgcatggtctacgatcacgcgctccgcgtcgagcggatgatgcacggtccaatcctcgacgcgcaggtattcctcgcccggggtattggaggggtggttcgggtacaggttgtgcagcggacgacccaccatcttgcggatgagttcttcctggtcgagcggcgtctccggcgtcacgtacatcacaccgacggtcgaaccgtctcgaatgatggtgacattgtcggcaatggcggcgacctcgttgagtttatgagtgatgatgatgctggtcacgccctgctcgtcacgtagctgacgaaccaggtcaagcaggtgggcggaatcctcatcgttcagtgcagcggtcggctcatcgaggatgagcagcttcacgtccttggacaatgccttggcgatttcgacgagctgctgcttgccgacgccgatgtccataaccctggtatccgggtcttcgggaagtcccacacgatcgagcagcttcttcgcctcggcgcgggtcttgtcccagtcgatcacgccacccttggcctgctcgttgccgatgaagatgttctccgcaatggacaggaacgggctcaacgccagttcctgatgaatgattacgatgccgtcggcctcggaatcattaatagtatggtatttgcattccttgccatcaaaggtgattttgccggaatagctaccgtatgggtacacacccgaaagcacgttcatcagggtcgatttgcctgcaccgttctcgccgcagatggcgtggatctcgccgcgatcgacggaaagattcacatcggtgagggctttgaccggaccgaacgtcttcgtgatgttttccatcgtcaagatggtgtcatttgatgacatgtcatcactcctcgtcacagttctgtgttcatggacatgcggcgcatatcggctatgcgccgcatgtcattgtgtttgtttacggattgcctgatgaggactacttagtcagctcgtcgaagcgatcctgggtgatgtagttggccgtgaccagatcctggaggttgtccttggtgatgttctgggggtcaagcagcttggacgggacgtcgatgttgttgttgttgaacttgccgttcaggccggagacttccttgccctcggcgatctcgacgaccatgtcgtacacggcgtcagccagcttgttcacgtccttgaacacggtctcgccctgcttatccttggcgatgttggcaactgcgatctccatggcgtcctgaccggtgatgtacggccaggagtcggtgcccggcttcatgtcgggacgcttggattcgatggcgttgatcacaccctgggcgatgccgtcgtacggagtgaggaccgcgtcgagcttctcgccgtgggcgtaggtggagtcaaggatggattccatgtccttctgcgcctgctcggtcttccagctcatcacggagatcttctgccaatcctcaacggtgaagtccttggtcacgccaccctgaccgtgctgggacggggagacgagcacgcccttctcgaagtacggctgcagcagatcccaagcgcccttgaagaagtacttggcgttgttgtcatccggggaaccggtgaacagctcgatattgaacgggccggtggcgccatccttaagcttgagctggtcaatgagccacgtggcctcgagcacgccgacctgctccagctggaaggtggcgtagtagtcgacggcgtcggtgttcatgatcagtcgatcgtaggcgatgaccttggcacctgcatcgcgggccttctcaacggcggggcccactgcggtgccgtccttggaagcgaccacgacgatcttggcgtcgttgttgaccatgttctcgatgtcagcgttctgctgggccggcttatcgtcggcgaaggacaggatgaccttgtatccggccttctccagcttggccttcaggttgttgccgtccttgttccaacgctcttcggacttggtcggcatcgaaatgccgatagtggcgcccttttcgatcttggcatcaccgccagttgcctggccgctacggctgccaccgcaggccgcgaggcccgcgcacatggcaacgcctgccaccacggcgacgatcttcttagtgaacttcatttgttctccttcatcttcgaggggatggcgaaccctccttggtcgcccgaacctgagaataacctcaggttcatctcatagaataccgtattgagttaagttgtcaaactcaagaaagcgaatttcctgtcgtttatgttcaaccaatgaacgcaatggcgatttttcgcgcatcaccaggcgacacgccgaaaaatccacgctctgcgcctcgctgtgcctcatgccggtaacgactacactgaactcttatggcaacaaggcttttcggttcgcagacctcgcttcgcgaggcaaaccgcgccaacttgctggccagcatccacaagttcggcgccatgacacaggtcgaactggcagaggtgacaggactgtccactgcgaccgtgtccacgctcgtccatcagcttgtcgacgaagaccagctggagaccaaaaacaccgttcgcaacggtcgcagagccactctggtgacccttgcacggcatcagggcctcggcgtcgggctttggatcgcgcgacgtcatcttacgctttctatcgttgacttctcgaagtcaatcatcgctgagcacacgctccccctgccgttaggccacaaggcggacacaacgctggaacgcgccatgctgctcatcaatgagaccctgagcagcatcgacgccgaagccagcgagctggtcggcatcggcgtggccgtggccgcaccggtggccaccagcgaccacaccatagcgattcccggcattctgcccggatgggacggcgtcgatatcacggccccgttgcgcacggcgttcaacgttcccgtatacgtcgataatgacgcgaatttcgcggcatacggcgaatcccgtatgggcgtggcggcaggcaaacgcaatttcgtatatatctcagccaacgacggggttggcgcaggcatcgtcatcaacggcgaaatcatgcatggcgtgaccggcctggccggtgaaatcggccatatccaggtcgacccgctgggtgccatctgttcgtgcggtaaccgcggctgccttgacaccgtcgtggcggaaaacaggctggtgcagttgctcagcgtcacacacggcaatatgacgctggatgatctggtgtcctttgccaacgaaggcgaccccggttgccgtcgcatcatcgccgacacggccgtgcgtatcggtcaggtggcggctgatctgtgcatcagcgtggatccggaggtcattgtgctcggcggcaagctggccatgaccggcgacgtattcatccaaccgttcaatgaagcgttgcagcgcatgctgttccctgatgccgtggcacccatcgatgtactcgtgtcatcccacccgaacgacaactgcgcgctaggcggcgcattatgcgccatcgagttctcggttcgcaatgacgtcagccagtgaccggtaccaggagaagagtgagaagaaggaacacaccatgaggaattcgagcacacctcctctgctgcggctggaggacatctgtgtgaagttcggcttcgtcgaggcgttgaaatcggtgaatctgtccatccaacgccaggaggtcgtcgccatcgtgggcgataacggcgcaggaaagtccactctgatcaaggtcatcgcgggatttctgcagccgggattcggccatatctatctcaacggcgaacaggtgaccattccctcgatcagggaggcggaccgcatgggcatcgcatcggtgttccaggggcaggagttctgcgacaacctggacgtggcctcgaacctgttcctcggcaaggagatcaatcagattggcatacgcgatgacgattcgatgaactcgcgtgcccgttccgtgctgaagaccctgagctcggcgattcgggtcggctcccctatcgcatccttatccgtcggccagcgccagaccgtggccatagcacgcacgctgctcaatgacccgcagcttattctgctggacgaaccgaccgccgcactgtcggtgatgcagtcggcggaagtgctcgcatatatcaagagactgcgctccgaaggccggtccgtggtgatggtctgccacgatctgccggatgtgttcgcggtatccgaccgcattgtcgtgatacgtcaggggcacgtcaccggcgtgcatcgaaccgtcgaaacgtcctatgaggagattatcgccgaaatcgccggcgtgaccaccgaacacgagtacgaggaaatcgctgagaacccggaattcgattccatggtcaggcagcggaaactcatcgaccgcactatcagcgcggcagtgagccatggcaccggccatgactcaccattagactaacgtcccgttgccggagcgacatcgtcagcgcagagccaggttggccgcgccgatcagaccggcatcctggcccgcagtggccgcgacgatcttggcatggccgcggtaggcgctgccttccaggaaacgctggtagttgtagcgggccggctccagcaggatgtcgcccacggccaccacgccgccgccgatcacgaacaggtccgggtcaagcacggcggaaacggcggccatggtgcggcccagccattcgccgatcttgccgaacgcatacaggccaagtacgtcaccttcctgagccgcttgggacaccatcggcccctccagtttggtgatgtcgccgccgcacagttccagaagacgcttggcgtcctgaggacgacggcgcacggcggacttggcgaagttctccagcgaggttcccgaagtgtaacgttcggcgcagccgcgcaggccgcagccgcagtggtcgccgtccgggaccatcggcaggtggccgagctcggcggccatgccgaaggagccgcggtagagctggccgttgatcacgatggcaccgccgaggccggtgcccacggtcagcgcgaccatgttggagctaccctggccggcgccgtgcacgaattcgccccatccggcgcagttggcgtcgttttcgacgatgaccggcacggcatggtcaatcagcgcgccgacgtgctcggacagatcgtagttgatccatgccggaatgttggcggagaaggtgagcgtcttgcgatccgcgctcacattgccggcggcggagatgccgacggcctcgatatcggtgtgcccggcggccacagcctcgcggtacacctcggcgatgtgctggttgatggcgtcggcgtccatcggcgtggggacgcgccagcgctggatgatgctgtcgtttgcatcgcagacggcggcggcgatcttggttcctccgatatcaatggcgagcgtggtcatggcttactccttgaagactttcgtaacatgcgagatagcgaaaatagtagcgagccgccatgacctcccaccgcggtttttccgtggtgcgccatgcgtcgcgaacattccaccgatgcgcttcctcatgcatttcacccgttgcaaacgggcgcccccttaacgccggcatcggtgcggacggcgtgtcgaatcggatgcaatcactttcaccgtccttgcggatggcatcgaagaacggcaggaaacaaaaaactcccgacatgcatcgggagtttggtggcgaccccggccggacttgaaccggtgacctccgccgtgacagggcggcgctctaaccaactgagctacggggccgtgcgtgcctcgctgaggcacaagaggatatgttacagcatcatcggattacgacacgccgtctgatacatcgttccttccaccggcgaaccgaccgcaggtgtggtggacggtatgcggaccatatcgttcgaccgcgcacgaccgcactccccataagacagtagccgtcatgcgtcaacgcacgttgtgcgacaacgcggcacgacgcacggccaccgaggccagcaaaccgatgaacagcatgatgccggcgaccagaagcgtccactggccgccttcgacgaaccctgaagtcatcgcatcggcaatcttcggcgcctcgccgccgaatcgggccgccggtccatcaccgctgcggaacacgccgatcactccacccgccgaaccgctgaccgcttgggccagaccgtcgccgaccttggcgggcagcccgagggattcgagccgcgccggcaatgttccgttgacggccatggccaacgacgcgccggagatggccgaaccgacggcggtgccgagctgccgaaccgtggactgggtggccgacccttcgccggactgcatgaccggcacttcggagagcaccacgctggtcagctgcgcggaggcgaagcccagacccagaccgtacgcggccatgggaacaagctgccaccacacagagaaccccacaggcataaggaccgcgaccagggcgacggcgatgatctcgatcacaagaccgagttgaatcacgccggccggggtgagcttggcggccatgacatgggcctgcgcacctgcgacgatggaccccaggcccatcacggccagcatcgcaccggcctgcagcgtgttaagcccgcgggcgttgatgaggtacagcggcagcatgaacaccagcgcgaattcgccggcggcgatggccgcagccgccagattaccccacgagaacgtcctgatgcgaaacagggtcatgtccagcatgaccggccgaccggctttgccccgcgctgactcaaagacgatgaagacagccatcagaagcgcaccggcgatcaggcagatcggcaccggcgacaaccagtcacgattccagctcaacccgcccagtttcaactgcgttgaggtctgcttccaccagccgtaggtctcgccttcaataagaccgaacaccagcagggccgaggtcagggcagacagcaccacgcccggaatatccacaccgacacgatgggatcgggcatcccgtgcggcatccgcggcgccggcgaccgaggcgttcccaccggtctgcggcaccaggaagatggccgacacgaagaccgcgatacccagcggcaagttcaccaggaagatccaacgccatcccaaggtctcggtgaacacgccaccgagcagcgggccaagcgcggcggccgaactcatcaccgcaccccagacaccgaacgccgcggcacggtatttgccccggaacagggcggacaccgtggacagggtgttcggcatgatcatcgcgcctccgatgccctgcagcacacgggcggcaagcagcatccccgcaccctgcgaggcggcggcgagcatcgaactcgccacgaagatcacggtaccggcttgaaacaccagtttgcgccctctggcgtcgcccaacttgccgaaaggcagcaacaacgcggcaagcacgatgttgtagagcgaggtgacccactgggcgtcggtcaggttaatgccgatgtcgtcgatgatggtgggaatggagacgttgacgatcgagctgtcgagcacgatcatggccaatcccagggccatcacccacagcgcgccccacggcggcgcctgggtgggcagcggcgacgaggccgtcggattcgttgaagagatcgaagacgcatcggcctgagtctgatgctgagatcgggatgcatgatccataacggggtttcctctcattgccatgattgcggcgaccgacacgcctatgcgccattcacggtacatccgcggcctagaccgtctcgccggatttcgcgggacattccgggcgttcagccatgggcgtaacctcggcggatcactgaagagaggagcaccaaagacggccgcgctattccagatgcgtcatttcgaaatgaaagcccggcagaacgccggaatcgcaacgatcgacaaatcgccagacgatacagggccgggctctcgctcaggaaacagggcatgcccagcgcccatttaccggcgtcggcattgacggcatcgccgccaccttccacgtctcctcccgatgaccgaatcgctaattcccgcccgccagaaccccattgcatcgtgtagacgggatatgggataatccacaaggtgtttttgcgtaggaccatggcgccggcgatgacacgggacaaccacaacagcgaatgacgcacaacgggccgtccgggacacccccgtaaacggtcgcgtcgttttccattggtgtcattgcggggtccgggtcccgcaaaacgttggaaaatcagcgtttcttgaacgataaggtaacatatggctgaatttgtgtttcagatgatcaaggcccgtaaatcctacggcgaccgcgtgatcctcgatgacgtgaccctgagcttcctgcccggcgcgaagatcggcgtcgtgggcccgaacggcatgggtaagtccaccctgctcaagatcatggccggcctggagaccgtgagcaacggcgaggccacgctgaccccgggcttcacggtcggcatcctgcagcaggagccgccgctggatgacaccaagaccgtgggcgagaacatcaagatggcgttcggcccgattgccgagaaggtcgcccgattcaacgagatcggtgaagaaatggccaacccggacgccgacttcgacgcgctgatggaagaaatgggcaagctgcagaccgagatcgacgccgccgacggctgggacctcgactcccagcttgagcaggcgatggacgccctgcagtgccccgatccggacaccccggtcaacgtgtgctccggtggcgagcgccgccgtgtggccctgtgcaagctgctgcttgaggccccggacctgctgctgctcgacgagcccaccaaccacctggacgccgagtccatcctgtggctggaacagttcctgcaccagtacaagggcgcggtcatcgccgtcacccacgatcgttacttcatggacaatgtggccgaatggatctgcgaggtcgaccgcggccacctgtacccgtacaagggcaactactccacctacttggagaccaaggccaagcgtctggagatccagggagccaaggacgccaagctcgccaagcgactgaagaacgagctcgactgggtgcgctcctcccccaaggcccgtcaggccaagaacaaggcccgtctggaacgttacgaccagatggagaacgaggcacgcaacaacaagaagctcgacttctccgagattcagattccggccggcccgcgcctgggctccaccgtgctggaagccaaccatatccataaggctttcggcgatcgcgtgctcatcgacgacctgtccttcacgctgccgcgcaacggcatcgtcggcgtgatcggcccgaacggcgtgggtaagtccacgctgttcaagaccatcgtgggcctggagccgctgaccagcggcgagctgaagatcggcgacaccgtcaaaatcagctacgtggaccagaaccgtgaaggcctggacccgaacaagaacctgtgggaagccgtgtccggcggcctcgacttcatcgaggtggccggcgtggaagtgccgacccgcgcctacgtggccagcttcggcttcaagggcgccgaccagcagaagctgaccggcgtgctgtccggtggtgagcgcaaccgtctgaacctggccctgaccctgaagcagggcggcaacctgctgctgctcgacgagcccaccaacgatctggacgtcgagaccctggaatccctcgaaaacgcgctgctcgagttcccgggctgcgctgtggtgatctcccacgaccgttggttcctcgaccgtgtcgccacgcatatcctcgcgtgggaaggcgacgacgacaatccggccaagtggtactggttcgaaggcaacttccaggcctaccaggagaacaaggtggcccgactcggtgaggatgcggcccgcccgcaccgcctgcacaagaagcttgtgcgcggctgagatacgccggcattagtgccacaacgcgctttatacgtcgaaagccgtccctcaggggcggctttcccataattgcccccatgactgccccgccccgcatcccataaaatcccacagtcacctacggcaacgcaccggcaacacaccggcagtgcagcagcaacgtagcggcaacgcaccgcataaccaaccgtttaccttccaaacagtctcgttacatttcgctcccggaactcttaacccccaccggatagactgccaaccataggttggaatacgataaccgaatatcgaacacagcagaacaggaatcgaggaacgccatggctcaggcaaccaccgtaactccattggaccatctggtgaaggtgctgaagttgggcgagccttccgcttaccgcaatcacacatacatcaatggcgagagtatgtacttccccactggccgcgtctacggtggccaggtcatcgcccagtcggtgatcgccgcgtccaaaaccgtgggcccttcacgcctgccgcattcggtgcatggctatttcattgccgccggcgatattcgtcaagacctgctgtttgacgtcgagaaccttcgcgacggccgctcgttctccgctcgtcgggtcaacgtcacccaagccgaggggtcgattctcacggccatcgcctccttccaggagaccggtcaggagggtgtggaatttgccgatccgatgccggaaaacctgcccgatcccgaaacgttgacttccgccaaggaactcatgcagccgttcgccgaaaagtcgccgttcgccaatttttatgtcgagaaatcgccattcgatatccgccacgtgacgccgaccgtgatgctgcgcgcggacaaggattccgccgagcatgattccggcaagcagatggtgtggatgaaggccgatggccacgtcgatgtgccgcaggtcatgcatcgtgcgatgctggcactcggctgcgatcaggtgatgatggagccggtgctgcgccgcgccggactgtcgatttccacaccgggcatttcctatgcgtccatcgaccattcgatgtggtggtatcaggatatcgatatcaacgaatggcatttgtatgtgcaggatacgcctatcgccgcgcacggacgcggactcggcatcgccaaagtgtatgcgcagaatggcgacttggtggcggccatcgctcaggaagctatggttcgcgtgccgcaggaatagtgggaatcggcttggccgatggtgtggtttttcttcttctctccccagtcggctacgcctacggccccctcgtcagagggggcttatcacggattatcttttgtaggcctgggctatgtcgctacggcgcttggcttccttgattttcgggttttcggggccttcgttcggcggtaactggcacaaccattcgccgataatgccgatgatcatgtcggcgatgcacaccacggccacgattgcgcactcggtgacggcgtgtgcatagaaatccgcctcgatatggctcaggctcatcacaatctgaccgccataccagccggcgagcgttgcgcccgccaatcccagtgccttagacagcaccagcgtatacaccgcgatagtgggattgatgaagctatgcggacgcttcttggggtcggtattcgcgtatttatgcacttgcagggccaagatcagcacgataacgcccagcacggccagcaatccggtcacaatccaaggcgcaccaatcagcgacagtcccgagctttcgccgtaggaggccagaccgatacccgccaacaggcccagcacagcaccgatcacatactgccaccatggtgttcgccgtgttttcatgtccggcctccttatcgttgcgttgctgtttgctgtttgcgaacggccctcgcgcctgggctgttcatcttgatttggttttcgtcactgccgtgcccggctgttcgaggccggagactggtccgtcaccgtctggtttctagcctaccgttcgtaactggttctgccatcagctcaactgttcgacagtatccagttgtccgatagcaatccgacctgtccggcatccggtgccatggccaaaaggaaagccaccgggtcgccgcccagagaagcattcgggtccatatccagccaaggtgccaataccgacgcatggttacgggccgacggccaaggaatgctgcagttgggctcgtcggaagtcacgccttccatgtcgacaaggtcaaggtcgactgccagatcatgaacactttcgatgctgcccaatacggcaatcaggtcggcgggcggcaacttggtttcgatttggatgaccgcgctcatcgcgtccgggccgtcgaaatggctgacatggtagagcggcgagatgccctgtacctgattgccaggaacactgtcgatggaaacgatggtttcgcggaacagccgttcgacatcctgcgaggtggaatccagcgaaataatcgccttgcgtgagacgggtgccgactccgacgctgatttttgcttgactgcatgcccgccgagcatccagtcttcgctctcgagctgcacggcgttacggtccggtgcggcggccagcaaatcggctacaggcccctcatgggctccggcaagtttggcgttcggattcagcgccgcccagggagccagcacaaacgcgcgctgccaagcacgcggatggggcaatgccagatccggatccgcgctggtgatgccatcaaagtcgataatgtccaagtccaacggcctggaatcccaatgattctcacgaattcgcccatggttcgcctcgatgctttgcaacgcggcgagcaattcgtggctgcccattgtggtttcaagctccaccacggcgttcaggaaatccggcgtaccgtcagccatgccccacgcggccgtgcggtaaagcggcgaaataccggtcacctgtgtgccgagcagcgcgtcaatctcccgaacggcggctcgcaaggtggattccacctcgcccacattgccgcccaaggccaccaccgcgttatggatggcatgctcttcagcagtgcgtccattatcggtggcacgcacgcgcgagatagagaccgatacatctgcaaaagccacgacgatgggcgcatgaggcttgtgcacggtgacgtcgatggaggcgacggccggcgcatcggcaaggatcttatccgcgatacgttgggccagacgctcgatcaggtccacatgagggccttcgatgacagccgtgatgtccttggccacacggccgtaatcgatggtgtcattgagatcgtcggattgaccggctgcggccagatcaaggtgcagggtgacatccacgacgaaggtttgtggccgttcgtgttcgaaggcgagcacaccgtgggtgccgttggcatgtacgccggtaagtgtgatggtgtccattggtaaggctttctgctcaaatgctcccctcagtcgccttcggcgccagctcccctcgcccgaggggagccaaggcctagaagcaaccaaaacagggagccaggggaatcatacgtattcgcgccaggtgttgccggcgatgacggcggcgcggcttttggccacgtcgtgtacgcgcacggcccatgcgccatgttcggcggacagggcggacaaggctgcggtcacgtcatcgcgctgggccatgatcggcccatcagcaccggcagcgcccgcctcggtaagcatcgccgagatgaagcgtttgcgggactggccgatcagcaccggatatccagtggcgcggaaggtctcgagtccaatcagcagcggcaggttgtgctcgatgccgggcttggagaagcccaggcccgggtcgatgataatgcgctcaggctttacgccggcggccagcacaccgtcgacttggcgcatgagttcgtcgtgtacgtcggtcaatacaccgtgctcgtagacggaggtgtcttgatcggggttcgcgcccttggagccggcgagccaaccgcgccaatgctgcacgatgtacaggcagtcgtggtcggcgaccacatgcggcagttcggcatccagcgtgccaccggagacgtcgttgatgatctgggcgccctcgctcagcgcagcggcggccacggatgcgcgcgtggtgtcgatggacagtatggcaccggccggaatcaatgtcttgacggcaccggtgatgcgggccagttcgtcggcctcggacacgcgcttggcgccggggcgcgtggattcggcgccgatgtcgatgatggccgcgccggcggccatcatgtcgcgcccgtgttgggccgccttggccgggtccagccacaggccgccgtccgagaacgagtcctcggtgatgttgagcacacccatcaccatggtgtgcgtactgtcatgcaacgcctgcaaatcagtcattatgtttccccttctatgtaggtcccaagtgagctccctatgatgagggagcttagtagacactatttatccaaaatgaggctcatggcttcggctcgggtggccggattgcgcagcatgccgcgcaccgcagaggtcaccgtgcgggcggaagacttcttgatgccgcgcatagacatgcacaggtgctcgcattcggtcaccacaatcacaccacgtgcgcccgcatactcgaccagcgcgtcggcgatctgctgggtcaaacgctcctgcacctgcggccggcgagcatacacctcgaccagtcgggcgagcttgctcagccccatcaccccgtccttggcgggaatatagcccacatgggccacgccgtggaacggcagcaggtgatgctcgcacaccgaatacagttcgatgtccttgaccagcaccagttcgtcggtatccacgtcgaagtgcttctccagcacatcggccggggaagcctgcagaccggcgaacagctcgcggcacgcgcgggcgatacggtcaggcgtttccaccagcccctcgcgctcgggatcctcgccaatcgacttcaggaacagacgtacggcctcgcgcacgccttcctcgtcgtatgtgcgtttctcccgctggcaagactctatatattcgttcatctcatctctcccttgtcattgtccacaacgacgtcggcccggcctgcgtacgtgagaaaccacatgaacaggtcgggccgaatcgtcatcgtgtctactcttccggcttcatgccgaccgagcgcttgaggctttcgggaatctccaccggcggcttgtccgagtcggggcggcggtcgttggacagccacaccgggcggaccggcgccttcttgatcggcgcgaagatctccgcaagttccttctcgttcagggtctccttgaccaacagctggcggaccagctcgtcaaggatctcgcggttgtcgttgatgatggtccacgcctcggtgtgggcggtttccaccagcttcagcacctcgtcatcaatcacttcggcggtgcgatcggagtacttgcgcggctgcagaccgtccatcacagtggtctggtcatcgtcggaaccccacttgatggcaccgagcttgtcggagaagccgtattcgatcaccatcgtacgggcgatgttcgtagccttctcgatatcgttcgaggcaccggtggtcgggtcgtggaagacgatttcctcggcggtgcgaccgcccatcgcgtaggccatctggtcgagcagctggttgcgcgactgcgagtagcggtcggaggtcggcatgacggcggtgtagccgagggcgcggcctcgcggcagaatcgtcaccttggtcaccgggtcggtgttgttcagggcggcggctaccagcgcatggccaccctcgtggtatgcggtgttgcgcagctcttccagagccatgcccttggacttgcgcttcggtccggcctgaacgcggtcgatggcctcgtcaatggcgcggttgtcgatcaactgggcaccggcacgggcgcacagcaacgcggcttcgttgagcacgttggccagatcggcaccggtgaagcccggcgtgcgcacggcgaccatgtgcaggtcgacgtccggtacgaacggcttgcccttggcatgcaccctcaggattgcctcacggccttccagatcaggggcggccacgcccacctgacggtcgaatcgacccggacgcagcagagcggggtcaagcacgtcagggcggttggtggcggcgatgatgatgaggttggtgtcgttgtcgaaaccatccatctcgacgagcagctggttcagcgtctgctcgcgctcgtcgtggccaccgcccatgccggagccacgcttgcggcccacagcatcgatttcatcgatgaagatgatggcgggggcgttcttcttggcctcatcgaacaggtcacgcacacgggaggcaccgagacccacgaacatttcgacgaagtcggagccggccatcgagtagaacggcacgccggcctcgcctgcgatggctcgggccagcaacgtcttaccagtgccgggaggaccgtacagcagcacgccacgcggaatacgagcgcccagcgccttgtacttggacggatccttgaggaagtccttgatctcctcgacttcggccacggcctcgtcttcaccggccacatcggcgaacttggtggtgggggtctggccatcgagtagcttgccgctgtttttcctgccgcccatgccgagcatgccgccggcaccgcccatgcgactcatcaggaaccagaacagggcgaagaagatgacgaacggcaggatcgaggtgatgaggtagctcatcatgctggtctgctcgatattcgaggtccagcccttttcgagatcaccgttctccacggccttggccacctgtgcgccctgcgcgaaggtgtagtagaactgcacgttcttgccgtagttggtcaccttgccggtgtcggcgtttttcttggtgtagtcgttcttcagcttaaggcggacgacctgcttgttgtccgtgatctcggcgtacgtggccttgccctgattgatcagcgcgaaaccatctttggtgtcgatggttttggtgccaccgccggcgaacatctggaacatcagcacgaccatgaccacgagcacggcaccccatagccaaggggactgccatatcgggcggttctcgttgttgttgcctttgccattgttcccgttattgccacggttgaacgggttggtgaacgggttgccgttgttacggttgttgttcgggttcggattattgccgttacccggcccttgcgggaagctcatgcttgcactccttggtagacggacggcttgaggaccgcgatcgaatcgaggttgcggtagcgttcgtcaaagtcgaggccgaagccgacgacgaactcgtccggaatctcatagccggcgtacttcacatcaacgtccacttctcggcgggaaggcttgctcagcaaagcgaagacctccacggaagcggcaccacgacgtttcagttctgcgaccagccacgcgagcgtgcgtcctgaatcaacaatatcctccacaatcaaaatgtgccgtccgcgaacatcggcggacaaatcctgcctgactgtgacctcaccgctcgacactgtgcccgagccatagctcgaaaggctcatgaagtcgatctgtacaggaatgctcatggcctgggtgaacgcgaccagcgtattcacggcccctttcagcaccgcaacgagcagcggattcttatcgcggtaatcctcgctcgcgagagcggccatctcgtggatcttggcatcgatctgttctttgctgaccagctcgtggtcaatatcttcctcaacgtcagcgattcgcatgcgctccatcttggcacacgcgaatgacgtgtttcttgcgattggctgaataacctctgggaagtgagacgccgccttggccatgccaatcgacgaccagccggtcgatggcggcaatctgggcggcactggcgttcacaccggcctggctcagcgcgtgagcgatgacccgcaaccgaatcgcctctggctcacgtgcaatacgtttgacgccgatcatcaggccgatgccatggcccgaatcgttggtatcgtctgcagcacaggctcgtggcgtatcggtcgataccgctgccgacgatgccggccggtcaactgccgtaaccgcctcccccatcacctcgtcggatcgctgatccagatactccttgtccattctggccagctgtgcgctttcggcgaaatggcgggtgacattgaatccagcgaatcgttcgatggccggcagcaggtcgtggcgcacccgcgagcgcaacggatagtcgtccggcaactcgccgtctaccgcatcgccattggtggggtcatcccaatattccacacccaagtcttcacagaggccggtggtttcgtctcgagtaagggtcagcagcggccgcgcaaaagtcacgccactgcgtgtgaagacctgcggcatgccggccaacgcatccacgccacggctgcgcagcagtccgatcaatacggtttccgcctgatcgtccatagtgtgggccaacagcacggcaatggcacctgattcacgcgccgcggtgcacagctcgttgtaccgggcctgccgtgcggccgcttcgaggccctcaccgcgtgcctgcacggttgcgttgcgcacgatgaccgggcccagtcccaacgcacggcaacgatccgcggcctcgccggcgacctgttcggaaccctcctgcaagccgtgatccacaatcacgacaccgcaacgcacgcccatggacgtgcatacgatatggcttaccgcggccagcgccatcgaatcgcgcccgcctgaacaggccacgagcacgagtggtgcatcggaggcaacggcatggtccccatgctgcgcgaattcgggagcctgcacatcgcatagttccacggcgctcagcgttgttcggaccgcgcctacggccttgcgcaatcgtgcggaatatgccatgtactcaccacccttttctggttataggcactcgtgcgtttatggacgtttacggcctttgtagcccttgatggcccttgatgccccttttacagccccacgagcttggtgatgaacgagtcgatggcgctacgcgcggcggcataatcctcaggattgttgaccaccacggcaaacgacaacgctcccccattggtacgggacacattgccggccatcgacgtgaccgtgccgaggctgccggttttgacgcgcagcagaccagccacggcatcatccgtataccgatcctgcgccgtgcccaccaatcccgcgatggatagaccttccgcaccagcagcaccgctctcggtggtcagattacgttgttggacggccgccagcgtgcgtacggtgagccgggagccgggagacaggccggagcaatcggccatggtcagaccggatgtatcgagaccgagatcgttcagagtggatttgaccgcttccgtgccgccttcaggactgtttgtcgctgatttcgccaaggcggtgagtctaccgaactcctcggccagcgtattgtccgaatgtcgcaacgtgtatgccatgatttcggacagtgttgccgaactcaccgaggccaaaggcgtttcgccggatggagcggtgtttgccgtcacgtctccggtaacggccacaccgttcgattggagcagttcggcgaatttcgtggccacgtcgctggcggtgtgctgggacagttccgggtatccggccgaatcatcagggtcggccggcgcaggcgtatcggcggtgtattggcggcctccatcaatcgccattgatgagaccggcgtgaagtagacggtgtagtcgcttaagaccgcgccgccttccgacagacctgcgggaatgcgtgagtcgccgaatagggtgtcgtcgtactcgagattgacggaagtgatgcctcgctgggcgagcgcggccacggtggccttggccaaggtgttcagaccggcacgtccgttggtatggtttgcgtcggaatcgcctgcagacagcagcatgtcgccattgcctttgagggtcaacgtattggtgccgtcatcggattgggtcaggaacacttgggtatccaaggtggatgccatgttcagggtggatgaggcggcgagcgcggtcagcgttttcagtgtggatgcaggctcgcgtggagtgttcgactcatgttcggcagcgacggtgccttgggcgtcttcaatgatcaccgacgtatcgtttcccacgccttgcgtggacagcaattcgttgaccagtgcagaagcggccgtggaatcaatggccttgttcgcgttcagggcaccggcgatggtgccgcctgatttggcggtggccggattggcgaaaacaggtgcggtgacaggttttaacgtcaacaatccgggggccacgtcggtgatgtcggcggcgcagtaccccgcgaacagggcgatggtggtcagtgcggaaatgatgacggtcagtgttcggcgatgcgatcgttgggtccgccgttgcgcttcacgtcgctgacggcgtgataccgctgtagataccatcgtgctccttatgccaaggcaatcatttctgcaatgaggcgaacgagtcgagtgctgccacaatcgagagcattcgcgcatccatcagcttaccgcccagccatgtcccgagtgccagaatgccgatgccattggccagcgcgaccggaataatcgccagccacatgccgccttcggctcctgtcagcagcatgaccagcgccacgatgccagtgggcagcatgagcagcaggctgccaagcatgtagacgaacgggaagaagccttgggccatggcgcggccttgaggcgcggagaacggcttgtccattgaggcgaccgggtacatcagtacacaggaggtgacttcggccacgcccagtccgctcaaggcgatgcccatgcccgtggcgaggaagatcaggccggtagcgaggtcatcgggttgcgcccagcgtccggtcagtgcgccgaccagcacgatgccggcgagatagagcagcaccatgtagacgaccatgatgccgacgtagacgcgtacgcggccgattctgtcggcccggccacgcacgccggcgatgacttccatggtgaagccgcggccgtcatatgcgagcccgttgctttccacgacggacatgaaccagccgcaccagatcagcgactgccagacgaccgcgctgatgccgtgtgcctggaaggcgaagatgatcaggaacaggaccggcatggcgaaggtcatggcttggcgggggtctcgtttgagataggtgatcaggcgtgcggaaaccgcgccggatgccgaatcgggcatccatgcgaatgcgccgatgcctttggcggtctcggacggactgtttgcgccgatggtgagccgttcatgtctcagacaccaggtgcagacggcgaagcagacaatccatgtgacggcaaggatggcgatgcgggcgagcagcaccgcccaggctccggtaagcgcgtcgaacggtagttggaaggccgcgccgaacggcgtccatgcgacgatggtggtcgccgcgccccaggtttcggtgttgaggctgaaggccacgccggagttgaccagaatgttcggcaactgacagatgataacgaacgtcagcacgatgaagatatagaacgcgcctttgccgcgtttgccggtcaccagcgtggtggatagggcgatgagcagtttggagatgctcatcatggtgatgacggccagcactgcggcgaggagggaactgatgattacggctggtcccatatgccgataggccagtgtccagagcatcagtgaggccacgccggtaagggcggggatgccggacaggccggaaagcagcaagccgaattgcaggttgcggtcggcgatgccgtagagcgcgaatttgcgtgggttcatggtggagccttcgccaagcatcatgagctggatgaagccgatgaagatggtcatggtcgcgccgaccagcacgacgactatgttgacgatgcctccggaaccaaggatgttcagcggaaagccatccgcgttcacggtgaagggcggcagtatgccgatgaaccatgcgagcacgccggtgccgatgatggtgccggccgcgagtacggcggaaaagacataggcgacggtctgccacgccgattttcgcagggtggcgagcgtgagcgtccagcgcaggcggaccagggtgatggcgctgctgatcatcggcgggcctcatcggtgggtgtggcgggcgtggcggttgtaagcggaatgggctggaccggctggaccgaagttggtgcttgggcttgggcttgcccgccgtcgagccatgcgagatgggcggcttcgtggcggccgccgaccagttgcaggaagcggtcttcgagttcttcgccggcggcgacctcgtccaccgtgccggccgcgcacaccagaccgttgttgattacggccacatgcgtgcacatcttttcgaccaatgccatcacgtgcgaagagataatcaccgtgccgccggtcttcgcgtattcgatgaggatgtctttgaggttggcgctggacaccgggtccacggattcaaacggctcgtccaggaccagaatgcgcgggctatgaatcatcgcggaggccaggcagatcttcttggtcatgccggccgaataatcggtgaccatcgtgttggcggccccggccaagtcgaaagcattgagcaggtcctgggcgcgacgcgtggtctcatcgcggctcatgccgcgcagcatgccggagtagacgagcaattgcaaaccggtcagtcggtctaagatctggtcgggctggggcatgacgccgatcatgcgcttggccgtgttcacgtcgctccacacgtcatggcccaaaatcatggcggtgccggcgtccggtaccaatagaccggtcaccatattgagcgtggtggttttgccggcgccgttggggcctacaagtccatagaacgagccgaccggaatatcgagcgcgagtccgttgacggcgatcttccggtcgaagtgcttgaacaggccacgaatggacaccgccgcattcggattcggcggccatgcttgtggctgcggttgcgacggctgtgcaggcgcgggggcggcagccggcatcatcggcggctgaaatccgacattcctttgagtattgtctaagctcatacatccactctaccccaccagccaaccctcagcgaagcaaacccccgggttgctgttggattgccccgctgagcggctccaactagcggactcggtcaacccttatgcgcgatgggcttccactgggctttggagaagagggcctggaaggagatcggcacgtagctgagaatgtaaatcgggaagctgagcacataggcgagcagctccttgttcgtggcaccgatctggtcgcgctcgacaatgatggtcaatgcagccaatgccatcaggcccaacaccgatatgatgatgccactggaccaactggccagcgattgcagctggctcggccaactcacgaagccacacgcggcgaacagcaagcccattaccgcgcgaatcacgcccaacacggtaaacggacacagcatcaaggtgaagtcgatgcaggagaaatcacgttcgcgaaccgcgcgtttcagcaatgccgagccataataacggaatacctgcaggaatcccttgctccaacgcaaacgctgacgccaactttgcgagaaggtaaccggctgctcgtcgtagagaatcgcagtaccgcaatagccgatgcggtcgccatgcagaatcgaatccatagtgaattcaagatcttcagtgagcagatggaacttccatcccttgttccgcttcatcacctcgcgggagaacatgaatcccgtaccgcccacatggcaagaggaaccgagaatcatacgcgagttagacaggaatcgcgattcacggatgaaccacagcgcagaaccagaagacacccagttatccgccagattcaccgaattacggtagctggtcagaatcttgaatccggagcagaacgccttgttcatttcctcgaagtagtgcttgtccagcttgttatcggcatcgaacacgaagtaggcctcataatcatcggccacaccgatgtcgagcatatgccccaacagatacgtcagcgcatatcccttgccaaccagctcaagattgtggcgttccaccacatggcagcccaaagaccgcaccacgtcggcggtgttgtcggtgcagttgtcggccaccagccagatgtcgatgaggttggacgggtaggtctgatcgcgaatcgacccaataaggttgccgatcactttttcttcgttgcgcgcggagatcagcacggcataccggttggtcatcggggcgtcggggaagcgcacgggcttggcgaacagggacatcacgatgcacagtccctgatatatcatgccggcaccgccgacgatcatcagaagaatatcgagtacggaaagcagagtcatcagcgccaccctgccctaggattgctggaggcagattgatcagactgcttggtttgcttgcgttgctcgggctgctcaggctgttcggcggaccgctcaggctgctcgggccgctcagactgctgcgtatccgcggcaccacgctgcggaatcgccgccgtatccggctcatcaaagcttgcatccgcaccgactgtattatcggcgttatcggtatcatcggcatccgactccggctcagtgccgtgtaatcccttgcgagcgctggaggatagcacgttcttcggaatcgccacggtggcggaatcgtccaaatcggattctttcgtctcgtgcgacggaatcgcatagatctgttcctgcagcaaacgcagttcctcgttcatcggcacgcggttggtggatcccctggccgcacgcggcatgtgctcgccgattggctgcaatacgtgctcgccgaacgcctcggacgcctcgacgatcttggacttcttctccggagtcggatcgttcatcagcggtgagtcaatcagctcatagcgcttggtgtacgcacggaagatggcctgcagcgatgcggtgaccggcagcgccaggaacgcgccgaatgcgccgaacagcgagccgaacgccagcaccgagaggaaggcgacggccgcgttgatatccatcgtgcgctgcgaaatcctcggcgagagaatcaggttctcgatctgctggtagacgatgatgaacaccagcaccgccacggcgtacgtccacccgcggttgccccaagcgaacagcaccggcagcgcaccgccgatataggtgccgaccgtggggatgaactgggataccacgccgcagaacagggccaacggcagccagtagggcacatgcaggatctccaagaagatggcagtgcaaatggcgttgatcaacgccagaatcgaacgggagaacaggaaggacgaaatctggccttgggccacggtccacaccagcaggaatcggcgctgcgtgttgggggccagccactggcagaaggagcggcgcagctttgggccggcggcggagatgtaatacgtggtcattaccacggtcatgaggttcagcaggaaggagaacaggccacccaccgtactcatggcggtgccggcgaaatcggtgacccacgaggtctggatattgttgaagatttccatgccaagattgctgatttccggcatcttgaacgtggtgtactggtccgcgaactcacgaatctgctcatacattgccggcaaaccgcggaccatggcaatcatctgctgtacgaacatattgccgaacagcgtgagcagcacacccacgaccacggccacgcccaccagactgacggcggaagccacgccacgcttccagccatgtgccaccagcgccaccaccagcggttcgacggccagcgccaggaacagcgagatgatgatgtcgaacaccagataggagatgtcgccccacgagcgccagcagaacatgaatacgatgacggcgagggccacatacagcagcgcgcggccgaaccattccggtggcctgcgggaatctcccttggcggggaacaaagtaccaaagtcgatacgattctcgtcgtccgggtctgccccggcttctgcggcaccgcttctcgacgtgtcggtgctgtttatgtttcgcgcgcgttcgctcatggctccccattgtagcgaggggtttgaagctcggatacgccggcggcgtacacccgcttttctattgttgatgttatgctcaacgtttcgatcatcatcccagcgtggaacgaagccgaacgcatccgcgactgtctgctgaacgccactcgccagaccatcatgccgcatgaggtgctggtggtggacaatcgttctacggacaacacctgcgcgattgtcgaacagttcatcgccgaacatcccgagaccccggtcaaactgttgcaccagaacgatgaacaggggctgattcccacccgcaactttggcctgaacgccgcgatcggcgatgtgctgggccgttttgacgccgactgtatgatccggcctgactgggtggaggtggtctccggcatcttcaccgaagacccggccgcgatgggtgccactggtccggtgatgtattacgacatgccctcacgtcatttcgggttgaaaggcgacaattccttacgcaagcgaatctaccgtgccgatggcggccagcctctgctgttcggctcgaatatggccttgcgcgcttcggcctggcatcagaccgcgaatgaggtctgccgagataaggccgatgtgatgcacgaggatatcgatatttccctgcatctgatgggcaagaatctgaaaaccgtgtactcgccgcgcatgatcgccgcgatgagcgcgcgacggatggacacgtcgctgagttcattcctgaactacatgcgacgttttaagaatacgtttgatgcgcatccgcaacatacgcgcacgcataagccggaggtgttgttcaccgccatgtatccggcgatgcatatgttctacccggtgtggcagaaagtgctgaattccgcggatatcaatcctgctgaagccgcgtggatcaacgagcagatgaaactggcggaggcgcaaggcaagcagctgtacgacgagacccccaccgacgaagtctacgacgaaaagcacgaaaagtagctggatatacgagccccctctgcttatgcaagctccctctgatgagggagctgtcgaacgaagtgagactgagggagagattgcgacgcagccgctaaaacattgaatcggccgcaggccgatacctattattcagcggctacgccgcaacttctctcccagtcagccacgctgacagctccctcatcagagggagctaatgtttaccgtcatcgactgatcacatcagcgacttgtaaatcgcgagaatgtcctcttcggtggcctgacgcgggttgccgggagtgcacacgtcgttgaaggcgtcgtgggccagcggttccagatcagcctcggtggcgccgacctcgctgatcgtggtcgggttcttcagatccacggtcagcttgtggacggcctgcacggcctcttcgcgcaccttctccaggtcgccggtgtaggcgtcctcgacgccgaacgcgtcggcgatgtcgcggtacttctcgcccgtgtagtccttgttgtattccatgaccggggccagcagaataccgttggccacaccgtgggccacgcccagacggccgcccagcgggtgagccatgccgtgcaccaggccgaggcccacgttggagtaggccataccggtgatgtaggaggcgtacgccatctgctcgccagccggaatgtcgccgtcggcggacttggctaggttcttggcaatcatgcgaatggtctgcatggacaggcagtcggacaggctccaggcacccggggtaatgtaaccctcgatggcgtgggtcagggcgtcaagtccggtggcaaccttcaggccgcgcggcatggagtcggtcagatccgggtccacgaaggcgacgatcgggatatcgtgcgggtcgacagccacgaacttacgcttgttggcggtatcggtgaccacgtagttgatggtcgtctcggaagcggtaccggcggtggtcggcacgccgaagatcgggacggacgggttcttggtatccgcgacgccttccagggacagcacgtcggcgaactccgggttggcggtgatgatgccgatgcccttgcaggtgtcttgcggggagccgccgcccaggccgatcaggaagtccgcaccggactcggcgaacttggcgacgccgtccttgatgcactctaccggcgggttcggcttgacgttggagaacacttcgtagggcaggccggcctcatccagaaccttggtgaccttctcggcggtgccggtctccagcagtaccggatcagtgacgataaatgccttggtgaagccgtgctgcttggcgacggccggaatttccttgatcgcgccacgtccgaagtatgcagtctggttgaaaatcatgcggtataccatagggactctccttttgagctagtgtcttaactggtggtccactcactctttgagtggtccaacggttccccagtctactccgcgcatgagcattcacctgaaaacacgctgaaagaacaacactgaaaataatggcaagaaatggcggaattccgcacttgtcgaattattgtccattgaccaaaccagttcaatcgcccgagatctcaacgataagaccattttccggagtcgcttggtgctctccgagaaactcgtctcttatctgcttacttcgcgcgtacacaatcaatatgcgagatgcctaattccattcgtgtttcatcagccgaacgcgaactggttcaccagatggtgtattcaacggtttcagtctcctgaagaggactaagatacctcgacaattggggtgatcatcataagagaatgaggcagataatggcaaatggcaaggctatgacggtcggcgagatggcatccctgtttctcgaccccgacgctcccgttcgtatcgacgcttttgacggctcgcatttcggcccggcagacgcggatttgaaggtcaaaatcgccacgccgaactgcatgtaccagctgctcgcgcacccgaatgaaatcggcatcgtgcgcgcatacattctgggcgatttcgacgtggacggcattgactacgccgacccgtatccggcgatgcgcaagctggtgtcgctggccaaatacgttcgcccgctcgctcccgcatccattgcccgcgtatccgccggcattctgagtcacggcttcaagaagccgccggtgcccgccaccgagggcccaagcaagttcgcccgcatcaagcgtggcctgatgccgcacaccgaaaaggccgattcggaaaccgtcagctttcactacgacatgtccaacgagttctacgccgacttcctcggcccctccatgacgtacacctgcgcgatattcgacaacgagcacatgagccttgaagacgcacaggccaacaaactgcgcctgattctcgacaaactggacttgcagcccggccagcgcttactggacatcggctgtggctggggttcgatggtcatcaccgccgcccgtcgcggcatcaaggcgctcggcgtcaccctctccaaggaacaggccgcgtacgccaacgaatggatcgcccgtgaggggctgcaggatctggccgaagtgcgcgtacaggactaccgcgaggtgcccgagcatgacttcgacggtatctgctcgatcggcatgatggagcacgtaggcgtcaagaactaccagagctacttcgaagagatgttccgtctcctgaagccgatgggccgactgctgaaccaccagatcaccatcagccatgacaagcctcacggcaagcccggcaccgacgaattcctcgaccgttacatcttcccggacggcgacctcggcgcgcccggcttcatcgaatcgtgcatccatgacgccggcttcaacgtggtgcatcaggagaacctgcgccagcactatgcgctcaccctgcatcactggaaccagaacctctccgagcattgggacgacgcggtcaagcaggtcggctttgaacgcgccaaggtatggggtatgtacatggccgcctgcgctctgaacttcgagctcgacggcatccagattcaccagttcctggctgtcaagccggatcgcgtgggccacccggacggcaagtggtaccctctgcgccaatggtggcaggcctgactccgtttctgtgggacggcacgcggtttttaccattgttcatctgccgtcccacagaagtgtgggatagcagatacatcaatcgtttgacgtatctgccatcccgcatgacataagccgagaaccgcagaatagagccgttctttgccctcagctctgagggcgttcttcgaacgctgtgggacggcacgtcgaaaatcggcaaaatcacgtgccgtcccacacgattcccttcgcacgcgcatttcgcaggtgctttttctgcaatactgactctatgagcgccacagccccagaaacggctggggcggacgatcgcaccgaccatgacacgcgcggataagacccacgtttctttacttaaccctaacccgatgttcgcattggtgctgttggcgtgcgtagttgcggtgaggaagacagttgttggcgaacgcgagccttcgcattgaccggccagcccgccggagtaagtacgtgacggatatgcaaaagccccgcacaaggcggggcttcattgtggtggctccgaacggcgtcgatccgttgacctagcgattttcagtcgctcgctctaccaactgagctacagagccatgaacagtcaaaaacccggataatccgggtttcataaccattccagcgaccccggccggacttgaaccggtgacctccgccgtgacagggcggcgctctaaccaactgagctacggggccattgttctcacttgcgtgaggcaacagatgtatatattactgaaattcgccggtcgtgcaaatttcggcgtgttccgcgtaatttcaggtttttgctatcaccagcacacggacacgtctgccataaacatccacaaacgacgaagggcgcgaccggaactccggtcacgcccttatgaacagaagcacttcacggcatccaccgcaaagcaatcgtcaatctcagtcagcctgcttccaggtgtcgacgtcgatgtggtgttcggggttggcctgccaggcatcccacgcggacttgacgatgtcttccacgtcgtacttggcgtgccagcccatctcctcgttgatgcgcttcggggagccgatcagg

SEQ ID NO: 2627 - DNA, 3376 bp, Unknown
  R222_15m  MAG No. k141_42199
cgggccgacggacgcgagcccctcgtcgaggaacgtgaacaggtggccctcgcggatgcgtctgcggatcatgcgccgtgccttgacgagcctttggtgcatgtcgttcacgccgccgtcggcgtattcgctcttctcgtcggagaccagccattcggccgcgccgcccgcgtccccgacgcggggcaggggcagggccacccggcgcagccgtccgcccgcctcgagtctgggccgcctgccggtcagctcgaggatgttggcctgcacgtggaacaggcaccgctggatcctcgtatccggccacgtggccttcgcggccttgaggacgccgcccccgccgtcgcacacgagcacgtcgggcggcgcgatgcgcgccatcaggcactgccatgccgccgctttctcgcttttggcgacgtgccagccgatcacgtgcccgccggccaccgcgatcaggaccaccgcgtcgcggtgcaggtggatgccgtccacatgcaccacatgatgcacctcgtccaccaggggcacgggcggccacaggctccacatgagctcgcaccggcggcgcagcgtgcgtgccggcagccggtgctcggcctgcgattgtttcgagaacagccaatccagaccgcaccgcagatcacgggcgctgttgtcgcgcgactgggtgcgtgagctcccgcagccggcgttccggcaccgccacctgatccgtcccgagctcgtccttccgttccgcttcatcggctcgccgcacacggcgcaacaaggtgtgttcatccacccaatctgccacgccaactcgaaagtcactcaaccgttgtgccgcaaggcctgaccggccattccggacacacattctggccgacctcgagttccccgcccatacaactcgaacaggaggaacgcccaccgccacaaaggaacacaagccaaaacggacacacattttggcctataacccgccgaatgctttcaggcctggtcccgcgaatacgaaaagacctcggtcgctatgaccgaggtcttcaaagaagtacccccagagagagtcgaactctcgttgtcagattgaaagtctggtgtcctaaccgttagacgatgggggcgaacaactcgagttactttacgggaggttgttcggttatgcaaatcgacggcatttcggcgtgtcgcaatcagttcagggtgacggcctgatatgtgaagtcgtgaatcacgcggccggcggccaggcccttcttctcgaagttggtgagcacgcggccctcgaaccgctcggattcggtgaagtcggcgtgcggcatgtcagcggccatgtcggcattgcccttgcccacgtgctccagcgggaggctgacggttacgctgcccaggttcttccagccatcgaggccgtccatcacctcgtgcacgtgcagggcatagtcctcgatgtcggtggcgatgcgccagacgccgtctgcggccagtgcgcgatgaatgtcgccggccatggcctcctgcacgatgcggcgcttgtggtgcttcttcttgggccatggatcggggaagaaggtccatacctcggccacggtgccgggcgcggtcaccttgaacagctcgggcgcattgacctgggccgcgcgaatgttggtcagcccctgcttgccggcgagcagcagcgtgtgggccacaccggggtcatagacctctagggcaaggaagttcgtcttcggatgggccgcggctgcggccgccacgttttctccctgcccggtgccgatttccacaatgagcggattgtcgttgccccatgaggactccacgaacgcgcggtcgagcgtgacgccttcgcgcacgtccagcaggttgccggccgcaatatccaacagatatgtgccggcatagttgtcccaggcgcgctgcaggcgatcgtccaaacgtccggagcggcgcacgaaggaaagcaccttgtgcagggggtgcgccggtgcctcggtgtggtccgcggccatcgcggtgacggaatcgattgctgtggattcgggatcggtcatatattcctcggattttccttgtgcgccgcaccgctgttcattcgttaggtcgatttggcgttcattaggtgggtggtgtgcgataccaaccaccatatcaagccatttacccggtgtccgtgcgggccggctccgggccgacctacctaatgaacgccaaatcgacctaatgaatgcagatattgccggacgacaccaccgttttgtgcgattatgttcgtgtgatatactcaaattgtttcaaaaggtaacaaagcggaccaaaagtgaacagccgctgaactccacacggccgacacttgcaacccgcataaggaaaggtcaactatgacagttctcgtcaccggaggctgcggctacatcggcgcgcatgtcgttcacgcacttcatcaggccggcgaaaaggtcgtcgtcgtcgacgatctgagctacggcaagcccacccgcatcgaaggctcccgtctgtacggcatggatatcgccgccccgggtgccggcgagcgtctggctgaaatcctcgatgccgaaggcgtcgactccgtgatccacttcgccgcccgcaagcaggtcggcgaatccgtggagaagccgctgtggtactaccagcagaacatcaacggcatgctcaacgtgctcaccggcatgacccagtccaagaacgccaagaagctcgtcttctcctcctccgccgccacctacggtgtgccgccggtcgatgtggtgcccgaggacgtcgtcccgatgctgccgatcaacccctacggccagaccaagctgttcggcgagtggatggctcgcgcctgcgagcagccgttcggcatccgcttctgcgcgctgcgctacttcaacgtggccggctgcggcccggtcgaactcgaagacccggctattctgaacctcatcccgatgctgttcaaccgcctcaagcagggcaaggcccccgccatcttcggcgacgactacccgaccccggacggcacctgcgtgcgcgactacatccacgtctccgacttggccgacgcccacatcgccgccctcaagtacctcgaccgtgacgagcgcaagtacgacgccttcaacgtcggcaccggtgaaggcacctccgtgcgccagatcgtcgacgaagtcaagaaggtcaccggtctgccgttcaccgaggctgtcatggcccgccgcgccggcgacccgccgcacctgatcggctccccgaagcgcatcaacgaggagatgggctggcacgccaagtacgacgtggaagacatcgtcaagtccgcgtgggatgcctggcaggccaaccccgaacaccacatcgacgtcgacacctggaagcaggc

SEQ ID NO: 2628 - DNA, 3223 bp, Unknown
  R36_18m  MAG No. k141_215
ccagctgctggaattgatcgacgatatgcccctcccgcacgcgcacggcaccgatttccgtgatggcgcaactgttcgggtaaaagccggtggtctccagatcaagcgccacataatcggtgggaaagagggcatcgtccatggcgattcgcccgccggcaccatgattgggctgggatggttggccgaaaacggtaatgccggaagtggtcacggaggctcctcatatcagtcggtgttcggtgacttattgtaccggcagcccggtctgacggtaaaatttttccctcccggattttctcggatatattggttaggcggccggcaacatgcggcgcatcgggaagggagcacagctgatgaaacagatagtggcaggcatcgtggcgcatgtggacgcgggcaagaccacgctgtccgaggcgctgctctaccgtaccggtgagatccgtaaattggggcgagtggatcacggcgatgcgtttctggacaccaattccttggagaaggcgcgaggcatcacgattttcgcgcaccaggcattggtagaacacggcgacctgcgcctgaccttgctggatacgccggggcacgtggacttcgcagccgaaaccgaacgtgtgctgcgtgtgcttgactacgcgattcttgtggtctccggcacggatggcgtgcaaggccataccgagacactatggcgtctgctggccagatacggtgtgccgacgttcatcttcgtcaacaagtgcgacgccaccggatttgcccgcgaggccgtgttggctcagttgcgcaggcgtctgagcgatgagatatatccgttgccggcaatggaacagtccgctgagggcagcgcgctaccgttggacgcgttcgccgaagacatcgccaccctggacgaggaggcgatgaacgactatttggaacatggcgcgctgtccgtgggcagattgcgatcgatgatcgccgtacgcgagctgttccccgtatatttcggctcggcattgaaactcgaaggggtcaaggaattcctggacgggctggagacgttcacccgcgaacgtgaatggccggccgccttcgccgcacgcgtgttcaaaatcgcccacgacggtcagcacaaccgtatgacgtggctgcgcgtcaccggcggtgcgctcaaagccaaggagatcgtctcctcatcctcgtgcgccgcggcgtcgacaccgtcgccagcgcaggaggatgatgacatggcgtggtccgagaaagtcgatcaggtgcgcatctacaatggcgccaaattcgagacggtcaccgaagtgccggccggctcggtatgcgcggtgaccggactgacgcggaccttccccggcgaagggctgggaacggaaccggacgccgaatcgccgtcgctgcaacccgtgttgacctacacggtgttgcccgccggagcggaatccgatacggccggcacctcgggagcggccaaacgtgggggagccggccatgacagcgcgaatcaggacgatgccgagcatgatgccgccaagtcgggaaccggccgcaatgaggagaacgacaccgccggccagaccgcggcggacaatagcttgccggcccgtccccagttcgatgatctgaccttgcataaggtcatcaccgcattgcgtgagctggaagacgaagacccgttgttgcatgtggtgtgggtggaacggctggccgagattcatgtgcaattgatgggcgctgtccagctggaaatcatccagcagaccctgcacgaccggttcggtctggatgtgtcctttggccccggctccatcctgtaccgtgagaccatcactgcgccgatcgaaggcgcaggtcatttcgagccgctccgtcattatgccgaagcacatatcctgctggaaccaggggagccgggcagcggagtcgctgtggcctcggccctgtccgaaaatgatttggaccgcaattggcaacggctgattctgacccacctgaccgagcgtgagcatctcggtgtgctcgttggcgcaccgctcaccgatatcaagatgactttggtggccggccgcgcgcatctgaagcacaccgaaggcggcgacttccgtcaagccacgtaccgggcgattcgccaagggctgatggaagccagggcaggagtcagtggccggcccgagacgccggtcgagagccggccggacaccacaggggagggcaactgccgactgctggaaccgtggtaccggttccggctcgaagtgcccgcagacatgatcggccgtgccatgagcgacatccagcgcatggccggcagcttcgaatccccggtcaccgatgacgaatacgccgtgatcgaaggcgaggcgccggtgtccgaaatgcgcgactatgcgatggacgtgaaccagtacacgcacggccatggccgtttctccgccaccttcggcggctacaagccatgccatgacgccgaacaggtcatcgcagccgccgcctacgatcccgaagccgatctggacaacacccccgactcggtcttctgcgcccacggtgccggctaccccgtcaaatggtataaggtccccgaattcgcccacgtagactacgccatgtgaggtggtgactaccaaatctgcggccgaatgaatccgttggcctccaagaaccgttgaatatcgcgcatttccggcatattgatcgaatgggccatgcccggatacacttgttcggtcaacgtgccgtgctcgcgccagaactcacccatcgccgtcacatcggctttcgggaagatgtcgtccgcagcaccatgcccgtagaacacgggcggcttcaacgaagccaattcggcatcgcccgcaacggaccccggtgccagccatccagagcaggagacggctgcggcatatcgcttcggattgaaacgcagcagatgcgcggccaagaggccgccctgcgagaatcccatggcaaccaccggccgagtggcgggaatatgctccgcaacccatgcatcaatggcttgggcggcctcagccgcctgcttgtccaatgattcgccctccggcacaccttcatgcgcccacgcaccgaaccatgtatatcccatgccataggcgatgggtgcctgcaaactggcataatcagccgaaccggcaccgcaatagttcagcagatcgggcaaatcgtattcattggaaccccagccgtgcaacagcacgaacaccgg

SEQ ID NO: 2629 - DNA, 2992 bp, Unknown
  R36_18m  MAG No. k141_407
cacgacgcgccgctgcatgtgatgttctgctggcagctcaaggatttgggcgttattccgggctatgagaacgccgtggcaccggtgaaggtcggtcagcgccgcgccgaggagattctcaccgggctgatggccaaggcccggattcccgatggcgtcaaggtcagcacaaacgccttccatattcccgcatccaaaggtctgatcgcggcctcgcggtacgccagccatctggtggtcggttcgcgcggcctgtccggtctggacgcgcacttcctgggatcggtgtcccgtcagatcgtgaacttcgccgaatgcacggtgactgtggtgcactgattcaccgaaatcggcatggagtgctatcgcacgtctcggtgatgggcttgcagggaggaattctttattcctgcaaccccatcaccatctactttttaggaaacatcttcgctgagacctataagttgatccgagagtacattctgctgttggggagcaggattggcgtttattttattcctcgtccgccctgttctggcgcagctgctcaatgagatcgatgacggtttcgagttcaggagtcacatcgtctgaaggacgaacgttatcctcttcgtcgtccatctcatcatcctcatcatcatcggcaacggtgttgttgaggatgtcctcttcggtggcctcgtcgtcagcatcagacttggactcgtcgctggaatcagctgcatcaacatccacaacggaatcggatgcgttctgtgcaacagactcatcaccggcagactgggattgcgaggtcccgtcgcctgccgcctcctcagcgggctcagtatcgacggcgttcccgtcaacagtcttctgtgcttcgatatcatcaccggcaggctcgcctgtcttgtcggtttcgccttcggcctcgtcctgggcaacctgctcctgcttgcacggacggttggcaaccacgtcgatatgcagatcgtcaaaggctggcttggactgcacccacagctggcttggctcgggaggttcgatttcggaatgctcaccgcagccgtggtccagggagaccacgcggccgtcatccggactccacttgttggcgcacacgccgaacatacggtcgagttcgcccgcgagcggcacgaagaaaccacaggtggagcacaggttgccttcggcggttttggtgctcaacgctttggggcctcgcggaccttcataccagcgcttggcagcctgcgcacgacccaacgaggtcagcacgtgacggcgggtcagtcggaaggtctcgacggcatcgttgacatcctgcagcgaggattcctcgacttcgccttcctcgatgcgctcgtcatccggatcggtaccgatcgaatcggtgggagccagatctgtgggctcaaggcgatccttccagggaatccacttgggcggcatcaacgcgccctcagtggggatcaaggaggattcgttgacggtccaggagtcgatctcctcgtcgtgatacagcgtcaccgaccattgccatccttcgtagccacggatattcgcggcgaagcggaagtcagtgacgtgatcctcaagatcatatgaggtaacgaaatcccccacctgatcgctctcgtcggccacttcgagcagcacggcgcgcgcgatggcgtgagggtccggtgtcacgatggtttcggtggtatcagtcatagatcagatcagtcctgtacatcgaattgatccgccaccgcacgcagcaacgtggccagctttttgctgtcggcagcagatgggtaacggtgacggcgcaacgtattgccggccgcatcaagcatcttgataaggtcctcgcagatggcggccatgtcatccgccttcgggcgggtggccttgaccaagctgggagtggaggcgatcaggcgaacatccatggcctgcggcccacgacggccgtccaccacggaatactccaccttggcccccttgcgcaacgtggtggcgccagtgggtagggcctgagccggcaggaacacgtccttgccttcctcactggtgatgaagccataacccttggctgcgtcaaaccaacgaactcgaccggtgggcattgcgaaccttccttaatcctcaatggaaatagtaaaccgaaggtacagtttacctcacagggcttgacctcacgctttgggctgagtcgcctgagtcttacgctcagagctgaaccaagaagtcttctgtttggcgtccttggttttgccggtgggccgcttgggctcaggagcgacgatctgctcaatcggcagcaccacggtgaaggtcaggcctcccccatcggtgccggtggcgcagataaagccgtgatgtgctttgaccacggattgcgcgatggccatgcccaaaccggtaccacccttttcgcgggcacgggatgggtccgcggtgtagaagcgttcgaaaatcttcgagcgcgattcaggcggcacgccggggccatggtccacgaaacgcaatacggcgtatcgatagccggtctgcatcgaggcacctacttcggcggcgtcgatgaaccgccgcattgatgcgtcgctggcgggcatgcgagcgagctgtcttggatcgatggcggccggcatcacaccgagcgcggcctcggcaggcgaatcggcaggcgtgtagcggtggatgttgcccacgatgttggtcaccacctggcgcagtcgagaggcgtcgccgggcagcacgacctcgggccaatcgccttcggcaaggttgaattcggcgggatggttcaaatcgcgcgccggttcgagggaaatctgcatgcggcgaacggcacggtccgggtcgagcgcatgcaagtcgtcgacggcgtcggtgaccaacgacgagagtttcaccgtgccggtcacatcgatgccgcgcccctcatcgagacgggccaaagacagcagatcctcaacaagaacagtcatgcgctggctggaccgttcgatatgttcga

SEQ ID NO: 2630 - DNA, 4737 bp, Unknown
  R36_18m  MAG No. k141_445
cggcgcccttggttcggccgcgctcggcttcattccggcgatggcccagggtttggcgctctcggtggtcggcgcgattccgatggccgcgttcggcatcctgccgcaggccatcgtggcgaatatcgccgacgccagctccaagaccaccggccaggaccgtcagggcatgttctacgcggcccgcacctttgcgatgaagatggggcagtccgtggccatgctgctgttcaccggcgtctccaccatcggcatggcgtccggcgcgggctatcgcatcgccgccgtgtgcgcggccgtgctgtgcggcttgggcggcatcgtattcgcgttctacaacgaaaagaaagtgctgcatgtgctggaagcatgatgacgttgccgggtgccaccgcggtatccatgcggagcggtgtgggtgatttaccccgtctgcgacacttcggcgtcaaattgcgtttgaccgcactccgtactatattgttgcgagttgctttgcggagcaaagtaacatccaaggggctgtagctcagttggtagagcgcttcgttcgcatcgaagaggtcgcggtttcgactaccgtcagctccacgagaccctctgcattcattccaccgcagagggtctttttatttgtcttcgttgaaattctgccatctcgcgtttcaaggggctgatttggggtttgccggaggtctacttgcgtttcgaggggctgatggtcaagtagatacgccgccaaaatggcggaatagcgttgcgtcaaagccgtttgtactggtgcttcaccggatgaggagccccttgaaacggaagtagacctccggaacatgtgaaatcagcccctgcaaagggagaatgcctcgatttcgccatggattgtcgtggattgctctgtggcatgggcaatactgggagtatgacaagcgcagatgagttgaatgagcagtatgacgctgacggtagcgtgacgcaagtgcctgaacgcaatgatgaagttcatgccggcgaatccgccgtcgcccaatcccgcgaatcggccgtgaccatccccgccggcaccgtggtgctcgccgccaccccgatcggcaatgtcggcgacgcttcagcccgtctggtggccctcttggaacgggccgatatcgtggccgccgaagacacgcgccgcctctacgatctcgcccgtcgcctcggcgtctatgtgaacggtcgcgtcatcgcctatcacgaccacaacgagcgcgacaaggccgacggcctgctcgaccaggtcgaaaccggcgccaccgtgctcgtcgtgtccgatgccggcatgcccaccatcaacgaccccggcttggccatcgtgcgccgtgccatcgaacgcggcctgcccgtcacctgcgcgcccggcccctccgctgtgctcgacgcgctcgccctctccggcctgcccaccgaccgcttctgctacgagggcttcctaccgcgaaagcattccgagcgcgtgcagtatctgcgcacgctgttgcccgaacgccgcaccatcgtgttctacgagacgcctcatcgcattgccgattcgatggacgatctgctggacgcgttcggcccgaatcgcccgatggccctgtgccgcgaactcaccaaggattatgagcagattcgtcgcggcccgattggcgagattcgccaaagtgtgattgatgatccgccccgtggcgagatggtgctggtcatcggcggcgcgtccaacgaggaggccgaagcggccgcgcccagcacgttgagcgtggatgacatggccgtgctctccatcgaccgtgctttggaggacggcctgcgtatcaaggacgccatcgcgcaagtggtgcaggagcatccactggctgacggatcgttggccaatcgcaagcaggtgtatgcggctgtgctgaaaatcaagggatagcgcagcagccggcgattatctccccgttacgcttccatcgactcgaacaatatttccaacgcctgccggaccccaggcccaccacgctgcgagaccaattccagcaaaggcgcgtcggctttgggattggcaaccagccatttacgcagttcgggcacgtgatatgcgatgtgccagagcacggcaacatccgtatcgggcgaacatgccaccgcgggcgtaagtctgatgggtggttcaggcggcgcggtcatatccgagattgcgcgcgatgcggattcggatgagtgtgccgccgccgcgtggcgaggcaaccgttgcgcctgccgcaaatgccgtaaacggtgagcggcatagcggcctctacgatgtcctttggcgatgaatcccctcgtcatgcgcattgctccaaagccggttcgtcaatctccttctgcaccgattcaaaaaacatgcgtgcgcgtccggcatacttgtgatgccgatgctccttgacgatttgcagacagtcgtttggccgaaactggtacgcggacatcagttggcacaccagcgcgttgacggtggaaggatcggggatgtcttcaggactcatcaccaggtcgcaagccgtacgggctggcgtggtgacaggcagcccgccgagcttgatgatttgctccggcaacgtcaatcttttgaatacgcggatgcggcggctgacggatgccgagcggaagtgcgatgtggagatcacgtctatggtgctcggaaagtcggggcctcccagccatacccaagcggcggtcatcgaacacaccacagtgccaaacggggcgacctccgcgacgatttttgcgcgaccatacagtgtgcccgaatgctcgatccagtagccggcggaatcgtcgagcttacgtaacgcgccgaaggcggccagacggttaaggctgagcggtcccggcagattcttggtaaacagtatcggcggcaccgcgggctgcgcggttgccggcgaggtgactgttgtgatgtccgtcatcggacctgctgtgatatccatgatcgaacaatatgcagaagtacggcttgcgcgccaccggataagcgaaaacggtggataagtgcataacttcactaggtgcgcgaatgatgtggataactcggtggatatcgacaggcggaagtgtgtgcggatgtgcgtggacgtgcgtacggatgggtgcgtggacgtgtgtacggatgcacgtacggatacgtgtgcgaatgcgtatgcggataagcgcgcaagcggtgtacggataagtatgtgggggaagttacgggtggataggtgagtgggatgaggatggcggcgcggcagctatccgggcgtgtccccgccgcgccggataatcaagccttatgagtcatgttttggtgaatgttgcttggccgtatgcaaacggcccccgtcatatcggtcacgttgcaggatttggtgtgccctccgacgtctacgcgcgctacgagcgcatgaagggcaatgacgtgctcatggtgtccggcaccgacgagcacggcaccccgattctcgtcgaggcggagaaggaaggtctcactgcccaggaactggccaaccgttacaaccgcgtgatcgccaaggatctgtgcgacctcggcctgagctacgacctgttcacccgcaccaccaccggtaaccacgagcacgtggtgcaggagatgttcaagcagtgcttggagaacggctacatctacaagggcacccagcaggtggcgattagcccgtccaccggccgtaccctgcccgaccgctacatcgagggcgagtgcccgatttgccacgccgaaggtgcgcgtggcgaccagtgcgacgcctgcggcaacgagctcgacccggacgagctcatcaaccccgtctccaagattaacggcgaaaccccgcgcttcgagcagaccgagcactacttcctcgacctgccggcgctcgccgaagccaacaaggcgtggctggagacccgcaagggctggcgtaccaacgtcatcaacttctcgctcggcctgttcaaggaagtcaagccgcgcgccatcacccgtgacatcgactggggtatcccggtgccggtgaagggctggattgacaacccgaacaagaagctgtacgtgtggttcgacgccgtgatcggctacctgtcggcctccatcgaatgggcccgccgccagggcgacccggagaagtggcgtgaatggtggaacgatccgagctgcccggcctactacttcatgggaaaggacaacatcaccttccactcccagatctggccgtccgaaatgctggcgtacaacggcaagggctccaagggcggcgaaaccggcccgatgggtccgctcaacctgcctgagcaggtggtggccagcgagttcatgaccatggaaggcaagaagttcagctcctcccgcggcatcgtgatctacgtcaaggacatcctcgcccgctaccccgtggacgccgtgcgctactacatttccgtggccggccccgaatcctcggattccgacttcacgtgggccgagttcgtgcgccacaacaacgaggagctcgcctcctcgtggggcaacctggtgaaccgcgtggccaacctcatcaacaagaacttcggcgagattccgccgctggacgaggattcgatgaccaacgaagaccgtggccttctggaagaggcttccgccgcgttcgacgtggtcggctcctccatcgaaacccaccaccagaagcacgccctgtccgaggcgatgcgtgtggtcggcgacatcaacaagtacatttc

SEQ ID NO: 2631 - DNA, 14124 bp, Unknown
  R36_18m  MAG No. k141_572
ccggtgtgaccgctggcagcgccccctcgtttgctccggcacagtcgtcatacgaatccgcagctccgtcatcgaccccatcggtgttcgcggaacagcccgtggatatggtgcaggacggttcctctctggccgctctcgcccacatggctgcggtttctcaggaacttccggcggtggatgcgccgtccttcgctcccaagatgcccagccttgatacaccgaatgcgctgaaattgaatgaggtaccgggttcggtttcatccccggcgccctccgccccggcagcgcaacctgtgaatagcactgccgacgaggctgcgtccgctgccatgccggtctcctttgctcccaccagcaagccggatcgtaacacgaactccattccggttcgcgtatccgatagtcagcctgcagacagcacggtctcccgtccggctgtggaatcatctgaatacgttgccgcctcccacgacacggaagcagctcagccgtcacaggataagcacgattccaacgattcgttcccgctgctgttcccgcttggcggtaacttcgattcggatatccccgacctgtcgttccccacactgaacaatgacgatacgaagaaggaaaagtgagcatagcctccaactccaccgtcatcattctcggatccaccggatccatcggcacccaaggacttgacgtcatctcgcgtcaccctgaacgatttaccgtcaccggtctggcggcgggcggagcacatatcgagctgctggcgcaacaggccgcacagttccatgtgcccgaagtcgcggtgtttgatgagaccaaggttccagcactgcaagcggctctcgcacaggccggcgcacaaggtgtccgcgtgaccggcggtccggattcggtcatcgccatggccggctccggtgcgaatgtcgtattgaacggcatcaccggctccatcggactcgaaccgtcgatcgcggcgctcaaggccggttcccagctggcattggccaacaaggagtccgtagtcgcgggcgggcatctgctgttcagcgcgcaagtgcgcgagaaccagatcaacccggtcgattccgagcattccgccatctggcaatccctgcgctccggaacccacgccgaagtcgccaagcttgtggtcaccgcctccggcggcccattccgcggctggaaacgtgtcgacatggagaacatcactcccgagcaggcgctgcatcatccgacgtggaacatggggccggttgtcaccatcaactcctccacactgatgaacaagggcctcgaagtcatcgaggcgtcccgcttgttcaacgtgccgcctgaacgcatcgacgtgaccgtgcacccgcagtccatcgtccattccatggtcgaatttgtggacggcgccacgatttgccaggcttcgccgccagacatgcgtctgcctatcgcgctgggcctgtccgcgccggaccgcatgaccaatgtggccgccgcgtgcgactggacgcaagccgcaacttggacctttgagccgttggacgatgaggcgttccccgccgtgcaactggcccgccactgcctggccgcctccgagaagcatacggcggtgctcaatgcagccaatgaacaggccgtgcatgcgtttcttgatcatcggctgccgtacctcggcatcgtggacacggtcaaagccgtgctggaccagatggacgccgagcttcgtggtaatccgctgttcacggacgtggaggaaatgaaccagcttgagcttgaagcccgccgacgcgccgacaacctgataaacaagcaatgatgaataccttgaatacggaaaatcccatcgaaaagccgttccgcaaaaccggtgatccggtcgacctgaccagcgaatcgcctttgcacccgcgccgcaagtcccgccgcatcatggtgggcccggtgccggtgggcgggggagcgcccatctccgtgcagtcgatgaccaacacgctcacggccaacgtacctgccacgttgcagcagatcgccgaactgaccgccgccggctgcgacatcgtgcgcgtggccgtgccgagtcaggacgatgccgacgcactgccggaaatctgccgcaaatcgccgattccggtcatcgccgatatccacttccagtccaaatacgtgttccaagccatcgacgccggctgcgcggccgtgcgtgtgaaccccggcaacatccgtaagttcgacgaagtcggcccggacatctgcaaggccgccaccgacgcgggcatctcgctgcgtatcggcgtgaacgccggctcgctggacaaggaactctacgccaaatacggtggcccgactccggaagcgctggtggcctccgccttgaaggaagcgcacatgttcgaggacgtcggcttccacgatttcaagatctccgtcaaacaccatgacgtcatcaccatggtcgaaacgtaccgactgctcgcatccaagggcgattggccgttgcacctcggcgttaccgaggccggccccgcctggcaaggcaccatcaaatcctgcctggcgttcggtgcgctcttggccgagggcattggcgacacgattcgcgtgtccctttccgcgccgccggtcgaagaggtcaaggtggggtgcaaactcctggaatacatgggattgcgcccccgcaagttcgacatcatctcctgcccgagctgcggccgcgcccaagtggatgtgatccagctcgcatccgccgtcaccgaaggcctgaaggacgtgaccgcgccgatccgagtggccgtcatgggctgcatcgtcaacggtccgggcgaggcacgcgaagccgacctcggcgtggcctccggcaatggcaagggccagatcttcatcaagggcaaggtcatcaagaccgtgcccgaagaccagatcgtcgacacgctgctcaccatagcgaacgatatcgccgcccaaatggaggccgacggccaagtgcccgtcaattccaccggcccggtcgtggtcccaatccagcatcccggtcactgattcggccgaataggccctcggcgtaaatatcgcggtcagattacaatagcgcacgtgtcgcaagaagaagagcatcgcctgactgttcgatccaagccgtggaccagcacccaccggctgatggtcagcctgcccatcttcattatcctgatcggcgtgctggtctccatttccaacctgaccacggtgccttggaacatcgaacccaccggccagtcgatggccacgctcaccgacgataccgaagtcaccttcgataacccgtccggagaaacgctgccggcgaaaggcacgtatgaggtcaccgagcgatacatcacgctgaacatgaccagcgacggcaatctgaccaaggagcctggtgatcggggcaaggccaatgcggacggcgtccaagccatcaaggtattgattcgggaacctcagaacgcatcaggcaagcgccccggcgtggtgttcatgcacggtgccggatacggcacctgtgacaactcctttggcgatgtggcctccgatatggcttcggccggctttgtgaccgcagtgctcgacaaacccgtctggagcaccaccgacatcaaccgcgattatccggcctcagccaaggcatatgatcaggtcatcgaatacctacgagcccaaagcgatgtagacgccgccaaggtcggcatctatgccacctccgaatcgacatggatctcctcatatctgctcgaggacgatccggacgtcgccttccagattcttctgagcccgatggtgttcagcccacgccaatcactgggatttttcgtcacccaggacttcactcttgtcggcgcgaacgagggctatcgatccatcgtccaacgcgtgttcagcgcggacaccggcctgttcggactgaacaattccgacctcgccacgctcaaacccgccgcttacgccgtacccacctatgtggcttacggttcaaaagacgtgatgacggcgcaggtcgacggcgtgcgtgcgattctctacaacgcccacaaagccgataactggaacgtgaccgtgcgcagctatccggtcgccaaccatgtgctgcgtttgggggatgagtccgaagcgggcaccccgtttgcggacgcctatgtggacgatctcatcgattgggccgtcggcacttccgccggactcacgcagaccagcgaaaaggtggccggcaccaatctgtaccaatcaatcggtctgccgggcgccttgaaggcaagacgcgtcggcaccatatatggtgtgatcctgcacgtcacggtggtactgctgctgctcgcatccatcgtgctggcactggtggcgctgggccgcaaaatcgcggcggatgcccgatggcggcgcgagaaacgcgaggccaaacgtgcgggcatgctgataccggaacggcctgtgatactcggtttcgcacatggtttcggcaacgcgctgctgactttgaccctcaccactcttgccacactgctcatcttctttgccggacttggacaggtgattatgggtgtggtcaaacttgcatggggcagcgctcctaccgagacgccgggcgtcatgtattggagctggccggtcatccaagtggtgtccgtgctggtgctatgggcttggtcccgcgtctttatgcatctgatagaggtcgcttccgcccgcggactgattcagataccccctcgtcgtgaatccgttcgagacatcgtcaccggtgccgacccggtactcgcctccacccgtctgggccgagtcctgttctggctggtggccttcaccatgctgtacatactgttggtgttcgccttctggggcctgtttatttactgactacttcattgagtagagtctgccgggcgtcgcggggaaaggagatgagatgtcgctgtaccgagacgaaggtgtggtgttgcgcacctccaaactgggcgaagccgatcgtatcatcaccatcctgacgcgtgggcatggcaagattcgggcggtcgccaaaggcgtgcgtcgcaccaaatcacgctttggtgccaggctcgagccgttcatgcgagtcgatgtgcttatcgctgaaggccgctcgcttgacgtggtctcccaggctgaagcggtcgccgcttacggtgctccgatcgcggcggattatgcggcgtatgaggccgccaacgtcatcgtcgagaccatcgataaactcgccagcaccgaacacgagcagctgacgaaccaatatcggctgctcatcggcgcgttgaacgcgctcgccaaacaatcccacgccccgcaagccataggcgactcctatgtgatgcgcgccttggccttggccggttggacgccacgattgggtacttgcgtggtatgcggcaaggcggagccggcgtacctgtccatcgcgtccggcggcgtgatgtgcgaagccgaccacactaccgatgcgcgccgtatcgcgccgttcgtgttaaaccagttcgatgcactgattcgtggcgattggtcggtgcttgatgccgcgcctgtggagcgggttgtgcaggagttggttgaagattggggggagtattacctcgaacgcccgattcgttcgctgcgcttgatagattcatgagtatggcttttgagaacgttgattacacgtcgttggacattcccgcagctccgttcagcgaccctgcccgtattcccgacttccccaagaacaaggtaccccgccatatcggtgtgattatggacggtaatggtcgttgggccaagcagcgcggcatggtccgcaccaatggtcatcaggccgccgaaccggtggtgttcgacactatcgccggtgccatcgaagccggtgtgcggtatttgagcctgtacacgttctccactgaaaactggaagcgttcgccccaggaagtgcgcttcctcatgggcttctcgcgtgaaatcatccaccgccgcgtggaacagatggacgagtggggtgtgcgcgtgcgttggtccggccgtcgccccaagctgtggaagtcggtgatcgacgagcttgaggccgccgaggagcgtaccaagaacaacaaggtcatcgatgtggtgttctgcatcaactatggtggccgtgctgaaatcgccgacgcctgcgccgccatcgctcgcgaagtgcgtgatggcaagatttccggcgaccgtgtgactgaaaagatgattgccgaccatctgtacaatccggacgttcccgattgcgacttggtgatccgtacttccggcgaacagcgcacctccaacttcctgccgtgggaggccgcctacgccgagctcgacttcgtgcccgaactcttcccggactgcggccgtgacgtgctatggcgctccatcgaccattacatccaccgcgatcgccgatttggcggcgtgaaataaagaacagtcctgtggactgtgtttgcggggtttccgatttggttcgggagccccgttgttgttgcgttttacgggttttgcttggtttgtgatggtttggtgtttgtgtctcggtggctctgtttgtgtcggtttgcgcgccttggggtatcatctggggtatcgccggccgatgcgggaaggctggccccatgcgcaggagaagaggtttgagcagacggttcggttcggtggtgaagaggaagaaccacaatggcgtgcccacgtgtctgttggcgcggtatcccaatccgaaggagccgggcaagagggtggtcaggaggttccctcttggcgcggaggcgttggcgtatgcctggctggatggcgaggaggggttcgtcagggattacgagcgcgggctatccgactgggtgccgccggaggagcgcgagcgtgtcgtgaagctcgcacgcgaggatttcgccgtgtacgcggaggatttccttgactcgtatcgcacggttgacggcgggcgtctccgggattccacgatgcggctcaagcgttcggatatggccttgctggtcaaggcgttcggcggcatgccggtgagtgagatcggccggtcggacgtgggcgcgtggcttgacgatggtgtgtccagtccttatacgcggcgtcgttgctatcagttgcttcgcgccatgatgtcgcgtttggtggaggatggcgtgatcgcgtcgagtccttgcgtctttcccgttccccgtcttccggagagtcgccaggccatgattcccgccgccactcgcggggaattggctttgatctatgacgcgatgcccgacgatacggcggtggcggtgtatctgggcgcggtgtgcggcctgaggatcggcgaggtgtgcggtctgagggtcggtgatgtggatctggcccgtcgtgtgctgcatgtgcgtcacgcggtcatgcgcagtctgtcgggcgagtgggtgctcaaggaacccaagaccgcggccagcgccggggacatgccgatccccgagggtctggccgccatgttggaggcgcatatcaaggcccattgcgacgggggcggggacgcgatgctgttgtccggcgcgcgcacgggcggcatccttcccccgtccacgttgcgcggccagttcgaccgggcccgcagggcggcgggacgtcccgacctgcatttccatacgttgagggccaccgcgatcaccgccgccgcgcagtcgggcgcgagcccgaaggaggcccagcggtacggcaggcacgccgacgcccgcatcagcctggagttgtaccagcgtgccaccgaggacggtggcaggagggtcgccgaggcggtgttcgactccctcgtgcagaccggtcgcgaccgcgcgcgtgtggaggccgagctcgcccgggccggggaacgtctctaagccgcccgccgtgacgtggagcgcctcgagaaggagctttcatcgctgggctaggccgccttcgcgcccggatcgccggaaggggtgtggcctttctgttgttcatactgcgggagtggatcgtcgggactgcccgcccagtctctcagggtggtctcgctgattcctaggaaattgtggagcgacttgacgcttcgtccgtcggtgttgatcagatgccatatggctgatcgcagttctttttgcagcgcttcgcgtatatcgggaatgacgtggggctcgtcttgcgggtcgcgggacgggatggaggaactgcatgtcagggtctttgcgacgtggatcagttgcagctcctggtattcgccgatcgtgagggtgcggactaggtcggcgagctccccctcgtcgttgtacagatccacgtatgcctcgcggtccttcagtttctttttgtggggccgcatccattccacgaacgcgaaatccagtccgagccgtgccatctcctcggtgatgcttggatcggggtcggccgcgtccgaacgcagcaccctgagcatctcctggaggcgcccgatctgggtttcggtcagcatcgccatttcccggatcacgtccgcgcggatcccgttcgcgcggatcctttcccgctcggctatcctttcccgctcggctatcctttcccgctcggttattccgtcgatctgtctgaggaaccgtgcccgttcctcccaggatgccggcccggcgtcctcgatgccgtccatctcgtccgtgtcctcgttgtggtcgtccatgcgctcctccttgtgatgtccttctcccattatccgcttgcccgcgtctcctcttccgatgacgcgcatgggtgtcgaacccgctcgggttccgctctggttacgaccgcgctttcaggcgattatcgaagtgtcaaggaaaacgaaaggagcgatcacgatgggcgcacacgatctcgacaagcggtggctctcggtggccgaggccgtccaatataccggcctgtcgcgctcgacgctcaaccgcgcgttcgtctccgggcgtcttccgcgatacaaggctggtcgccgcgttctgcttcggcgttcggagctcgacgcctttatcggccagccggtcaactctgccctcctcgcccaacgcgagtaccggcggctcaacaataaatccgcaaaggactatcatggataaaattttttaagttcaatacgctcagtcagccgacaaaatatccggtcgatctcggtcggatcggtgtcaacgtatacgacgtggcacccaagtgggtctaccaggacggccggcgcaccgatgtgcaggccacgtcgaaggacggcgtgccgcgctggacgatcaaggcgatcctgaccccccagggccgcgcctccggcgctcccgccgagatcacgtactactcggaggaacggcccgaggtcatgggcgcggcgaccttcgacagcctcgacgtttccgtctggcatatgccagagcgggatatggcgggcatcgcgttgcgcggctcaggcctgcgatctctgggctcctcacgggtcgccgctgatgatggcgcggtggaattgtgatggaatgggccgatcttggtgaggagctggctccgacgcgggccggttcctccgatgagggtttgtcaagcgtcttcgcgcatcagatcgcggttttcgcggcgttcctagtgttcggtttcgtcatttgcctgttgtccttggacatggcaagcggaaatgcgtggaacgcggcgttgatcgacgcgctgttcgtcgccaccggggcgacggctgtggtctgggtgaccgcgtcgtgtcggcccgtgcgcgaatgggtcggctatgtcggtgaaatgcagtccggcgaacaacgtgcgttgcaacgccaggtggacaatgtgtttgagaaatggcgggatggcacggtgcccgcacgggccggtcttatggtcgagcgggcgttgacgcccatcgagtcggcctggatccacgaacggttcgagttgcagcggggtcgcgccaggcaacagatccaggacggcgtgctgcttcgccagcggctcgccatgatcgacgccgccgagcagtccgatcgatgcgagtttcccggtctgcggctgttccatgatcccaagacctgtgttgtgacggccgtcgtgactccgccgccgtcgatggacgtggatcaggtggtggaggccgttccggcgttggcccagttgtggaacatgtccgccgacgagcctgtcgtgcgggatcgtgcggtgctgatacggcttcattcccaggcgaaggaggagtgggcgagatgacgttgaatgatggtttgtcttcgatggcccgcgtgcgcgttggcctgaccgggcatagggagccgatcgactacgacgtggccacgccctcgcacatcgccctggccggtgccacgcggtcgggcaagtccgcgctggcgtactggctgctgggccagttggcggccatgccgtgggtgcggatcgtcgggtcggacatctcccggctgttgttggccccgttcgccggcgatcctctggtggccctgggccaggacgatctcgacgcgcatgcgagggcgttggagggcgttgagaagctcatgcgggatcgtctcgaccgtctgctcgccgagcggtgtgacaagatcgacgagttcaccgtcgcttgtcctctggtgcttgtggtgatcgaggagttccccagcctgctggagctggcgaagaccctggacgcctcgacctcgcccaagggcaggctcgaggcccggttgaggtcagtgttcctgcggctggtcacccagtcggccaagtgcggcgtgcgggtgatggtcgtcgcccagcgcatggacgcctcgatcctgcagggtgtggcccggtcgaacatcgagacccggttcctcctgcgctccgatgaagccgggatcgagatgatgatccccggcctggatgaccaacagcgctcgttcctcgcccgggcccggcccggcgtcggtttcatgacggctccctgcgtgccgcccaccctgttccgtggggtcgccgtgtcctaccagcagtatctggatcagttggaggcgtgcgtggccttgtcgtccgcgtcgcttcccgtggcggatccgtgacatgggccgcgcatgcggcgggcggggccggcgtgccgcgaaggcggcggagccggatcccgcccccggccccgccaggggccggggtgcctggcctagtgttacccaggcacttttgtgtctgtgtcctttcatcccgttcgtccccgattgcaggcccttttgacccggaggggcttgtgtctggcagtgtgtcaaaggttgtgtccaatgagcaacagcaacaatccaaccaagcggagggccaagtcccggtccgcgtccgcggagggcaggaggagccgtggatggctgatcaccatacccgtcctggccaccgagcccgacgaccccgacgacccggccaagggccggcatcccaccggcgggatccggtacgagagggacatcgccgccgcgttcgccgactggccctggtgcggccagatcgaggagggggcgcagcgctccgagggcgcgtcccacggctacctgcactggcagatctggatggagaccgggaaccccaagaaattcagcaccgtgaagaaccggctcgccaaggcgggcatgccggacgcccacatcgaacccagggaaggcaccaaggcccaggcctacgcctacgtcaccaaggaggaaacccgtgtcaaccacaccatcgaaatcaacatcggcgaaaccaacggtcccgacgataacggcaaatgacgccggcccgttcttccacggcctgtccgccaacgacatcgcggacgagcagggcaaacgcaacgacctcgaagagctgcgcggcatggtcgaacagggcatgacccttgacgagatactgctcgcggacaccgacaaccacgcctcccgatgcgtcggatggctctcgcggctcatcgaggcaagggacaggtcgatctacaactccagcagcggccgcgacatcgaggtctactacctgtacgggcagacgggcgtgggcaagacctcctacgtgatgaacagatacgcgcccgaggacgtgtaccgcgtcagcgactacctgcatcccttcgacggctacgggaaccagaaggtgctgctgatggacgagttctccggcgcgctgccgttcgaccagctcctgaacgtcaccgaccggtggcgcaccaccctggccgcccgctaccacaaccggatcgccatgtacgacaccgtgtggatcgtgagcaacctgcccctcaacgaactgtacagcgagatcgaacggccccgacgcaaggcgatgttcagaaggttccgccaggtcatctacatgaccagacaaggcggcatgcaccgctacgaccccaacgagatctccgactacctcggcgaccccgagcacgccccggccggacgcttccatctcctcggactcgacgacagcctgagggccgaggacatcatatgagcgcacgcctccggccgaccttatctggttgagataattattgatgccggcgtcggtcggatcgcccgtatagggcaggttcctgatgatcgcgtccttcgagccggtgaagtaataccccttcgccgtcacgctcgtgccgtcgatccaatggtcacccgacttcacgccgaccgtcaccctgtcggtgatgggctggccctcctgaatgatgtgaggggcctcggtggagatggtgggggtgaaggccatcgggggctgggactcgttcaccgcgacgcagatggccaggttattcaccgtgccggctgcggccatctcagccatgcccttgtcgaactcaccacgggcgaacttggttacgtcgccatcagtccaaccattcaaaaagaaccttacaccaccgttcggctgtgcctgagcctgagaccatctctgctcgaacagggacttccagtgcgcggcgttgtcgccccacatgaatccaccgcgcagcgaggtggcgaagccaatcacgcgcgccctttgatgggtggcgtcgagggcgcggttcaccgcctggttacaggccttctgaatcagaggcttgttgacaccagaatcactgacctccacgcctgctttggccagatcactgatcagaacgtcgatgttggcgttgtcccttgtgccccagccggtgggcggtttgcccgcagcagtttgagccagattatctttgagccacaggacgaagtcattcgggccgatgccggtgttgccgccaccgccgataatgacgccgttgccggagttgtcgatggcgttggcagaggaaacggccaccaaaccacccgtggcgagggtcgcgaacgccgcaagcgacgcgatacccctcctcagccaacccggcttttccttgggcggagtgggcttgctatgctctttgtatttcagcatatctctcctaaatcgaactatattgaccaagcaacgccgcgcacccaccgaacccaaccagcggcgcacgacctgcttgccccaaagtaggcaatcacaccacaagcatcacccacgccagcaagagcatgcgtgaagacatggaaaagccccacctcaatgagatggggcttccaaggagagaaatgactaaggtcagttgccaaggatggagcaagcaaccttggagcaatcaaccagcgggccggtgccgccgccaaggactccattgttgggacgttggatgggggcaggagcgggggctgaggaaccgccggtgtaggactgctgcggggcggaataccctcggttggaggaatacccgctgccggagccgccgtaacggttgtaggactgggagtaggagcgctgcgactgcgcggcggcttgcgcggcttgggcttgggctgcctgcgcctgcgcttgggcttgggctgcggcctcggcgtcggcctgctccttcgcggccttcgaatcggtcacctgcttgacggcggcgtcgagcttcgccttggcgtcggtgtacgtcttcgggtcggtgacgcccttcttggaaagggtgttgttcgcttcgtcgatggccttcgcgaggctgtcgcgggtggcgttgtccgccaccttcccgtccgtgtccttgagggtctggctcgcgccgtcgataccctgcttgagctggctcttggcgtcgtccagctccttcgccagcttgctgtccttgacggccttgagcgcggc

SEQ ID NO: 2632 - DNA, 3637 bp, Unknown
  R36_18m  MAG No. k141_703
acgcatgcaaaccggcgaccaggagagcgttttcgccgcaggccgtgacggcaatatcgtggaggtacaacgctccaaccgcgcccgcctctggcgcaacgccatccgccgcgaaacccgcgaactgcccggccgcgataccgctgctgacaccacgcgcgaatccgactccacccccgccgattccaaatccatggtcctgtggggttggtgatttgctgttcggctgtcgtgcggagttggtgagataggtatatcgaatacgaatagttgaggattcactgcgacgtacggaggtaaccatgctgctcaaggccgtgttttgggatttggacggaacgcttatcgattcggagccgctttggcatgacggtgaaatcgagatcgcgcacaacaatggcggcgagtggaacgaggacctcggttgggagtgctccggcactccggtgccacacgtggcagaggtcatgattgcgcatggctgcacattgagcgttcccgaaatcgacaaacagctcaaggattatgtgttcaaggcggaggtcgaacgtctgccgtggattcccggcgtattggacgtgctgcactcgctcaaggaggccggcattccgtccatgctggtcaccacgtcgccgcgccgtatggcggagaacatcatgaagcagtccgagggactgttcgccggctacgtctgtggcgacgatccgtacgaacacaagccgaaccctgcgccctatctggccgcagccgacaagcttggcatcgcccgtgaagacatggccaagtgcgtggtgctcgaggattcctcggttggacttcaggccggtgcggcatcgggcgcgactctgatcgcgcagaccggctggattcgcacggatacttccggcctgggccagttcgcgtccatcgaatcgtatgacggtatcgatgcggccgcgctggacggtttcgtgcgccagcgtcttggtgagtaattgattacatcaccgcgcatgcagttctcctcatgagcggtggaatgtgttgacgatataccagcgaagcacgccatatttgtaaagaagatggcagtaatggctgctatgaggttccggtggccccctcttgtatcggggcgactggtagagtggttgacggttttcagacgaatgtctggttattggacagattgttcacacatatagacgtataggactcataggaatcacatgggcttcgttaatttcatcctcgaactgctgaaggatccgcgtgccgcgattgccggttggattgccatgggcgtggcgccgaccctcggcttcatcttcctcatcgtatttatcgaaacgggtgtggtgttcttcccattcctgccgggcgactccctgctgttcgccgccggtgtgttcgccgctcccgatgccgcgaccggcaaggccgcgctgccgctgttctggctgctgccggtggtctggtgcgccccgattatcggcgaccagtgcaattacttcattggtcatttcttcggccgtcgcatcatccagtccggcaaggtgaaggccttgaccccggagcgtttggccaaaaccgagcacatgattgagaagtggggcccgctggccgtgttcctgggccgtttcttcccgttcattcgtacgttcatgccgttcatctccggtatttccggtatgcgttggagccgtttcacgccgttctcagtgctcggcggcctgtgctggtccacgttgttcacgctgctgggctacttcttcggtaacattccggcagtacaggaccacttcgagctggtgatcgtgctgattctgctggtctcgctcgccccgaccatcatcggtctgctcaaggccaagttcggcaagaagaagccggccaaggtgaccgatgctcagttggatgctatggaagacggcattaagaacctcgataagtaagcaagaaatgtagattaccgcataaggaatcgtcgtgaaaatgaaggccctgactgtgcatgtgaggtcagggccttttctgcatgagatgggcgtgaaacagcagcgtggttatccacatttgtcgtggacgacatgccggggtgtggataactcagcaagctagaaccacaatggtcgattcgtgttgagcattgaactcggacacgtttcaatcggcttatgaatagcaacaccacaccccgcgtggcgcgtaggatcacctcgccagcggtagcacctccgggcattccgctgcccacggacgatgcgccaattccagcgtatcgctactacactccgccgcccaggccgttggcctcatgcgaacggcagagatcgggcgaggctccggcactcgccctaactacagacaccagcttccataacattgtaacgatgacgtcaggtcatggaggcgtggggttgagtgtcatggcttccatgcttgcatggacattggcgagacgtgaacacagctgcgttctcatagacgctgatttcgtggccggatgccttgacctgctgcttggtgtagaacaagagccgggcttgcggttcagccaagtcgacgcgcccctcggccgtatcgagggtgaggcgatgaaccatgagctgatgatgtgggagggtgtgcgagtacttccctatgacccttggagcgcgcgccagcctgactggtgggaagttcaagcggccattcgggctttggcggaaacgaacgacgttgtcatcgtagatgccggtcagggtggactcattgagaccgtacccgatctgcgcagtggcctgcaggtgattgccgcggaattgtcggtaatggggctggccagagccaagtcgcaccggtccagattggattcatggggctgtgaagcgccacatatcgtaggtgtggaaccacgtggcgctccacgtgggagaggccacgtgggtattggcgaggcgcaggactatttgactgccacggtattggggcccatcaagccaagtgtcaatctgtgcggagacgtactggaaggcctcggcatcagatcggtgaccaaaggcagtcgcaaagccatgaacttgcttgccgatctcgtagaacaggccattcgcccggtttcgggagcttctcacaaggaccagtgatgctatggctgccgtcagcacgcgagccaatgaggctggcacagcgctcagaaccatattcttcggtctgctggatgacgtggcatctgacccgcaggttaccgatttggcggtgacctgtgatggccgcgtttgggcggaccgcggcaatggcatgcgcgaaacagtattgcatgtgccgttccgctcgccgcaagtagttcgagaatacgccgtccaactgtgcgcgcagctcgggcgcagactggatgatgcctgcccgatagcggatgccgccagtccggatggcatccgcgtgcatgcggtgattgccccattggtgccacaaggtgccgcgatttccatacgattccctgaccgaaccatggcatcgctacagcacctgagcaaattaggcgtattcccggctgcttggctgccgacgttcgtgggattggtgcgcaaacatgccacagtgctgattaccggcggaacaggcgtgggcaagaccaccttgctcaaggcgctgatggcgcaatgcgacgtgaacg

SEQ ID NO: 2633 - DNA, 15703 bp, Unknown
  R36_18m  MAG No. k141_722
accggagacaagcaactgtcccttggttccgggcatctgtacggcacgagcctgccggtcggcggcaacgacacccatgcggtcatcaccggccatcgcggcatggtgcaggcgcagatgttcaccagattggatgaaatgcgcgaaggcgatttcatctacatctcaacgatgaacaggaccctggcctacgaagtcgatcgcatcaccgtgatcgaaccgaccgatacctcgcagctgcgcatcgttcccgggcaggatcggctgacgttgatgacctgtacgccatacggcatcaattcccaccggctcctggtctccggccatcgtgtgagcatgcccgttcccgcccccgatccgaccgatctgcatgacggtcggaccgccggcacatgggtgtgcggggcggtgctcctgtgcggttggggcggcattgcggcggtccgtcggcgcaagcgcgcgccggaagggccaccgcgccatgccgtgcgggtgtgattggatcaaggtccggcatggcgatgccagccgttgcggacggattcggggtgcgacgcaggaggttcgcctggtccggagaaaacagtctacgcggcgggaaccgttcacgtcgaaatcacctgcacggcctggagtacccgcaattcgggaaacctgtgcaaccgtagaacgtgcgtgccggtgccgaaacgttcctcggcgtcatcggacgcagcctcggcgtgtgacggcggcgacgcgtgccgccgacaccgattgcgggcggtgacgggtgcgtgacgtgtgtgacggatggtcggatggcggggtggacggaccgagcggaaccgggcggtccgtccggaaccggctagagaccgaggaaggcgcggatgtcgccgatctcctcgtcgacgatggctgacccatgccaggatactcgcggtattcgagccggccggtggcctcgagcacgcgacgcgcggtctgctggtccgcaggtggaatcgtgcggtcccgcgagccgtacaagagcaggaaacgggtgggggagtcgaaaccggtgaggtccgtcgactcctcgcccttgaacgacgggctcatcaggatcgccgcgtcgaacacgtgcggatgctcgagcaccatgcgatacgacatatagccgccctgggagaacccgacgaggatcttgcggcggcctgcgaacatgggggagtcgagcagggagacgacggcgtcgcccatgcgcgagcactcgcggcggcgaatccgaagcatcttcatatgccgctttcagcttctccatgatttctgtttcgttatacatgccgcgcacgtaatcgtgcaatagcggttgcaggaaatcacgccaaaagtcatcgaacgctttcgccgtggattcggatttggaaagattcaggaaatacgcagggccgacatggtaatccgaacccaaaccgatatcgggggaggatatggtctcattcagcttcgtcaagcggctctcggcttcctccgacaagcctccaagttcttcaagcatgtccaacccgtcttcggccttgacctcgatgaaacggaaccgtgggggcgtgcggcgacgttgcgatgggaatcggtcagcgcgggcggcctcatgctggtgagaaaggccgtgtgcgttccggcccgaacaaaggacgatgggatgggccgagaccgatgaaccgatacggaagggactacgacatggacaatacggcgcgcagggatgcgggattgccataccactacgacgacccggccatcatggacggacagctcgcatggcagaacaaactatgggaatacaaccagaccaaacccaccgaacgggagcggcgcgccgaactgctcaaagacatgtgcgccgaagtcggcgacggcgtgcacatcgaaacgccattgcatgcgagcaacggatgccgtcgcgtacacctcggcaaagtcatctacatcaacgcgttcatgagcatggtcgacgacgcggagatatgaatcggcgactacacgatgttcggaccgtccgtcaccatcgccaccgccggctacccgatcttgcccatcctgcgcgaacaccacactcttgttcctatagcccagaaatcccgcgtctctttcgttgtgacgcgggatttctgccggttgggctatcggttggattgactggtatgtttcagcgaacggctttgaccagtgcctcggtgaggtacttgccggcggccatcaccagcggcgcatagcggcgtccgggggcggcacccatgcggccggtcgggccggaaatcgagatggcggcgatgacctggccggaggcgttgcggatcggggcggaaatcgagcacacgccctcttcgcgttcgttcacggactcggaccagccgcgcttgcgtacggcggccagcttggtggcggtgaacttggcgtggcgcaatccctggtgcagacggtcggaatcctcccaagccagaagaatctgggcggcggaaccggcttccatcgacagcatggcacccaccggaatggaatcacgtaggccggaggtgcgttccacagcggcgatgcacacgcgctgatcgccttggcggcggtaaatctgcgcagactcgccagtgcgatcgagcagggtctgcaggatcgggccggcggcggtcagcagacgatcctcgcctgctgcggcggcaagttcggcgaaacgggagccgagtacgaatcggccatgctggtcgcgcagtacgaaacggtggcgttccagtgcaatagccaaacgatgtgcggtcggtcgagcgagaccggtggcggccacaagctggcccagcgtagacgggccggattccagtgcgtcaagaatctttacggttttatcaaggacgccaacgccggaatggatttccccatcgtccttggcggtggtgtcttcaaccggctcggactcggtcaagctgttgttcaatggttcttcccgggaatcagtcataataagggcgattatgccatctcacatagtgaaatggcaaattggggaagtgtctcacagggtggccatgaagttgaaagggcgttcgtggatgccgaagagacatgtctggagcggaaccgagtcatgactaggtcatgttcgagtcgggtccgagtcatattgaggccatcatttgaccgtatctcaatatccggcatgctcatggccgggcccatcgcaagcacataggctaataccacgaacaaggcgcgaacacaatacctcgcgcggaattttttggaggaatcactatgggaacgacactggccgagaaggtctgggccgatcatctggtgcgcaagggcagcgacggagctcctgatttgctgtacatcgatctgatgctcatgcatgaggtcaccagcccgcaggcgtttgagggcctgcgcttggccggccgcaagccgcgtcacgtggatcagctcattgccaccgaggatcacaacacgccgaccgttgatatcgatcgcccgaacccggatgagacgagcgcgttgcagttgacgactttggagaagaactgcaaggagttcggcgtgcgcctgcacccgctgggcgacgccgatcagggcatcgtccacgcgttcgccccgattctgggcctgacccagccgggcatgaccatcgtgtgcggtgattcgcatacgtcgacgcacggcgcgttcggcgcgctggcgttcggcatcggcacttccgaagtcgaacacgtgatggccacacagacgctgtccctcaagccgttcaagaccatggccgtcaacgtcaacggcaagctgcccgcggacgcgacggccaaggacatcattctggcgatcatcgccaagatcggcaccggcggcggccagggttacgtgatcgaataccgtggcgaggcgattcgcaacctcaccatggacgaacgtatgaccgtgtgcaatatgtccatcgaggccggtgcgcgtgccggcatgatcgcgccggacgagaccacattcgagtacctgaagggccgtccgcacgcgccggaaggcgagctgtgggatcaggccgtggcgtactggaagacgctgaagaccgatgacgatgccgtattcgacaaggtggtggatattgacgccaccaagcttggtccatatgtgacgtggggcaccaaccccggccaaggtctgccgatcaccgcctccgtgccggaaccggacaagatcgccgacgccaccaagcgcgccgccgccgaacgtgcgattacatacatgggtttgaagccaggcatgccgatcaaggacatcgccgtggacaccgtgttcattggttcgtgcaccaacggtcgtatcgacgatttgcgccaggccgccgcgattatgaagggccaccgcaaggccgagaacatccaccgcgtgctggtggtgccggcctcctcccgcgtgcgtttgcaggcggagaaggaaggcctcgataaggtgttcaaggactttggcgccgaatggcgtaacgccggctgctcgatgtgcctgggcatgaacccggacaagctggtgccgaacgagcgctcgatttccacttcgaaccgtaacttcgagggccgccaaggcaagggctcgcgcacgcatctggcgtcgccggccgtagccgccgccaccgccatccgcggcacaatctcgtctcccgccgatctctgagtcaatacacgtgagccccctctgacgaggggctgtcagtcgaagactgactgggggagagatccccgaaaggaaaattgttatggaaaaactcaccacactgaccggcgtgggcgtgccgctgcgccgctccaacgtcgataccgaccagatcattcccgctgtgttcttgaagcgcgtgaccaagtccggcttcgatgacgccctgttctacgcatggcgccgagacccgaacttcgtgctcaacaagccggaatacgccggtaagggccagattctggtcgccggccccgaattcggcatcggctcctcccgcgagcacgccgtgtgggcgctgcacgattacggtttccgcgtggtcatcgcgccgagcttcgccgacatcttctacggcaacaccgccaagaacggcgtgctggccgcgattatgccgcaggagtccgtcgaactcctgtggaagctactggaggaagagcctggtcgtgagatgactgtctcgctggagacccgcactgtcacttgcggcgacgtgaccctgccgttcgaggtcaacgattacgtgcgttggcgtctgatgaacggctacgacgatatcgatctgacgctgcagcacgaggacgacatcgccgcctacgaaaagatgcgcgccgaaaagttccccttcaagcccaagaccatccccgccaaacactgggccgaagaaagaatcgagtccgcccgcgagcctgaggacgcagactggacagggccgttggccgatcgcggcattatttagccgcgatcggcctgctgaaagcccggtgggctttcagcaggccctgtgccgagccgcgacagcagcgaggccagcattgagcctcgccgaaaggcgagtccataattgcaggcccagggccgttggctctgtgtctgattgagattattgggtcgctcgcatcgcatcaaacaaaggtctcactggtgcccgcgccccacatccattgcgcggcgggcaggagttgcggcaatattcccttcagtgccaacaacgccatacggtcgttatccaccgcagccaccaacaccggcgtggcggcgctttcctcaacactcatgaactccgtcctagcgttcgaaatactgtgcctgaattcgtacacatttgtggacataatcacgattcatccagtaatgacggttaggttgagcatcatgaccatgaatgacatgaatccgtcgaacgattccgatacggctccggcgcaatcgctgtcagcgcaaccgttgccacctcgaccggcaccgcagtctgcggcacagtcacagacgccgatgccacagacgccacagtatgttcagcctgggccgagcatgcagccgcaatatgcgggtcagccggaggcatgggcacaaccgctacctccacaagatgtttcacggggtgttccacggattgtttcacaaggtgtttcacaacctgtgccgcaagccgcaatacctgctgtgcagcctgcacaatacgccgcgcagctcgtatacccgacatatcccgtccaacctacgtatcctgcccagccgatgtatcccacgcagccgacgtatccggcgcaatccgcctattccccatacccggcgcaacagtcggctccacagcccctcgctcatccgtactacgctcaaccagtgggctacgcgccacaaccctattccgctgcgccgcaaccattcgtgcaaacggctccggcaatgccagtcacaatgcccaacgcaatgcccaacgcaatgcctgccacgatgcccgcagcaatgcccgtggtcatgccgatcgatcctcgccgtgtatggcgcacgtggcgtcgcaaggtggtcaatcgtgtaatgggactgactctcgcctatgaaggcatgatgctcttgggcgcaatggtcgccaccattatcgtcggcgtaataaccgcgagcgatttgtccggcgtgcagtgggatggcatcatcagcctgatatcggtgttcgtcgcgttcggatttctgctgctcatgcgccaccgtgacatcttcacctgcgaattctggcttggtggccagcatcgcgactcgtacggggagcccaatcagcttggccacatcagccaatatggcggcgggcgcatgcagcctctctgggcgttgatgttcatcgtgctgggcatgggcgtgcaaggcatcgttatgttggtgcaggtcgctttttccaggctgggcaccgatcttgcctctcccacgtcagacagcatcgccgaatccagcgtcaccgtaagcatgtggctgtacgttgggctggtcgctccgatttgcgaggaagtactgttccgcggcgtactgatgaaggagctcaagccgttgggcaagaacttcgccatcgtcacctcggcaatggtgttcggcctgttccatgacgacgtagtgcaaggcacattcgcgttcctctttggcctgattctgggattcgtggccatggaatactcgttggtttggtcgattgcactgcacatcttcaacaatgcgattctttccggcgccatcgatacccttgccggcaactatcttgatgacaacgcatatttgatattctcattgtcgctatctgtgatcggcgtgatcggatcgactatcatattcgtgatatacggcaaagagatgcgccaatatcaccgtacgaatcgtagtattccagacacgtactttggctgggcagctccgacgttcatcatctttgtggtagccaatgccgctttcgccattatttcgtttgtcggcgcgatgatgggttgagtgtgcgtgtgcgcatgcaggttggcttatcgttgaagcatgagtgattttgagccgttttacgatgtcagccgcagttacgaagacaactatgagcaagggccgttcggcgcgttcgccgaggcgctgaaggatggcaacggtgccgatgccgccggaaccaccagcgagggtgccttggccacctttttgggccagccggtcaacctgcctttcggcattcccgcaggcccgctgctcaacagccgtttcaccacggccgctttccacatgggtttcgatctggcgacctacaaaaccgtgcgttcgcgcgcctggggctgcaacccgttcccgaacgtgctcgccgtacaccccaagtcggcggacggttcactgacgccgggcagcgccgaactggacgaaggcgtgctggccgacaccaactatgaacagccgatttccatctccaacagcttcggtgtgccctcgcagagccctgacgtctggcagccggacatgcgcgccgccatcgaggccgccggtcccggtcaagtgctggtcccgagcttccaaggctcgcgtgtggagggcatgagcgaggaggaatacatcgccgaccatgccactaccgcccgcctggtcaaggagaccggtgccaagctcatggtgatgaacaccagctgccccaacgagggccacaaccgcctgctatgccacaatccgctgctcgtgggccgcatcaccgaggccgtgaagcaggagatcggcgacatcccgctgatggtcaagctcgcctacatccccagcgacgacgctctggagcttatggtgcgttccaccgtgggccacggcaccgtgcagggcttcagcaccatcaatacgatttccgccaaactggtcgatgccaatggcaatcaggccctgcccggcgcgggccgcgatcgctcaggcgtgtgcggcaatgcgattcgtggcgccggcctcgacatggtcgcccgtctggccgcgattcgtgaaaagctcgggctcgatttcgcgatcaacggcgtcggcggcgtggtctcgcccgccgactaccaggcgtaccgtgacgccggcgcggactcggtgatgtccgccaccggcgcgatgtgggacgccgaactggcccacaagatcaaggccagccggtaaatcggctccaaaaacaagcaacagcctgtacgggccgtgattcccagacgattcccagacagtgcccatgttgcattgaaactgttgctgttatatgtaatcacggccgaacaagctgcataacttaacctctttcttcttctctcctttctctccccggcgcccatcacgccggggtttcttttttgcggtgggtacagccgtcttactcggccgccgccttcatggccacggcgccgacgtagtagaccggcttgtcgaagttcggctggaacaggaagtccacgttggcgagctggtcgatggtgaagccggcctgaatcgccatggaaatcacgtttgccgcgccggagatatcggccttggaacagaactggccgcccttgaccttgcgggtttccgggtcccaggtcagaatcgacgtgactggggtggtggtgagcatgaagtccgggcgataatcctcggtgagcgaggtctcgcggaccgtgagcccgcggcgttcggcaccggcgcgggtcaggccggaggcggcgagcgagagatcgtacagctgcacggcggacgtggcctgcgtgcccatgtacttcacggtcggcgtctcgatgttgcggcccaccagcaggccctggcgcaccgcgttggtggccagcggaatgtaatcgtgctggccggtggggttgtagaacacggtggcggagtcgccggcggcgtacacgcccggcgcggacgcctgcatgtagtcgtcgaccacgatcgcgccgttcggcagcatgtccaccttgcccttgagcaggtcggtgttcggcaggaagccgacggccagaatcgccatttcggccgtgtactcgcccttttcggtgaccacagtgacggtgtcgtcgtcattgtcgcggaactcgaccaccttctggccgagcgcgagcgtgacgccgtgctcctcgaacgcggccgccacctgatcggtgatggtcttatcgaaattattggccagcgggcgatcaaggccgtcgaccagcgtggtcttgacgccggtgacgctgaactgctcggcgatttccgcgccgatatagcccgacccgatcaccactgccgacttggcggttttcgccttttccttgatggcgatggcgtgatcccagttcttgcacagcagcacatgcgggctgtcgatgccggggatcggcgggatgaccgggcgcgagccggtggtcacgaccagtttgtcgaaagcgagggtctgttcggcggggtctccggcctcgtccagcgcgcggtaggtgagggttctggcgtcgaggtccacggacgtcacgtcggtgcgcatatgcatggtcgcgccggcttcggccagagcggcaggggaggagtagaacattttcttcgggtcggatacgtggtcgcccacccacagggcgatgccgcaggagaggaaggacagcgtaccgttgcgctcgaaaacatggacggtccaatcggggtgctcggcgagaatcgaggtggtggcgaacgtgccggcgtgcgtgcagccgatgacggcgactgtggtcatgaatgctcctttgcttgtggccatggcgtctgatgccattgccctgaatcgtagcgtagaagtatggagaacaccgtggcggcaaatgtgaggaagatcacgttatcggtttgattcgacggggggtatgggatccgttgtgcacggtgatcaaagttcggctggggtgcatttcacggagtcggcacatggcttatggcaaactggacggtagcattttttgaatcttgattgattgaggagagtggcgtggctgagaatccggatgacgtgttgcatgtcgagggcggcaagcctttgaatggcacgatcaaggtgcgtggcgcgaagaacttcgtgagcaaggcgatggtcgccgcgttgctggcaccgggcaagtcggtgctgaagaacgtgccggagattcgtgacgtgcatgtggtgtccgatttgctacgtctgcacggcgtggacgtggatgtggacggtgcgaacggcattgtgaccatcgacgcctcgcgtgtgcagctggccgatgtggccgacgtggatacactgtccggttcgtcgcgcatcccgatcctgttctccggcccgctcgtgcaccgtttgggtgaagcgttcattcccgcgttgggcggctgcgcgattggcggacgtccgattgacttccatctggagacgctgcgcaagctgggcgccacggtggacaaggaacacaaggacggcatccacatcaccgcgcccaacggcctgcacggcgcgaagatccacctgccctacccgtcggtgggcgccaccgagcagactttactggcggccgtgctggccgagggcaagaccgaactgtcgggcgcggccactgagccggagatcatggatctggtgtgcgtgctgcagaagatgggcgcaatcatttctgtggacgttgatcgcaccttccgcatcgagggtgtcaaggaactgcaggggtacacgcacacgtcgctgacggatcgcatcgaggcggcgtcctgggcgtccgccgcgctcgccacgcacggtgacattttcgtcaagggtgccacccagccggagatgatcacgttcctcaacgtgttccgcaaggtgggcggcaaattcgaggtgacggacaagggcattcgtttctggcatccgggcggggacttgaagcccgtggcgatcgagacggacgtgcatcccgggttcatgaccgactggcagcagccgctcgtggtggccctgacccaggccaacggcctgtcgatagtgcacgagaccgtgtacgagaaccgtttcggcttcaccaagccgctggtcgagatgggtgccaccatccagttgtaccgcgagtgcctgggctcgctgccgtgccgtttccggcagcgcaactacaagcattccgccgtgatcttcggaccgaccccgctgaccggacgcgacatcgacgtgccggacctgcgtggtgggttcagccatctgatcgcggccttggccgcgtcaggcccctcggacgtgcacggcatcagcctgatcgaccgaggctacgccgacttccgcggcaaactcgaagcgttgggtgccgacttcgattaattcggccgttcctcggctcccctctctgaggggagccacaattttttacaacagcccgtccgcctcaagtgcggcggccatgcggtcgaagcattcctccagtagcgggtagggcatggcgaagttcatgcgtacgcaaccgcgcccgacctcgccgcattcacggccgtccgtcaacgccacattggccctcttgaagaaatagtcggccgggtcgtcaatgcccagtgacgagaaatccagccacgcgatatacgtgccctgcggctccacatagcgcaccttggcgaatctcgtgcgcatctgctcgttgaccagcgcgatattgcgctcgatatatgccatcacgccctcgaaccatgccgcgccgccgtcataggccgcagtggtggctatggcaccgatggtggccgtctggtgctcggaccattccgcgttcctcatccatagttccagatcgtccggattggtgagaatcacctgcgcgcacttggtgccgggaatgttgaacgacttcgaggctgaagtggaggtgaaagcctgcatggccgtctgccggttgattgaggcgaatggcacatgcgtgtggccttggtagacgaacggcgcgtgaatctcatcggagaatatacgcacgtcgtacttggcggccaggtcggacaatcgcagcatttcttcgcgcgtcaataccttgccgatcgggttgtgcgggttgcacagcacgaaggcatggcagccgttcgcgaacgcctgctcaatggcgtcgaaatcgaacagccattcatcattgcgcccgctgctctcgccggcgccctcgcacagcatcggaatctcaagaacctccacgccatacaggcgcggcacgctcaggaacggcatataggccggagtcggcaccacgatggagttgccggcgcgcacgatctcgcgcaggaacacttcgaacgcctccagcacgtccggcaccggacggatgcacgtcggatccacatcccagccgtatcgacgctgccatgcggcgcacgagcgggcgacctccttcttccacgggtcgggaatgtagccgagcgcgccacgttcggtggcctcttcgatggcttcggccacgcacggcgccagaccgtaatccatctcggcgatgaatgcgccgatgcagccggggtaacgggtccatttatccgaaccgacctgctccagatcttcgatggtcgtcacgtcgatgtgattggcatcaaagcaagaggcgccggcggttgcgttgctcacagtcgttgactggggaatgttgttcatgctcataacatgccattgttcccggtgcagaagggccgctcaacggtctggctccccgaaatcgtgatggcgttcgcaagcttgcttatcgctgtccgactacttggcactcaaatatttgagtgccgtgcgctcgagctcttcgagcaatgaaccgagcgcgggacgatggtcgccggcacgagtcacgatgccgacctcgcgcgccgcaaaatcgtcggcgatgggacaggccaccagatcgccttgcagattgatatgtgtatcgagcgccggcaccagcgagacgcccatgccaacctcgaccaggttctgcgtggcccagtaatcatccgtgcagtggcggatatccggcttgaatccggcacgggtggccagtttcaccaaatttgcgcggcaggtggggcagccggcgatccaatgctcgtctttggcggcggacagcggcacgggttcgccggtctcctcgaatcgtttggcgatgtcgctggagcggcggaccaacaatcgcatcggatcgtaacccagcgactggaaggtcagatcgtcgccgatgtgcaggaagttcgggatgctgctgtaccggaacacggcggcggcatcggccttgccttgggaaatcagaccgatcgcctccggcggctccatctgaatcaggctcagctcgatgtccgtgaacatactgagcttgaccacggtacgggccgcgatagtagagcagattgacggtggggccaccaaatgcaggtgagcaaaccgatgatgccgataatcctcgacctcacgggccgcccgctccagccgatcggcgatggcctcgccgtggcgggcgagcatcgaaccggtggcggtgagttccacaccatgcgaggtgcgttgcaccagagtcgaaccgcactgtgcctccagctttttgatctgctggctgatggccggctgcgaccaacccgtggccttggccgtggcggagaacgaaccatactgttcgatctgccacaacgtgaccaatgattgggggttgagcccggccatatgcacctctttcgcgcgtcgttccattatggccgccgacaatgaccggacgcggcatggtgtcgccatcgccggtatccttagaagaatgagccctgaagccttaagtgaactgatttccagcattgcccacaacctcgtcgccgccggccaggccggcgcgttgaccgacgagctgattccgcccgtcgacaagctcgccgtgatgcgcccgaaggaccgcgcgcatggcgactgggcctccaacatcgccatgcagctggccaagaaggccggcatgaagccgcgcgatctggccgagccgttcgccgccgcgctcgctgaagccgacggcatcgccaaggtcgaggtggcaggccccggcttcatcaacatcacgctcgactccgcctcggccgccgccgtggtggacaccgtactcgccgccggtgccgtgaccgacaccgacaagcatctcaacaaggtcaacgaatacggccgcaacgcccatctgggcggccagaccctgaatctcgagttcgtctccgccaaccccaccggtccgattcacatcggcggcactcgttgggctgccgtcggcgacgccatggcccgcgtgctcgaggccaacggtgccaaggtggtgcgcgaatattatttcaacgaccacggcgagcagatcaaccgtttcgccaagtcgctggtcgccgcttgggctgaggccaacaacctcggcgaggccggttaccagaccgaaaccccgtgcgacggctacaagggtgcctacatcaacgagatcgccgcccgtgttcaggccgacgccgagtccgacggcgtggacctgaccgcactggcccaccaagatcaaggcctcaacgacgacggtgaaccgctcggcgaggccgacaccgaagtgcgcgaggaattccgcaagcgcgctgtgccgatgatgttcgatgagattcagaagtccatgaaggacttccgcgtgaacttcgacgtctggttccatgagaacagcctgtacgccgacggcaaggtcgacgacgccatcgaagagctcaagtcccgcggcgacatcttcgacaaggacggcgccacttggtttgaatccaccaagcacggcgacgacaaggaccgtgtgatcatcaagtccaatggtgagttcgcctacttcgccgccgacatcgcctactactgggacaagcgacatcgcgccgaaaacccggctgacgtggccatctacatgcttggcgccgaccaccacggctacatcggccgcatgatggccatgtgcgcggccttcggcgacgagcccggcaagaacatgcagattctcatcggccagctggtcaacgtgatgaaggacggcaagcccgtgcgcatgtccaagcgcgccggcaacgtcgtgaccatcgacgacctggtctccgtggtcggcgtggacgccgcccgctactcgctggcccgctccgattacaaccagaacttcgacatcgacttggccctgctcgcctcgcacaccaacgacaacccggtgtactacgtgcagtacgcgcacgcccgctccaagaacgtggaccgcaacgcagccgccgccggcatcagctacgagggtgccgacctggccctgctcgacaccgaggccgacggcga

SEQ ID NO: 2634 - DNA, 6513 bp, Unknown
  R36_18m  MAG No. k141_819
gaactgtccgaattcgcccgtcggccgttgcctgaccgtgccgatcaggcggcgttctcccgcgccaccgcacttttggaggctgtggccggcaacccgcacaccccggtggccgatcgcgtgttcctcgccgacaccatgccgttcccgaacgtattggtcaaactctccgaagaccccgaaccgtccgtgcgccaagccgtggccgccaacggggatgacaagaattggctggtcggccgcctgaccaaggatccggtacctgcggtccgggatacggcgttgaaaaacaagcgcaccagctggaagatgcggcttgagggtgcgcaggaccccactgcggatgcggagacattggatttcttgggcgtacttggcaccgaatccgaagagggagcaccggcagtgctttcctcgatggtccgccgtgccgtggcgctgaaccccaatacgtccgaagcgatgcttgccaaattggccaacgacccctcggccgaggtgcggcacgccgtggaaagccgccgctaagcacactattgctgtgttttgccgtgcaaatttggccggcaatcaccccctgtccaccattgtgagcgctcacatctcactatgtgagggtaaaaagtacataatttggcggaatcatggcatttttcttacggtgtggcgcaatcaaacggcgttagactggggctatgagtgagattaccgagagtgaagagcgtctggcccgtccgttgattcgactggccaagttggtcggtgtcggcacgagttatgtgggcatgagccatgactaccacgagatagacgatgacgtcctgatcgaggtgctggcagcgctgggcatcgacgcctccagcgagaacgcccaactcatcgccatccgacgcattctgaacgagcgttactcccgattggtggcacccaccgtgctgcatatcgccggtagcgaggaccgggtgctggtgaacaccggcattctggacgtgccttcggcgagcatcacgctggagaacggcgagccatatcagggcaccgttgaagttggtcctggagatggatcccaggcctacgacttggatggcacgttcatttcgaatgcggctgtggtcattcccgccgatctgccgattggctaccatacgctgcacgtcaaggtcgccgaccgtgtgcaagacgccactttgatcagtgcacctgatcgcgtcgatctgcttgacccgatgaagggcggcagtctgtggggctggatggcccagctgtactcgattcgctcctccaactcctggggcgtgggcgattacgaggatctgaagaccatgctggtggacgccaagcagaagaccggtgccgacttcgtgctcatcaatccggtacatgccgccgagccggtgtccccgctcaccccgtcgccgtatctgccggtaagccgtcgcctgatcaacttcacgtacatccgccccgaggcgatcgccgaatatgccacgctcagcgcgggcgacaagaacgccgtcgacggactgcatgccgacaccgaaccgctgaacggtgattcccagctcatcgaccgtgacgccatgtggcgcagcaagatgcacgccctgtggattatcttcaaggccggccgtaccgccgaacgccaaagcgcgttcgaccaattcaaggcggactgcggttccgacttggaggcgtatgccacgtggtgcctgtgctacgacaagtggggagcacccaacggcgaggagagcaactgggagcgcaagttcaaccgcaactccccggaaatcgccaatctgcgcaagcagtacccggacactttggacttctaccgctggctggaatggattgccgccgagcagctgtcctccgcccagcaggcagccaaggacgccggcatgcatatcggcatcatgtccgatatggccgtcggcgtgcacccctccggcgctgacgtgtggtggaatcccgagcgcttcgccaagggagccacggtcggtgcaccgccggacatgttcaaccagcaaggccagaactggagccagccgccgctgagcccgatcaatctggaggccaccggctacgagacctaccgcaatatggtgcatggcatgttcgcccgtgccggtgcggtgcgcatcgaccacattctcggcctgttccgcctgtggtggattcccgagaaccggtcggctatggatggcgcttatgtgtactacgactcagacatcatgctgggcgttctggccatcgaggcctctcgcgccggcggcgtggtcgtaggtgaggacctcggcgtggtgccggaccatgtggccgattccctgtcgagccacggtattctcggttgcgccgttgaatggttcgaacagtgcgacggcgtgttccgcgccccctcccagtggcgtccgtacgcattggcctccgtgaatacgcacgatttgccgccgaccgccggttacctggaatacgagcacgtcaagattcgtgagcgtctgggcttgctgaccggcccggctgaggaattcgaagcctccgcaaaggccgagcaggatgcgatgctggtcatgctggtcgagcagggctatcttgatgccgacttcgccgaacatcgtgaggatcacgaggcggatatcatcgacgcgctgtaccgcgcactgaagggttcgccgtgcaagctgctcgccgcctcgatcaccgacgcggtgggggagaagcgcgcgcagaaccagccgggcaccaacaacgaatacccgaactggcgcatcccactggccgacgccaagggcaacgtggtaccgctcgaaaccctcttcgactcccccggtgcccaacgcttcgcccaaatcttcaattcctgacccgctttacctccctctgacgagccgagtcgttaagcggacagtccagtggactgtccgtagacgaggcctgaaagaagcgatagctgagagaaggcagggaattgcctcaccgtaggtgagtcggttagccgaagtgggtgggagagaaaccataaataggggaagagaagccataaacccaatggagtgtccccagttgccctatgtcaagcccggcgatatactagtggattgttgtgtttccctaaggggtccttcaaagcgctatcccactcgccatcgaggactttcagggagcccacggataatgaggttcgatgcctcttggatgcggccctgaccaagccacgccaagcagctgagacccggaacacaatatagaaaaggtaatccagtgaaaactttcactccgaagccagctgatctgactcatgactggtatgtcatcgacgccaccgacgtggtgctcggccgtctcgccacccaggctgcaatcctgctgcgcggcaagaacaagccgacctacgctccgcacgccgattccggcaaccacgtgatcatcatcaatgccgacaagattgctctgactggcaacaagatgggcaaggaactctactcgcactccggtcgtcccggtggtctgcgtcgtgactcctacgccgagctgctcgagaagaaccccgagcgcatcatcaagaacgctgtcaagggcatgctgccgaagaaccgtctggccaaggtgcagctcgaccgtctgcgtgtcttccgcggcgccgagcacccgcacaccccgcagaagccccaggtcttcgagatcgcccaggtctcgcagcaggccaagtgaaacctgagaggagataagaatcatggctgaaaacaccaacgactcccaggttgtcgagaccgaagaggagctcaccaactacaccaccgagaccaacgctggcgctggcaccggcacctccgcgatcgagccgggctacggcaccggtcgccgcaaggaggctgtcgcccgtgtccgtctggttccgggtgacggcaagtggaccatcaacggccgcaccctggaggagtacttcccctccaagctgctgcagcgtgaggtcaactctccgattgttctgctcaagctcgaaggcaagttcgacgctatcgtcctcgttgacggcggcggcaccaccggccaggccggcgctatccgcctcggcgttgcccgcgctctgaacgccatcgatcgtgatgccaaccgcgccgccctgaagaaggctggcttcctgacccgcgacgctcgcgtcgtggagcgcaagaaggctggtctgcacaaggcacgtcgcgccccgcagttctccaagcgttaatttcgcttgtcctgtaccgagcatgcaaaggctctccgtggaattccgcggagagcctttgtgtttgtgtcgtgctgttttgagtgtgactcacacctgtttcatcagcgtgatgctcagcgccggcatggtccagacattgtcgtcgacgggagtgtccggcgtatcatccacaggggcatcaggcatatcagctgatacctcatcccgaggcgcggacgaggtgccgtttgcggcgtgatccgttgctggcatcgcgaattcgatggtatccgcttcatcctcagtcgaggattccgtgcgctgcatggccacttcttcgaccagcgtgcgtaccgtctcgctggcgtccggtacatgctgcgtccaaacggtggtgtcatcgttcaaatcgcattcctcgacctgaatgccatgcccggctcggcggccgttgatttcggccgagcaccatttaggcgtccagtgagtgtctggcggcaggcggaatgtgcggtcgtctgcggtgccgttgaccacaatgcacacgtccacctcactgttggacagcaatcgcatggtgaagctacgtacgcccagatcgaaccagtcacgctccatcggcgtggtgccgtcgggcaggaaccactgcacgcggcttgagggcttgagtaggccgagttgggtcagtcgggtgaagaagtcctcgtggtgatacaggtccagtgatttacgtagcgccaccagtcgagacacggttttcaggcgacgcatttcgcgtgtcttgttggtggaatacatccaatcccacttcagccacgtgatgtcgttgtcttggcagtaggcgttgttgttgccgtcctgcgtgttgcggaattcgtcgccggcgagcatcatcggcgtacccagcgagagcagcagcatgccgatcatgttcatggccgcctgttcgcgtgccgtgatgacgtctggatcatcggtgacgccttcgacgccgaaattggcggaatggttcaccgacgagccatcattattgttctcgccgttggcttcattgtgcttggagcggtatctggtgaggtccgtcagcgtgaaaccgtcgtggcaggacacgaaattgatggaggccggagcgccgcgcccgggttcggtggcgaacagatcggccgagccgcagagtcgcgtggccatctcctgcaaactgatacgaccgaaatcggagccgccatccacatcctcaagccagaaggtgcgggccgtgtcgcggaagcggtcattccattcggcgaacggcacggagaattggccggtgcgccagccgaggttgcccagatcccacggctccataatgagcttcaggttgcccagcagcagatcggaacgcagggcgtagaggaacgggtgatgatgggtgaattcgccttccaggcgggccagcgtgacgccaaggtcgaaacggaaaccgtctatgccgatacgcttggcccagtatcgtaatgagtcgatggcaaaggtgaccacatgcgtgttggtgaagtccagcgtattgccgcaaccggtggtgtcttcgagtcgaccggtattggatttttgatggcgatagtaggccaggtcgtcgaggccgcgccagcagaccgtcgggccttcgacgccgccttcgcatgtgtggttgtagaccacgtccatgatgacttcgaagccggcctcgtgcagcgcgcgcaccatgtctatgacttcttggcgcacggcggccgcgcccttctcttgggctgctttggtggcataggagggttcgggggcgaagtagctgagggtggagtagccccagtagttcttgtggccgtgttcttgcaggaagagctcgtcctgcttggccataatcggcagcagttcgatggaggtgatgcccaatccctgcagataggcgagcgttgtggggtgggcgagtccggcgtaggtgccacgcaacgctttgggcagccacggcgcgttggcggtgaagcctttgacatgcatctcgtagatgacggttttgcgccacggcacatgcgggtgctgcgggtcgccctcatgcttatggatatcgcgatcgtcgatggccacggataccggcacatggccgagcgagtctacggtgctcatggcaccgtatgccgagccggttaccttgtggtccacgacatcgcattcataggagaaggcggcgggggtgagctccatggagccgtcgatgcccttgccatacgggtcaagcaggaatttgtatggattgaagcgcacgccgtgtttcgggtcccatgcgccgtccacgc

SEQ ID NO: 2635 - DNA, 5623 bp, Unknown
  R36_18m  MAG No. k141_834
gataattactgcttattcaatgatatattcatccattgttttcgccgatatatcgcaccagcgtttccctcattatcaactatttcgagttgcatgaatgcgccgtttataggccaagaatttcgtgcttttttgcatcaaattcttcttgggagagaatgccgatatcaaccaattccttcaatttcttcatcgcctcgacttgttcttccacagacatggatgccgtgtgagaggcgggagcagcggcttccggcgccggcgcaggcgccggcgcttgaaccggggcggccgtcataggattaatggcttgtgccatattcatgcccagcaacatgccaccatcgccaaagccgttgtcttggatgccttgcgcaatgcgctgctgggcagccatattgccagcttgctgggaaacgccctcgtatgcggcaacattcatcttattcgaggcgaactgctgcacgagttgacgtgattgctcggtgaactcgatactttcgatgcccacactggacacttcaaagccaaaacgatcattccacgtacccgcattggcccgatcgccacgcacgcatgccgcgatgtcattcgtcttgccgggcaattgcgaaatacgatattcattggacaacgaattgatggccacaataaacgactgtacgaattcggacagaatctgcctacgtggcccttcatcatcgaatgaatacgacacggtagtggcaggcacaaagttacgaacgaatcgaactggatcagtgacctttagcgacatggatccgcgtgcgcgaatttccaaatcgacgccatagaaccggtcgttatacaccagcggcgcagaagtgccgaatttgatgccacgaatctcacgcaggttgacgaaggccacatatttggtgcggccaggctgacctccgaaggtgaatcgatcggcaacctgattgaagaacgatccgatgccgtctccggcgagcacgctctgctccccgttgcgatattcataaccgcccgactcggtgatgacgttttcgatacctgtttcagagaaaatgaacgccgcagtattctctggcacatagatacgcgaaccattggtgattattccctcggaaccgtattcattcgaaccgcgatcgttgttgcttccgcggggaatgcccggcacaacgacggtgtgttccgtgaacggaccagcggtgatgatatcacgccacaggtccgcgaatgtaccgccgagcgcgccggcgaacgccttaataactgccatctgttttttcctcgatatctcatgcatatggccgatcttgcgactatgcaatcgcaagaccggccgttatgctggcatgttggttatagctgcgtttcgcgatcgcagtattcgcatcgaacgacttctttgcgatgaccggaaagcggagcgccacaaccttcgcaattcaccgaaaccacgggttcggtaataccaagcccactacggaatgcgccaaaagtgtccttcagcgccccggccagagcctccgttccggggatggccttgttgaaggccggctcatccattggcgtatactgtctgccgcgtatacccatataccgtcatcgttcctttcttggaaaaccgttacctcgatacgccagtctgatcactggcccaccgatgcgagcttctgcatgcatcgagtcatgacctcggtgtagtaggccgaatcctcactgctgagggagttttcgtcaatggcgtctaccttctgggagaactcagagtaacgcttcatcatgctggcatagtcggtagccatgctgaccacgttgtcggatttctgatatttgttcatgaaggcaacatactcatcgataaaggcctcgtagctgtccatcgtggccttgaagtcagcactgtcattggtgttctgctgcgccttctgatccgaagactggtcgctctgcttgttggcatcgctggaatcagtgcccgtatcagtgctcttatcatcctgcttcgcggcgtcgccgtccgtagacgtatcttccttcttttccggaacctggatagtgatggacatgatggtctcgtcgtcagtgttacgagaaacgctcacactgtatccatcggcgttcttggcattgaaactgtcagcggacttgctatagtccacggtgaaaccgttgtcttgcacggacttgacgtagtcggcatactgcttggcgtcggtaccgcacacctcgatggagaagtagtccgaagactcgcttctaatttcaccctttgtggatttcggctgcggcagcagcgccgcgatatccgactccggccatgaatatgcttcgcacttggtggcgagcgatgcttccaattccgcccgatcagccttggccttcgcaccgtcacgaattacgaacacgccaccgattaccagacccacaacggtgataccgactgccacccaggccagcactcggccttgcaccttgccactcgggcgggtcacgtatacggcgaagcctgagagcagtgccggaatcaccgtggcgaacagcagtccgccccaggatcggccagaaacatccacaaattgggcgagtacgaacaacactccccaaataatggcgaacacagccagcttggaagtcttcttcaccccttgtgcattcggagcaagcacggcaggcgcagcggcaccagcaaaaccagtggcagcaccggcaccatgtgtggcgggtgcaggagccacaccaatacgcttgtccagagcggcgaggaactcatcaacgcgcttggcgctttcgtttccagtcgcctccagacgaatggcggcccctgccgcaccctgcgggactacggttagcgtgcagttcaccccatcataggagtggaaggaaaacgctccggtctgggtgttttcgttatccaaggtaaacgtggcgccagtagtcagctggtcgtgaataacttggaacagctgttgcggactgaccgcatatacacgatcaaatggcgcgccggcgggccgctgcgatcccgtagccggagtcatcggagtggtggtagcaccatcagacgctacgttcggttggccagccggtacagtattcggcacggtaggcgcattcgcgcgatcttccggtgcgtcattcgtgccttcggacggtggaaccggctgaggttgttgatcaaatggcgttgtcatgatgcccttctttccttaagcagcagcattaccagcacagaagaggcaagcccggcaaccgttacggtcaatccgactgccatggcaagccggtatcgttcgctcatcattgcgtcccttcttattgctcgctttgctctgcgatacatcgaaaccagtgtatggcgttgttattatgtacgcaaattagcattttgtatgcctgttagctttattgtcgatgcttgataccgcgcatgaacatcctttccgccaccgcacctacacggatggcatcgaccattgtcggcgacacgcgcgggccatacatcagctgacaactgaatttttcggcgtgtttccgaaaagtcggcgtcctgtacgctgggaatcgagcaaccgcgtacgatggcgcagcacagcacccgcaacacagcgacaaggagcatgggcaatggcagacatccccgaagaacatttgaccgaggaactgttggatcggctgctcgccagcgccagcattgagcagtatctcgatgagggactcgtcagcgcacgcacgctgaccgactatctgttcgaccgtatggaagcccatgacctgagacgagccgacgtggtgcgggcatccggcctcaacgccacagtggtttatgacattttctccggcaaaagccgccccggccgagatcacgccattatgctggcttttggtctcaagtgcacattacgtgaaacccaacggctacttcgtcttgcaggcgtttccgaactgtggtgcaaacagcgacgcgacgcgattatcatctggtgtatacgcaatggattcgaccgcattgccacggacgacgagttgtatcgtatgggagaggcgacgttgctaccggccgattgacgacattcggcccaacaacactcaccagtgagacgcaagtaagagggcatcaaggagagacatggacgataagcaggcgatgcatgcgatgagcatcgacgatgcgtaccatgtcgagcgtacgctcgctcgcggaccttccggcgtcaccgaactggtgagcattgacggcaacggcccgttcgtacgcaagaagattccctctcccctagcgcaacgcaatgtgtgggcggcgctcagcgcctgccagagtaatcgtctgccgcgtgtggaagcgacgtacgagctgcccgaccggttcgtcatcgtctacgattacgtgccgggcagcacgcttgcgcaaattgcggaggaaaacgggcggcttgcaccgaatgtggccgtgcagcttatcgaccaaatttgcgaagccgtgcaggagcttcaccagcacggcgttatccaccgcgacatcacgccggccaacgtcatcgtggcccaggatggcgcgcatctcatcgatttcggcatcgcgcgcatccggtcagaggcaagcaaccgttcacgggataccacggcgcttggcacctacggattcgcctcgcctgagcaatatggctttgccaaaaccgacgcgcgttccgacgtattctcgctgggccggctactcggattcatgctgaccggcgtatatcccgatgccagcgactacgagcagcgacttgccgatgatgccgcagtaccggcacgactgcgcgccgtcatcggctatgcgtgcgcattcgagcccagcaaacggccacagagcgtccaagagtttcgccaggcgctgttctcccagcccaatccgcccataccaaacgcatcatcggcaaatccgccatcaacgagaacaacgaacggcagcgcgtcggcgtctcgactattccggcgtctgcacttgagcaaacgcgccatcgtgctgtggtccattgccggagcggcactgataatcgccgccattgcgggaggcattgtgttggcaggccaacttggcattatcgggtcggcaacatcacccgattcctcgacacaatccagcagccaatcaaccgataaggccgatggcgggcactcctcgaacgggtcaggaaccgacaatgccaatggcacgggcggagtaggcggcactgacggcgctgatggagacaatcgagacaccgtcaccgacaatcctctgaaaatagtggaatccggctggtcggcggaccagcaagggtatgtccactacgctttcgccctgcgcaacaccagtaagacccagcaggtgcagtatccgcagattaccattacggggcgggccaaagacggttccatcgtgttctcgcagacgcaagcactgaatatggcattcccgaatcagactgtatatgacgccggtcaagcaggcgaaggcaccgccccagaaacggttgattttactgtgctcaatccggatacatacaacgtcgccaaggctcagggaaccgccgccttccccatcagtggaatatccaaaatagacaacagggacggcggcacgacgttcaatggcgaggtccgc

SEQ ID NO: 2636 - DNA, 20744 bp, Unknown
  R36_18m  MAG No. k141_854
cgcgctggcctcgggtgcgggtgtcgttgcctgctcttcgggcgcagcggtgtttacgggttcggtgacagtttcgtcggccatggccagctccttaaagcgtagaatgcataagcgggagcgtctcccatcccgggcgaaccaggaagttttgacgcaaccctcacctattatattgatttcgtggctaaaggtgcatcaatatcaggattcccggagtggctcccctccgaacgtgttgtggagcagcgtgttatcgatacgcttcgtaaggtttttgagctcaacggcttcatcggcattgagacgcgagcggtggaaaccggcgcttctttgctgaaaaagggcgagaccagcaaggagatctacctgctgagccgtttgcaggaggtcggtcatgaatccgacactccgattgaagagcgtttgggcctgcatttcgatctgaccgtgccgctgagccggtatgtggtcgagcactcgggtgcgttggcgttcccgttcaagcgctggcagattcagaaggtgtggcgtggcgagcgtccgcaggaaggccgcttccgcgagttcgtgcaggccgacatcgacgtgatcggcgccggcgacctgcccgaccactatgaagtggaactgccgctggtcatggtctccgcgctggaagagctgcgcgcgtatggcctccccaaggccaccgtgcacgccaataaccgcaagctgtctgaaggcttctaccgcggccttggcctgacggacgtcgaaggcgtgctgcgcgagatcgacaagctcgacaaaatcggtgccgatgaggtggcccgactgctcaccgagacctgcggcgccaccgaagcacaggcacgcgcctgcctcgaattggccgagctcaccgcctccgacggtgctgagcttgccgccaagttcgatgcgctgtgcgagtctcacggcatcgccaaggattccgaggcatacacgctggctcgtcagggacttgataccctggccatgatcgtcgacgaggccgccgccatccgccccggttccgtcatcgccgacctgaagatcgcccgcggtctcgactactacaccggttccgtctacgagaccttcctcgacggtgccgcatcactcggttccatctgttccggtggccgttacgacaatctcgcctcccagggcaaccgcaagtacccgggcgtgggcctgtccatcggcctgagccgactggtcagctacatgctgcacgctgccggcgcgcacgccaaccgcgtcagcccggccgccgtgctggtcgctgtgtggaatgaagaggaccgcccggccgccaaccgtattgcgaaccaactgcgtgcgcgcggcatcgccaccgacgtggcacccaccgcggccaagctcggcaagcagatcaagtacgcggacaaactcggcattccgtacgtgtggttcccggccaccgctgccgaaggtgcggaaggcgcagagcccgctggcgacgaggtcaagaacatcgtcacgggcgagcaggttgccgccgattgcacgtcgtgggagccggatactgtggttgcccagcaaaccgtcgaaatctgacgtattcgcgcgaaaaatcgaggagaaacaagacaatgagccagacggcttacagaacacatcatgccactgaagtgaccgaggccctggtcggccagaaggtcaccctcgccggttgggttgaccgacgccgtgatcacggtggcgtggccttcatcgaccttcgtgattcgaccggcctcgtgcaggtcgtcatttacgacgaggatatggcccgcccgctgcgcagtgaattcgtgattcagattaccggcgaagtgcgcctgcgcccggatggcaacgagaacacccatctggccaccggcaagatcgaggttgtggccgagaccattgagatcctcgccaagtccgacgccctgccgttccaggtttccaccgctctcgagaatgagtccgagaacaagctgccgggcgaggacgtgcgtctgaagtaccgttacctcgacctacgccgtccgtccatgcagcacaatctgaagctgcgttccgacatggctaaggccgcccgccacgcgctggaagacatggacttcaccgaggtcgagaccccgaccttcatcaagtccaccccggaaggcgcccgcgacttcgtggtgccggcccgtctggtgcccggttcctggtacgccctgccgcagtccccgcagctcctcaagcagctgctcatggtctccggtgtcgagcgttactaccagctcgcccgctgctaccgtgacgaggacttccgcgccgaccgtcagcccgagttcactcagctcgatatggagatggcctacgtggaccaggaagatgtgatggccatgactgagaaggtcatcgccgccatctggaagtccgccggctatgaggtccagctgccgctaccgcgcatcacctggaaggatgcgatggacaagtacggctccgacaagccggacctgcgcttcggcaacccgctggtggaactgaccgagtacttcaagaacacgccgttccgcgtgttccaggccccgtacgtgggtgccgtggtcttcaagggcggtgccgccacgccgcgtcgtcagttcgacgcttggcaggattgggctcgtcagcgtggagccaagggccttgcctacgtggtcttcggcgaaaacggcgagctcaagggccccgtcgccaagaacctatccgatgaggagcgcaacggcctacgcgaggccgtcggtgccgaggaaggcgacgccgtcttcttcgccgccggttctcgcgagtccgcccagctgctgctgggtgccgtgcgtgtggagctcgcctcccgcgaaggcctgctggatccgaagaagttcgctttcacttgggtcgtggacttcccgctgttcaagcccaccgacgatccggatgatgacgatgtggctgtcggccactccaagtggacctccatgcaccacccgttcaccatgccctccaaggattggatcgacaagttcgacaaggatcccgagcacgccatgtccgattcctacgacattgtctgcaacggtgaggagatgggcggcggttccgtacgtatccaccgcgacgacatccaagcccgtgtgctcgatgtgctgggcatcaccaaggaagaggccgacgagaagttcggcttcctgcttgaggcattcaagtacggcgctccgcctcacgcgggtctggccctcggttgggaccgcaccgtgtccatcctggccggtgcagactccatccgcgacgtcatcgccttcccgaaggccggcggcggccgcgacccgctgaccggtgctccggccccgatttccgacgagcagcgcgccgagaccggcgtcgactacgacccggacgccgacgaaaactaatctacggagcgtataccgcctttcctcagcactcgacgcaccttagtgcgccttcggcttcgaacggcggtctccgcatgcgtagattaattttcgaggagtaatgctccggtgctattagccgcaaatggcccttggaataattccaagggccatttgctttttgcgggtggggcccaatgtgccaaatacctgccaaggggtgccaaatactccgcccgatggcacctccgccatgcggcaaacctcgcaccatgcggtgtcccccttggcgtttgccgattatccccccatggggcggtaacttcctcatggggcggtaaacaacccatggggcggtgaaaaccccatggggcggtaggtcaaaatggcttaattccgcggtttcacaatttcttcaaaccgccccatgggcaaattaccgccccatgaggagcgatcgcaactccgtatttgattaatgttgtgaggctttgttgtgttttgcttgtttccgcctcctgtattcccctttgcgcgcattgatggtaaggctgccgtctattaatacccggcatgaaggttgaggacggccaggaagcggtatttgcatcgcggtggcaacctcttgtgcgaaggcacgttgtttggcggtattccacaggtcatcggcgaacacctcgatgacggtccagcccaattgccgcagacgtcgacgtttttgctggtcccgcacatattgtttgcggaagcgacggtgatgatcgccatcatattcaatagcgactttgtattgtggataagccatgtcaacggtgtaggtgtatccgttctctgaatcggtaatgccatattgtgtttgcggtaggggcaggccgaaaagcataagcgccaagcgtgtacgagtttcctgaacggaatccgatggttttacgagcttcagcgccgcctcacaacgcgcacggccaataacgcggtgaaaggccgttagtcgttgagtgaattgttcaatggcatatccataacgtctgatgagcgcttcagccagcaccactaattcagtgaggttgagatattgggcaaactgtatccacgcatccatgggatgcatgcaggttacgccgtttgagaaagcgatactgttgaactttgcattccatatgcgatagtcgacattgtccaatgaagagcgggtccccttgctcctcaccgtcacataaaaatccttctgcggcaacgtgctgtgcctcggcaactccacgccgcataattccaatgcggtatacagcgagaaacacaacgtgcgtttcgtgcgcactttgcccagcagattccaacaggccgtgttcttggccgtggctttggcgtcaagatctttgcgcagatagttgttgatttcgccattgtgcggcgcttcgctgtatccgttcatgcgccgagcgtagcgcattccacggtggcacaggggcaaaaccgaaaaatggggataacttaagcggcgcgaaccggttatccaccggcatatcgtgtgccgcgcccggttatccaccgcgcttcgggagtgtcgtccaccgtataacagcactcatcgtgtgcgaacagctagccacgctcaaaatgcctagcgcatttatacgaatacgacatgggaaacggcgagaccagccccacacaatacaaagtgaccgccagccatgcgcccgactgcggcatacacggcagcaacgccaacgacaccaaggccaaacatggaatcagcagataggacaacacgtgcccgctttgccgtcgcagcaacgtctcagccaccacgcagcaggcaatcagcgcacagcagacgccgagcgatgcgcgactcagcgagaatgtatgccgatgcccaatgccgccatcacgatgtctgatgcggaaatgagacatcgactgagcaactgtgtggacatactgtgaacacgttggaaacgtcggtgtgttatcctcccactcatgtctgaaacgaacaatgaaacagcagtgcgttcgcgcacgacaagcacaacatcaccaagcaaggccaaattgaccccgctggttcccggcaaagaggacctgaaccgtccgctagtcgaactgacccacgtcgaaaagcacttcggtgctttgcacgtcctgaaggacatcaacctgaccgtcaccaagggtgaggtgctggtggtcgtgggcccgtccggctcaggcaagtccacgatgtgccgcaccatcaatcgcctcgagaccatcgattccggcgacatccgcatcgacggcaagcccctgccacaggaaggcaaggagctcgcgaacctcagggccgaagttggcatggtgttccagtcgttcaacctgttcgccaacaaaaccattcttgaaaacgtgacgttggccctcatcaaggtgcgtcacatggacaagaaggaagccgagcaactggccatggacctgctcgcccgcgtgggcgtcgactcccaagccagcaagatgccctcccagctctccggcggccagcagcagcgtgtggccatcgcccgcgcgctcgccatgcgccccaaggtcatgctgttcgacgagcccacctccgcactcgacccggaaatggtcaacgaagtgctcgacgtgatggtcgaactcgcgcatgaaggcatgacgatgatctgcgtgacccacgagatgggcttcgcgcgcaaggccgccgaccgcatcgtcttcatggcggacggccagattctcgaagagaacacgcccgacgagttcttcgagcatccgcagaccgaccgtgccaaggacttcctctcgaagatcctcacccactgacgaacccactgaaagacgggtacgcaatccaatgacattcaccaatacgttcaaacggaaggtttgccgcgtgatcgccgcgctcgccgccgtggcctgcacaatgtcgctggccgcctgcggcgcggacgaaaccggcaagatccgcatcggcatcaaattcgaccagcccggcctgggcttcaagaagtccggcacctacgtgggcttcgacgtggacgtggccaagtacatcgccaagaaactcggctattccgaagaccagatcatctggaaggaagctccctccaagcagcgtgaggccatgattcagaacggcgacgtggacatgatcctcgccacctactccatcaccgacgagcgcaagaaggccgtctccttcgccggcccgtacttcgtggccggacaggatctgctcgtgcgcaaggacgacaactccatcaacggccccgaagacctgaacggcaagcgcctatgctccgtcaccggttcgacctccgccgccaccgtcaaggagaagttcgcctccgaagtccagcttatggaacagcccggttacgccgaatgcgccactgccctgttctccggcatcgtggacgcggtaaccaccgacgacatcatcctggccggcctggcctccgcctcgcgcggcaagctcaaggtggtcggcaaaccgttcacgcaggaacactacggcgtgggcatcaagaagggcgacacgcagctggccaccaaaatcaacaacgccatcgtggacatgattcaggacggctcgtgggagaacgccatcagcgataacaccaagggcaccaactacacgcccgacgtacgctacaacccgcccatcccggacgaaggagaggaggcctgatgagcggattcctggaactcttcagccagtatgacgtgctcggcgcgtttctggtcaatatcgaactgaccctatggtccgccctgttctccctgatcctcggcgtgatccttgtggtgatgcgcatctcgccgatttcctcgctcagggccgtggccggtgcgtatgtggaactgttcaagaacctgccgctgaccatcatcatggtgttcatggtgctgggtgcctacgcgcagctgaagctcagcttctccgacaccttcaccacgaacttcttctggctcgcggtcaccggcctgagcctgtacacggcggcgttcgtgtgcgaatctctgcgttcgggcatcaacaccgtgccgattggccaggccgaggccgcacgagcgctgggcttgggcttcatgcagtccgccaccgagatcattctgccgcaggccttccgaggctccgtggcaccgctcggcaacacgctgatcgccctgctcaagaactccaccgtggccgccgccgcatccgtggccaccgaaacatcctcgctgatgagcgagatgatcgaattccgtcccgacgtgatcatccaaatcttcctgatcttcgcgctcggctacgtgatcctgatcatccccatcggcatgctcaccacgtacctgtccaacaaactcgccgtaaggaggtgacggatatggccgatacttcgaattccgtgctgttcgacgcgccaggtcccaagggccggcgcaccattcgcatcgtcaactggatcgcgggcattctgttcgcggtggtgctcgtgtttatcctcatgcgcctgcacaacccgccggacggcgagaaccagctcagctgggagctgtggaagcccgccgtcgaacgagaggcgtggaccgacttctacctgcccggactgtggatgaccatcaaggccaccatcgtggccgtggtgggtgccgtggtgttcggcttggtgttcggcgtgggccgactgctgccgaacccgttggtacgtggcgtctccgccgtgatcgtcgagttctgccgtgcggttcccgtgctgctgctcatgatcttcttctggcgatggttcgcgttcgcgggcctgcccagcccgtcctattgggccgtggtgctggccttggtgctgtacaacggttcggtggtcgccgaactggtgcgctccggcgtcggcaatctgccgggcggccagcgtgaggcctcgctcgctttgggcctgaccgaaacgcagtcgctgatggagatcgaggtgccgcaggccgtctacgccatgctgccggccgccgtcacccagctggtcgtggtgttgaaggacaccgccctaggctcgatcatcatgtataccgacctgctgcaggaatcgcgccgactcggctcgatgtacttcaacatcctgcagacgctggtcatggctgcggtgatctacttcgtcgcctgctggctgttgtcgaggctcgccgaatggctgccttcgcgcatgcagcagcgcacggccgcgcccaccgaggccgagcccgtggcgccgatcgccgccggagacccgtccaatgtcaaccagatcgctgtggccaaggaagtcgaagagctgccgtttggtggtgcgccgcgcaaataccatgtgcatcaccgtggcaccaacgcctcgattcgcaactggcggcgcacccgctacgaacagggatatgacgccacccagcccgagtcacaggttgacccggaaaccggcgaattcccggcgttccgcaagtccgaagacgagtcagaggcctgacagtcagctcaatcgccgctaagccggcacgaagaatttactgagtgtttgactgggctccggctacgtagccttcacggaggataggttggaacatatgaagatgttccggcacctatcctccgtttttgctattgcgaccattgcgccgctggcgttggcggccacgctagccgtgacgcctgcaatcgcacaggccgaccagctgcccaacccggattgggtggcattgctctccgactacgaaaagaactattggcaggcccccaccgatgccgaacacggtggcaaggtgctcgacgccgatacaatgaaactcgacgaagatttggccgtggccattaaccacaaagccgccgaaaatctcgataaggatggcctgaacgcccaacgcaagcgtgcgctcgtcgactccgatctgcaagccgaggaagccatgccggacgcgctcggtccggtgcttggcaaatatatgagcgaagggctcaaatccgggaaactcaacgccgtcgccgatatcttctcctttaacgtggcctccacctacgcctcaaaacgtgcggccatgcatccgcgcccctatctgaaccgtgcggaaagcagctacggcggcactaacgatctcgccggactgcccgccacgcttgacatcaagcaatcaccctcatggctcgaacacgtgcccggctactcgaacttgcagaaaaacagttcctacccctccggccacactaccggcgcctattcgtggggtatcgcgctggccggcatgattcccgaactcgcgccgcaaatcatggcccgcacttcggaggccggcaacaaccgcatcgtgctcggcgtgcattatccgcttgacatcatgggcggtcgcattggcgcatccgcccagaacgggcagtactggcataacgaattcgcttcgtccatcgtgcccgcgtcccggcagctgcgggactatctggtgtcccgctgcgccgcggacggccacggcactaccctcgccgcctgcatcgccaacaccaaggcctccggttcgggcggctacaccaacgattttctggacccggtggccaccgagccggtcgcggaccaggcctcggccgtgcgcgtctacaccgcacgcctgacctacaccttcccgcaagacaccgcccagtccggcgctgatttcgtggcaccgcgcggggcggcggacgtgctgcgactggcctatcccgaactgcacgccgatcagcgcaacgcgattttgaaagccactgccttggattccggataccccctatggcaatcgagcgacggctggcagcgtatcaactgggccaaagccctgtgcgcccgcgtcaccttggataagcacggcgatgtggccaaggtcgagaccgccgaccaggtggcgcttaccggcccgagtgtggtcaatgcccagtacgccgacgcgggtaatcatccggcgtctgatggctcggcgggtgaaaacagcgccattgcggccgggccggatctcgccaccctccatgccgcgcaacgaccggcgttgatcagcgtagccatcggtaccgctgtaatcgcgattgtcggcggaatacggacggttcgacgcaaatccaagaaccagcttcagcggtaattcagccaaagttcagtttggagatctgccgagtttgccttcatacggtgtcggcttcatttctctctcatactctcggggtgtcatccgccgaagagcatcatgctgcggcggcacaacccgaggaaggaacgggagtaatgttccacaccaacaatttcaccgcgatgtcgcggcgcgccatcgcgctgctcaccgctgcggtgacactgagcagcatcgccctgatcggcgtgcccgctgcggctgcggacgagcagcaggccactgccgaacagaacacggctgccaaaccatccgtaatcatcaacgaggtctatgccggcaatacgaaagctgccggagacccggatagcaagcgttgcgattgggtcgagttcaagaacaccggctccacagacgttgacgtgaagggctggggcatctacgacagcggcaagaaagccaagaagcactacaccatcggcaccagcgaagtaacgaatacggacaccgtcatcaaagccggcggatatctggtggcatacatcgaccccgacaaggccgagcccggcctgggttccgatgccgacgaagcctatctgaccactaccagcggcgactttaccgatagcgatgtggtggattccacgtcatggaataccgatacaaccggcgtgaagaagatgagcgacagtcagtcgtggtcccgtaaggacgatggcactttcgcgctttccgatacgcccacgcccggtgcacagaacgtgttcgatgacccgactccgactccgcccgccggcgagaccatgaccgtggacgcatggtcgggattggccgatgtgaccacagtggatgccgaaggcgaatttggcgccaaaggacaaggcggcgaccacactgacggcaatctgtctggtctggtgtatgaagccggtaaagacggcaagcaaggcgtgctgtgggcggccgacaacgatctgaaccccacgctcggcaacaccgctgataagggccctggctccatcaacaagttcgtctaccagaacggcacatggcagcaggatcccactgatggctggaccttcaccaacaacggtcagaccaagggcggcaagcagctgcacttcaaggacggcaagggcggtgtggactccgaaggcatcacgctgatcaacggagattcatccaagggcatattcatcggcgccgagcgcgacaacgaaaacaagaatgtgccgcggccttccatcctgcagtatgacgtgaccgcgaaaaccaccgacgccaacggcgacggagcgcaagagctgaccgctacgcacgagtggaatctcaccgcagcactcacacaattcggcgtgacgctgggccacggagcggacgccaatcttggggtggaaggcatagcctttattcccgactcggtcctgaccgccaacggattccaatccaaccttgacccgaagaacgtaatgacctacgacccggacggtttcggcaatgatttcggcggtctgttcttcgccgcactggagaaaaccggtcatatctacgccttcgcactgcaaaccgtgaatgatgaggacctggtgcatccggtggccgacatcgacctgccgcagtccgcggtgaacaccggctatgatggcccgcgcgatctgacttgggacgccgagcacaaccagctgctcgcccaaagcgacaatgatgcgaacaccggtgccaaaatcggtacctacgagttcaagaacggtgtgctgcagctgaccaagctgaccgacactccggatgaaatccgtacgcagaacaccgaaggctttgccgtcacccctgataccgaagccaccaaggtagtaaatggcaaggtgtacaagccggtgttctgggcagacgacggcgtgaccaatggccattcattgcgtatgggctatatggcaaccaatcagccggttcccgccagcaccaccatcaatctgctgaacttcaacgatttccacggccgtatcgacaagaacctcaccgtgccgttcgccgccaccatcgagcagctcaagggcgaataccctgactcatcactgctgctgtccgccggcgatagtatcggtgcttcgctgttcaactcttctgtgcagcaggaccagccgaccatcgatgtgcttaacgctttgggcgtcaaggcttcggcggtgggcaaccacgagttcgatcaaggctatgccgaccttaccgatcgtgtgatcggcaaggagggcgcgcgcaacgcccaatgggattacctcggtgccaacgtgtacaagaagggcaccacaaccccggctctgcccgagtacagcattcaggaggtgaacggcgtgaaggtcggcatcatcggtgcggtcactcaggaaaccggcacgttggttgctcccggtggtgtcaaggacatcgaattcggcgatccggtggaagccgtgaaccgtgtgaccaagcaactcaccgacggcgacgaatccaatggcgaggctgacgtgattgtggccgaataccatgagggtgcagcctccaatgaagatgacgccacggccaagcccacgcttgacgagcagaaggccgccagccccgtattccagaagattgtggacgataccgatgcggcagtgaacgtgatcttcactgcacacacccacatgaagtactcgtacaccgatcccgcgcacaacaaccggccgatcatccagaccggtagctatgccgccaacatcggccaagtggtgctcacctacaacacggccaccggtgcggtgtcttacgacaagtccggtaacacggccgtgcaggtggcttcgcagcccgccgacaaaaatgatccgcactacaacgattacgccgaatacaacgatggcctgctcgccgccgcgaacccgactgtcgccaaggtgagggacatcgtgtaccaggctcttaaggtggccgatgaaaagggcggcgagaaggtcggcaaggtgtctgcggatatcaccaccgcattcaaggacggcaagcgtgacgaccgcgcctccgaatcgaccatgggcaatctggtggctgatgcgctgctcgattcgctcaaaggcgaggaccgcggcgcggccgaaatcggtgtggtcaaccccggcggtctgcgtgccgaattctgcaagtccggcaccaatgacgcctgcacgctcgatgccgacggcaatatcacctacgcccaggccaacgctgtactgccgttcctgaacaacctgtggaccaccacgcttaccggcgcgcagttcaaggaagcgctggaacagcagtggcagacgaacgcggacggcagcacgccatcgcgcgcgtatctgcaactcggactgtcccacaacgtgagctacacgtatgatccggatgccgcgcaaggccatcacatcacctcggtgaccgtcaacggtgagcctctggacctgaaacgcaactaccgtatcggttcgttcagcttcctgttggagggcggcgataacttccgcgccttcgcccaaggcacgaacaccaaggacaccggtctggtggaccgcgacgcctggatcgactatctcaaggacaacgatccggttgccccgcgctacgaccgccgtgcagtggccgtcaccggtatcccgaccggtgcggtcaaggccggtggctcgttcaccctgcacttctcgaagctcacgctcacctcgctgggcgtgcctgacgagacgaagctgaccgccaccatcggcgagcagatggtcggcgaagcacaggttgcgaatggcgataccgccgagctcaaggtcacgattcccgccggaaccaagaccggtgatataagcctgacagtgaccggtgcgaccaataagaccacggtcgctctgcccgttgccgttaccggagtgtccaccgggacggacgacaaggataacggcaaccatagcggtagcgtcaatgccaatggcagcaccaagccacagcagaccgaacatacggccaataccggtgcctcggttgcgttggttgtggttctggcgacgctgttcgctgcgggtggcgtcaccatcgtggtcaagcgtcatgatgcggcgcgcaagtagcgcttgaagccgcgtgcgctggtcggatgcttcagcatgatgccgacgatttgccggtcggtgatgatctctttctcgtagcagatcgtgccgtcttcctgatagctcaggtatgtttcgggccgtttgccgcttctttatgtactgcaaaacgggcgggggattggccgatagggacgagagagaacggagagagtatgaagtgccaggtttgcggaacggagatgccggagggaagccgattctgcacggaatgcggtgcgccgatggcacagtctgcgccaagcccaagtcctcagtcgatggatggcccaacgctggtaccggctgctccccagcaggtgccagcgagttcgatgccgttgcccccaagtttcaacacggcgaccgcacctacttcgacattgtcgacggcgccaggcaacggtggcgctgcgcagccgcgttccggtgggtctgccggaaagaagatattgctggggatcgtctgatccaggcgtgataagcggcagcaacgttacggatgacgaagccgaaaataatgcaagcaaggcattggattggcaggtcgagcacgacaaggactccgcagagctgttctattccacgtataccgcacagctgtccagcaagcgtaagggtatggaggctgaaggcaagacctggaactaccgcgatattcttgcgcaattcatcacgatgcacaacaagaattcaaacgtactgcttatctggtcgggtgactggcccgcctacagcagcaattccgacaaatactatgtgattcttgccggtgagggcttcgactcgacggatgaggcttggaattggtgcaaagccaacaattacggtccgaacgactgcatgcctatagatttgcagtaacaggcgaaatgtgaatgtcgctacgttgctaggtctcctgagttacaagacgtacaatcgggagcatgaccaaggacgacgacagaaccaacgagcctgaagaggccggcaagtggggtacggccggaaaatcctcaggaaagaacaacaagaacggcaagggaaaggaatccaaaaccgatcgacggatcgacaaggtattacagctcgcggtggatcgcatagacaccatcgactccagtgccagcgtgcctgaacgactggcgcgtgcggcgaaatccagtgaactgctcagcgccgtatggtcgttgccgcccgctcaacgtcttatgttccaccacggcatgcaggtcactgatgtcgaaggcgattccactcccggattcgacggcaataaagaggacgccgagaagttcatttcgatcagctcctccgaaatcgcccgataccagcggctcatgtacgcgaatggcgtcaaaggctcgacacggcggctgctcatcgtgctgcaaggcatggatgcctccggcaagggcggcattgtgcgtcacgtgttcagccaaggcgacccgatgggcatccattaccatggcttcggcaagcctacggccgaggagctcgaccacgacttcctctggcgtgtgaagcgtgaattgcccaagccggggtggattgccgtattcgaccgctcccattatgaagatgtggtcatgccgcacgtctatggcacctatcccgaagacgtatggcgtgcccgctacgaccagatcaacgatttcgaacgtgaactggccgccagcggatgcgccatcctcaagatcttcctcgtggtaagccaggaagaacagaaaaaacactttcttgggaggctggatgatcccaccaagttctggaaattcgatatctccgacctcgaggcccgcgaccgatgggatgagtacatgttcgcttggcaggaagtgttcgagaaaaccagcacggccgccgcaccgtggtacctcgttccggccgataaccgctggtattcgcgagccgtggtctccgaactgctgcgcaccaccttgaagaacatgaacatgacctggcctcccctcgaacccgaggtggaccccgacgaggtgcgccgccggttggcgtgagcgatcctcccattggcggagccaagcgcatggcacagctcttcgcatggctccgcccgctggcgggaggcgtcgcatagcgacggagggcggctcgtgccgtcggaataggccactaggtagactgagcattatgactgacgagaaggaatacggatccctggggcggctggcccccgaatgggacggcgacggacgcgaacggaatcttacggccgacgacatctacgaacggttcttcggctgggtggaagacgtcaagggcatcgagccgtggccgcatcaggaagaggccattatggacctcttggccggcgaccatgtgattttgaataccccgaccggttcgggcaaatcgctggtggcgctcggcatgcacttcgccgccctatgcactggccgccgctcctattacaccgctccgatcaaggcgctggtgtcggagaaattcttcgacttggtcgaagtgttcggccgcgacaatgtcggcatgatcaccggcgacagccacatcaacgcggacgcgccgatcatctgctgcaccgccgaaatcctcgccaatcaggctttgcgcgaaggcacccatgccgatgtgggcctcgtggcgatggacgaattccattattacggtgatccggagcgcggctgggcgtggcaggtgccactgctcacgctgccgcagacccagttcctgctgatgagcgccacactcggcaatgtggacgccatcgccgacaagctctccgatctgaacgacaccccggacgtggatgtaatcgccgacgcgccgcgaccggtgccgttgagctacgaatacacgctcgacccgatggaaaaaaccgtggaactcgccttccgcaacggcgaaaccccgatttacgtggtccacttttcgcaggacgccgcattggagaccgcgcaagcgctcgcctccaccggtgtatccagcaaggaacagcgccaagccatcgcagaagccatcaaaggcgtcaagttcaccacagccttcggcaagattctgcagcgactgctgcgcaccggtgtcggcatccatcatgccggcatgctgcctcgctaccgccgcctggtcgaacagctcgcccagcagggtctgctgccggtgatttgcggcaccgatacattgggcgtcggcatcaatgtgccgattcactccgtggtgctcacggccctgaccaagttcgacggcaccaagatgcgccgcctgcgcgcccgcgaattccaccagattgccggacgagctggccgtatgggattcgataccgagggactggtgatcgccgaggctcccgaatatgaaatcgaaaaccagaaagccatcgccaaggccgggggagatccgaagaaactcaagaaggtcaagcgcaagaaggcgccggaaggttttgtgacctggaaccagagcacgtttgataagctcatcgacgctgaaccggagaccctggtcccgcacctgaaaatcacgcattcgatggtgctcaatgaagtggcgcagggcggtgacgcccgtgcccgtatcgacgatctcatcgacgattccgcgcagacccccgaccagaaggagcatctgcaccagcgggccgacgagattttccaaaccctgttcgataccgaagtcatcgaaaccgagggccgcaaggacggcggcaaggactactacatgacccttgatatgccggacgacttcgccctcgaccagccgctctccccgttcctgctggccgcgctcgaactgctcgaccccgagtccgacacctatgcgctggacgtgatctccatggccgaggccacgctcgaagaccccaagcaggtgctgcgtgcccaggagcgtcaggcccgagacaaggcgatggccgatatgaaggccgacggactcgactatgacgagcgtatggataagctgcaggagattacgtatccgaagccactggaagacatgctcgaagccgcgttcgatcagtaccgccacgatgtgccgtgggccaacgactactggctatcgccgaaatccgtggtgcgcgacatggtggaaaccgcctccgacttcaccggatacatcacccgatacaacatcgcccgctccgaaggcaccctgttgcgctacctctcggacgcctaccgcacgctggcgcgcaccgtgccgcccgaaaagcgtgacgagcaactcgaagacatcatctcctggctgcgcgtgctcgtgcgctccatcgactcctcgctggtggatgaatgggagaacgccggcgattccgccgaccagtccgaggcggcggcctccttggcggcgccgggcaagaagaacgcggtggtcgaggaccgacgaggccttatcgtgctgatcagaaacgccatgttccgccgtgtgcagcttatggacctcgaccagccggacaagctcggcgcgctcgacaaggactggggctacggcgtgcacgaatgggaagatgtgctcgacgactactacgacgagcacgagtacgtgggcatcggcgccgaagcacgctcgcccgaactgttcatgttggatgacaagcacgagaacgacgagcatacgtggaaggtgcgtcagattatcgatgattccgatggcgatcacgattgggccatcgaaggcatcgtggacctcgacgccacccaagacaccggcgaagtagtcttccacgactacaaggtgagtaactgattcctggctcccctctctgagggaagccaaggtgcagctcgaacgtctgttcgaacactggggtactataggacgttatgagtgagaacgatttgtttggggcggctgatgcgccggagtcgatgacacggccgttggcggtgcgcatgcgtccacgcactttggacgaggtgattggccaaacgcaggtgttgggccagggctcgccgctgcgccgcctcgccaatccggccagcaaaggcagtctcaccgcgccgagctccgtaatcctgttcggccctccaggcgtcggcaagaccacgctcgccaccatcgtggccggccaatccggccgcgtgtttgaggaactctccgccgtgacctccggcgtcaaagacgtgcgcgacgtactcacccgcgctcacgaacggctcgtgtcacgcggccgggaaaccgtactgttcatcgacgaggtgcatcgcttctccaaatcccagcaggatgcgctgcttcccgccgtcgaaaaccgcgacgtgacctttatcggcgccaccaccgagaacccgagcttttccatcatcaaaccgttgctctcccgttcggtggtcgtcaagcttgagtcattggagcctgatcagctcaccgaactggtgcagcgcgcgctgactgatgaccgcggtctcaagggcgaggtcaaagccacggacgaagccatcgccgatatcgtgcgcatggccggtggcgacgcacgcaagagtctcacgattctggaggccgcggctggcgcggtcaccggcgacgaagcccgcaaaaagggcgcacgccgacccatcatcacccccgaaatcgtggctacggtaatggacaccgccaccgtgcgctacgacaaagacggcgatgaccattacgacgtgatttccgcattcatcaaatccatgcggggctccgatccggatgccgccatccattatctggcgcgcatgctgaaagcgggtgaagatccgcgcttcatcgcccgtcgcatcatgattgccgccagcgaggaagtcggcatggccgccccgcagattttgcaggtcaccgtggccgcggcgcaggccgtggcgctggtcggcatgcccgaggcacgtattattttggccgaagccacgattgccgtggccaccgcgcccaaatcaaatgccagctataacgccattaaccaggcactcgcggacgtggatgccggcaagatcggcgctgttccgctgtatttgaggaacgcccccaccaagcttatgaaagagtggggcaaccacgagggctacaagtatgcgcacgattggcccggtgccgtggcgccacaggaatatatgcccgaagagctgcgtggcaccgagtactaccatcccaacgatcgcggctatgaacacgaagtcagccagcgtcttgccaagattcgcccgatactgca

SEQ ID NO: 2637 - DNA, 16253 bp, Unknown
  R36_18m  MAG No. k141_953
atcgatctcggcccaggtggcgccggaggtggtgggcacaatgtccagcgtctctttgccctgagccttgagagtggaggtgaccagttcgacattgcgcatcagattcaccgtatcggggaagatgctggtgttcatctgttggaggatgtagcgggggccgtccgtggtcaccagataggtggtgttgatatggccgtctccgtaaggttcgatgccggtcacggcaccttccagcgcaaaatgcgaggcgatgccgaataaaacttcattgctttcggtcatgatgggtccgttctccaaaacgcgggaatcaggcttcacgccatgcgatgccgctgtcgggcaggtcgaagtcctcggtggtgccatcggccagagtcaccgtggtccgctgcggctgatcggtgttgttgattacgcagtacaacccttgctcggggaagtgcgccacctcgcactccgggttggacgagctccaagccgcatacttgtcttcgttgtgggaggcgtagaacagcacgcgttccagcagtcgggcgttggccgccgaatagggcagaccggagatgtacacaccgcggccttcgccataatcattggtcgcgagctgcacctgcccgccgtccgcgcgcagcagggtcacgttttcattgaccggatacgtgttgagcacgggttcgccgaagtcgatgccgcccaacggcttgatggactggccaccgccgcaaccgctcagcgggatgcggtagccggcctgttcccaagcctcgcgggccgccgggtcgaccggcacatcggcggtgatgaagtggtccggcaccaccggtgggaagtacttgtccacggagagggtctgatagcgctcctcgtccacgccaatcacgtcggccagctggaagaaccggcccgcttggaagcgcggtgccgagctcggctcgcccacgcccacgaacgcgccgccaccacgcacccaggcgcgcacggtttccacgagcttcgggttggtccacacgtcgccgccggtgaatgcggtgtcgaccgggccgccgttgatgattacgtcgatatcactatcgatgccatgcgcgagtacgtcgtcgaagctgatgaaccgcacgttcacgcgcatgccggacagggattccagaatgccgtagtaggagtaggtctgcttgttgggcagggcgtgtgccacggtgaacgccatccaggaacgcatcttgccccaggaattcagaatcgccacgttgagctcgccttcggcggccaccccaccggtgcggtcgtggatgtcgcggaattcgtcggcgatatgggtcaccgtgtccacgaacttcgggaacttggcggccaaggagaggtagccaccgtagcccatacggccgatcggcgaacgcaggatcgcgcggcgggccttacgccagttgtcgaggccttcgatgctcgggtcgttgccctcgtagaacgtgtcggggaagaagtacggcaggaagcgtccttccgtgtatttgacgcccggaatgtccgcgatcatgcgggtggtggtgccgtctccgatggagccgacgaccgcatccaaacccagcttttcgaacccgtccttatacggttcggtaccgatccactggtcgccaaggaacatcatggcttccttgcctgccgcgtgcgacatgtcggcaagccgcttgacgttctcgcgcacgaatccggagaggaagtcaatccagtcgcgttgcgccttgcggggcacgcgccacgcggagttgtaggcaccgccatccacgaaatcctccggacgcagacggtaaccgtactccttctcgaaatcgtccaatgcgcgcgggctcacggtgcaggcgcaaccgaaccagtcgaccaccttttcgcgacgcttggcatcgaacaggagcgtgaactggtagaagaacgtggtgaaacgcaccacatccacctgcgggctgtccttcagccactgctcgaacgtatcgaacacgaacttgcgggtggccggatggtagatgtcgaacggaatctcgtgttccttgtctccccaatcattggtcaggtggttgtacatctcgaccgggtcccagatgatgtaggccaggaaactcaccgtgtattcgtgcatcggcacggcagcggtcacgtgcacggtgtcctcgcccgggtcgagcgtccagccggacgggtccacgacctcgcccgtggtgtggtccacgacttcccagtacttatgagggtcggcgtcacggttaggcttgagctgttcctcgaagaaaccgtccatcagcggcacatccaccgcgttggactcggccaggatacgggcggtcagcaggtagacctgcggggtctcgtccatgtgcagggtgatccactcgttgtgggcgcgggtcgggaagtaggcgctgtagattttcttgccaagagcgagcactgcctcgtccagatgcgtgccgtcggagttgcggatggcgtccgcaccccacaattcggcgagttccttggtcttttcggcaaaattctcttcactgggcagcgtgaagcggccggtgctggtcatgagtgctcctttgtggggttggtcatcaaaaaactacaaagcgacgaattcgtcgcatacaaaatgaccggcgtcatcgcgggccctgggaccctgactgcgtagatccttgacgcttacggtgacgccggacgattggaatcgtgtcactgaatatgggagggacgttgcccggcaccggaaggagtgacacgacatgccgggcagcggattggttagcccttgacggcaccggcggcgaggccggactgccagtagcgctggaggccgaggaacagcacgatcacgggcagcacgccgagcaacgcacccatcatcagggcgccgcgatcggtgaacgtggccagcgagaccatgccgtacagaccgagggtcacgggcttcaaggtgtcggaagacaccatcatcaacggcagcaggaagttgttccacgtggccacgaacaggaacaggaaaatcgtcaccatggccggggccaggagcctcagcacgatggtgaagaagatcctcgcctcgctcgcgccgtcgatgcgggcggcttcaagcagttcgtccggcaccgaactctgtgcgtacgtgcggcccaggaagaagccgaacggcgaaacgcagcacgggatgatgatcgagagcatagtgttggtcaggtgcaacgtgtggaagatcgagtacatcgggatggtcagcagggcggacggcatgagcatgcaggccataatgatgccgatggccgcgttcttgccgcggaagttgaattttgcggtggcgtagccagccatcacagacacgatggtgccgatcaatgccgagacgcccgagtagatcagggagttcagcacccagcgccagaagttgccacgagtccagccaagcagcttggaatagttagtggcgatggcattgggcagctggtcaagcggcacggcaaaccacatgccgttgctaccggtcatctgggccggcgtcttggtggacgcgatgatggcccagtaaatcgggaacaggaagtagatcaacaccagtaccagcagcaccacggtgagggtcttcacggccgcggacggtcgcatggagcgaggcaaatcgtgttgcgcagcctgacgctgcttttcgagcttgcgctcggcctttttgcgggcgcgttcttcaacggttgcggagctcattactcgttcaccttcctttcggccaaggtgtacagcacggcaagcacacctgcgatcagagccatgacaatggcgatggccgaggccggaccgtcaccagacggggtaatggtgccctgagaagtgttcatggccatcatcatcggtgtatacgacttggaaatacccggatcagccgtagacatgatctgcggttcgttgaacagctgaatggtgccgacgatggaaagcagcatggccagcagggccgcgccacgcacgttcggcagcttgatcttcgtggcaatctgccaaccattggcgccgtcgatacgggcggcctcatagaggtcatgcgggatggcctgcagtgcggcaaggaaaatcagcatgttgtagccggtgaaggtccatgtggtgatgttggccatcgagccgagcacgatgttcttgttgaagaagtccacattgacgccgatggcggcaagtcccttgacgatcggcgagatttggccgttgtacaggtagacccagataatcgaggccacgacgccggggatggcgtagggcaggaagtagcccagacggaaaccggtgacatgcttgaccacgaacgagtcgatgacgatggccaacgccagtgcggcgatgatcatgatcggcacctgaatcagggtgtagagcagcaccctgccgacgccggaccagaagttgccggaagtaatagcatactggaagttctggaatcctacgaatttattgaccagctcgccaccgccgtatgcgccaccgccctcggtgacctgacggaagaagctggaatagatggcccagatgatgggcaagatgaacacgaaagtgaacaggacggcgaacggtgccatgaacgcccagccggtgcggttctcgcgcttctgagcgccggaccgcttcggcttggcggcggcacgcctaggtgctttgcccttcgcctgagtagtggatgcagtcataatacaaaacctgtcttcgcaaagaacagtaaaacaaatgacaagggccacagcgcccctgcagcaatacccccaaacaatacggaaggccggagtatgtgccccggcctttcgctatggtgatgcgaggcatcggaggtcttggacggccggctatttcaaaccggcccgttgacaagacctagtgaggtcactccttgacggacagaccgaggttcttcagcgtatccaccgaggtcttctgagcggtgtcgaacacatccgaaaccttggcagaaccatcggcagccttggcggcggtctgtttcattgcagcgccgactgcggagaagccaggcatgtaggtgaagtcacccatgttgtcgttcgcggtcttgaactcagccatgacatcctgtccgctgaagtagtcggaccacttctgcggggtcttggcatccgcggtggtggcggccacgacaaggccctgggagacaaggtcatcaacctgggtgttgaaccagtcaaggaactccatggcttcggccgggtgcttggaacccttgagcacggccacaccggaaccaccatcggcgccggtcttggtgccattgccgaaccagtcaccgagctgggtgaccttccactcaccagcaccagtgccaccggcggaatcgatgaacagtggggcttcccaagcggcggccacggtgccgatcagctgaccggactggatggagttatcaaacgatgcatcccaacgcgggttggtgagggcggccttgttgtcgatcagctgctggtagacatcggccacggccttggagcccttagtctgggtgttgacaacccaggagttgccgtcgaccttgtaccacggaccggaagcgccggcctggccggacatcatcatcatggcctcatcaggttggaaggtcatgatgtacttgccttgggcagcggtcttcttggcggtctcaatgagctcgtcagcggtcttcggcacggtgatgccgagcttctcaaattcagcggcgttgtagaagtaagtcagcgggccggtgtcctgcggcagaccgtaggtcttgccgtccacctgcatcagtgcgaacgggccggaagcgaaatcgtccttgtacttggcggcctcatcggtgacatcctgcagaaggcccttggtgaagacctcaggaacctcggagtaaccgacctgagccagatccggcgcattgccagccttgacgtcggtctcgagcttcttgatcatgtcggcggcattgccatcgaacttggtggccttgacctgaatgttcgggtgctccttgttccacttggccacaatgtcgttgaccaaggtcatgccttcggaatcgggcagacgatgcatataggtgatgttgaccacaccgccatcgctgccggacttcgtgtcgccggcagtgtcgctgccgccgcaaccggccaaaccaatacccattgctgctaccgcggcaagagcagccacgatgcgcttgttgtgcgataccatatctctactccttcctagtgaaatcatcacctcagcgtgatgactgattgctaatttaggcctttgctcttttattgtcaacttagctaacaattaccgcgcgtcccgttgaggtgagtggcattaaaccgattcgatgctcgattgtgcgggtttgttcatttcattaactccccttacaaagcaacgtacttttggtccaccggtagacctaatgagatattggatagcggcaacaatccaagacgttagcttgcaatcgtccaccacaaattgcaagcacttgccaacattatcggttttcaggttgccggcgcgatacccgactagggggggcaccgcgccttaatgagacgctacacgagcagtctcagcaactggtagagctgccacaggctacgcacgttgaagtgcgtgccgtcaaccgtggcgttcgcctcgccatcgcccacatggacgatcacggtgcgcccgttcacggtcagactaccgtgcatcgtgatatgattcatcttgcaaccttgttgattaaaggcgcaagccggtaatcaacgcaaaggcccgatgccgcaaacgtcgggccttttcttatcggctcacgccgattggcccgtcatatcaacggggacaccgcatgttacggcatcacaaaccaatatatcagcaccccggtggcgatcaagaagacaggttccagaaaaagaaaaagggcctgggcatgttgcccaggcctcggttcgcggacagggcgagattcgaactcgcggagggttgcccctcaacggttttcaagaccgtctctttaggccgctcagacacctgtcctgatgcgcgttcacacgcgcaagtattcattatacagaagggagggatgttgatattcggcagtgcggtcggtcttggattcgcctgctggctattagcgatctctccctcagtcagctacgctgacagctcccccattaaagggagctaaagcacgatgagactcaggcctcccacttagtgggctcgatgacttccttgccgcccatgtaggcgcgcatggcctgcggaatctcgatggagccgtccttctgctggtggttctccatgatggcgaccagccaacgggtggtggccagcgtgccgttgagcgtggagaccggacgggtgccgccatcttccatacgctcgcggatgttcagacggcgagcctggtactcggtgcagttcgaggtggaggtgagctcgcggtagcggccctgggtcgggacccaggcctcgcagtcgaacttgcgggcggcggaggagccgaggtcgccggctgcggtgtcgatgatgcggtagggcacttcgaccttggcgagcatctcctgctccatggccagcaggtgctcgtgctccttgtaggagtcctcctgcttggcgtagacgaacatctccaccttgtcgaactggtggacgcggatgatgccggaagtgtccttgcctgcggcgccggcctcgcggcggtagcaggaggaccaaccgcagtagcgcagcgggccgttgccgaggtcgaggatctcgttctcgtgcatgccggcgagcgccacttcggaagtgccgaccaggtactggtcgtcgggctcgcgcagacggtagatctcgtcggcgtgggagttcaggaagccggtgccgcgcatgacctcggggcgcaccagcgtcggggtgatggccagcgtgaagccgtgctcctcggcctggtccacggccatggtgagcatggcgatctgcatacgggccacctggccacgcaggaagtagaagcgggagccgccgaccttgacgccgcggcgcatgtcgatgccggccacgccggtgccgagggtcaggtggtccttgggctcgaagccttcggccgcgaagtcgcgaatctggccgaccttcttgacgaccacgtagtcgtcctcgccgccttcgggagcttcgggctccacgatgttggagagcttccacatggcggtggtgtattcctcggcggcggaatcggccttggacttgtattcggagaccttctgggacagttccttggtctcggcgatgagcttggccttctcgtccgccggggcggaggcgaccttcttgccgatttccttctgctgggcgcgagcctcttcgaaggccttcagcgcctcacgacgtgcggtgtcggaggagagcacttcgtcgacgagttccacggactcgccgcgcttgcgctgggattccttgacgatatcggtgtgttcacggatgaattgaatatcaagcatgggcaccagactagccgcgtaagcagacaccgacaatggccgaatacgcgggagtcacgcggaaatcacagggaagcccgggaaagtccgcggacgggtccacccggccaatttcgtcagatgagacgcgattgaaccataatcgcgccccacggggctgttgcgtgcaggaaatgttcacgtacggcgcaccatggccgcaaacgacctccccaccgataacaataggagccatgcctcagcctgccctcaccgtgtttctgatcatcgccgcaatcgccattgtggtggtgctcatcgccgtcatcgtcatcgccctgcgcgcgcagcgccgccgcaagctggctcagacgctggagaagcgccgggacgacgaggtgcagtacgccttcatcgtgaatccgtccaaaccgcaggccgaagcccgccggctgcatatccagaggttctgcgaggccaaggggctcaatcgcatccgcttctacgacacccagcttgacaaggacggcagggtctgcgcgcttgaggcgctggaggacggcgccgacgtggtgatcgcggtcggcggcgacggcacggtgcgcacggtggcgagcgccgtctccggcaccggccatgcgctgggcatcatccccatcggcaccggcaacctgtttgcccgcaatatgggcgttcccgtggacgatatcgacgccgcgctgaccgtggccacctcccacggctcccgcctggtggacatgggccgtctcaccctgctcgaccacccggaggacgaccacggccacgccttcctcatcatcgccggcatcggcttcgatgcggccatgatcgacgacaccaaccccgagctcaaggcgaacatcagctggctcgcctacttcgtgggcggcgtgaagaacctgttcgcgccgaagttccgcggcacgctgacagtcaccagcgccgacggctcgacccacaccatcaagaatctcgatttccgcacggtgatggccggcaactgcggccagattcccatgttctcgctgatgccgacggcatcctatgacgatggtctgctggacttcgaaatcatcgacaccaccggcggcatcctcggctgggccaacctgttcggcgacgtggtgcaccagacgatcatcggcaagcccgaacagaacccgctgtccacgaactcgaccatcgaacaggtccagggtgtcagtgccgaaatcacattggaaaagccggccaaagcgcaggtggacggtgacatgctgccggaaacccgccacatccgtttctcggtggatcaccgcgcgctgatcgtgcgcgtgcccgacgcctccgcgctggaaaagaccgcgcaggccgctgcttcaaatgccacctcgaatttcgccgaaatgaccggtacactcgagccgattcgctgattcgccaatccgctaatccgttactacgatgcgtggccggtgactcgggcgacatgcatcgccaaataagcgatttcgtcgtcgctgatatccgtgtcgaggcgcagttcgagcagggaggcgatggttcgcgcgcatcgcagcgcagcggggtaggactcacgaatcaccttcatcaccggtgccggctcgtccgtcagttgctggtgctggtggatgcgtacgaacaggtagcgcaggtgggtgatgaaccggcccacgttcacggaactgcggtccaacgtgatgccgtagctgtggtcgatgatgtcaagcagttgctggatcacgcccgtcatcgtgtacgtataggacaggtcgccggtggcgaagccggcgttgaccagatgcatggcaagcgcggtggcctcgccgtccggcagcgtgacgtcgagccgtgcattgagcgatgcgagcatcgcacgcccctgcgcgtattcctgcgggtacaggttgctcacctcgccgagcagcgggtaggtgatgtcgatgccgcgccgcacccgctccaccgcattcgccacgtggtccgacagggccatgaccagcgtggtgctgccggtctcgcgctcccccagtccggtctcctgcatggattcgacgaccacgcggatgatttcgggcggaatgtccgccagcatctgcgccagatggtcagggtcgcgcccgtccgatggcacgaaggtgcgcacaactttcgactcgtcgaccgtctgccccggcttggcctggaaccccagtccgcggccggtgagaatcacctcaccgccgtcgccgcctttggcgagcacgacgttgttgttgaacactcgcagtatttccatggcatcctttcgcaacgtcattgttccacatcgatgatcgggctgccggctgatacggttttgcagtcaccgccgttgttgtcgccgctaccgtcgccgatcaacggcgtgaccacggtcagttcagcggcgttgaccaccgtcaccaccaccacaacgctgtgcccggccgccgcgactttgccgaaatccacggtggccagtggctctcccgccgcgatccgctcgcctttgcccacggccacgacgaatccctcgccatccatattgacggtgtcaatgccgacatgaaccagcacttcgatgccgtcatcggttttaatgccgaaggcatggccggtccgggccacggttttcagcgtgccactgaccggtgccagcacggccgtctcgccggccgtctccggcacgacgcctacaccctcccccagcgcgcgggaggcgaacaccggatcgccagtcgcttccagattcatcaaccggccggcgaccggcgacaggatggcgttggagtcaggagtccgatcggaggcaggccgcgatggggaatcttccgcagactccgcatccgacgatgtcgcgccaatccctctcaccgcatcctgcgagcgtacgttctcgcccgccgagaccatctgcgcctccgtggcgcgcggcggcgtacggtacccgaacagcaccgtcagcaccatcgccattacaaacgcaacggcgatggacagcgcgtacacccacattctgtcaaacaccggaatcgtcagcaacgaggagaaggcgaacgccgtagtcgtgacgccccggaccatctgaccggatggcagcacggacgggaacagccagccaagcaccgcgctggtcacgccgccggccgcgcagccggcgagcagccagcggtagacgcggcggtgatgcagatggatgccgtacaggctcagttccgaaacgccactcagcaatcccgcgagcaacgcccccaccgcggtctgccgcatggccgaatccttgccgcgtacagccagcacgagcacgccagcggtggcaccgaagcaggcaaagttccatacacccatcggaccttggacgaaatcgtagccgagcgcctgaatgttcatcagcatcagggcattcaacggccagtgcagaccgagcggcacgagaaacgggtagagcatcgggatgatgagcgcgaataggaacggcacgtgcgcgttaagccatgctgtggccgctcccagcccaccgccgagccatattcccagaggcccgatgaccagtatggtgagcgcaaaaacgacgaccagtgagaggaatggcacgaacaccagctgtacgctgtcgggaatgacgcgcttcaacccgtggtagaccacggcgagcacggcagccatgagcaacggcacgaagacgttgccgccgtagtcgttgagttgaatcggtatgccgaacgccgacacggtgcaggtttcggcgccgaatacggcgttggccgagcattgaatcgccccggagagggcgctggatacggacgtcccggacattccggacattccggacatcacgccagtaaactgcggggtcatcagcgcggccataatcgcgccgccgagccaggggtcgacgtccagtttcttggccgcattgtaggcgatcataatcggcagaacggtgaacacaccctcccaaatcgccttgagtagtatccagccggcggaggtctcgccgtcaggcacgatgccgagtgcaacgatcacgttgacgatggcgatgaccagcgaggcaccgagcagtacacccagaatcgggcggaacgagtcagacaggtagtcgaaaaacgcggcagcccaagcgcgggcggcactgccccactcgcggacggtacgaggcgtgaagtgacgggatgtattggatgggccgcaactttgttcggcgtcggtggcagtatcgcgcgatggtgcggcatcgtcggaaaggtacggcgcggactgcgcgggttgcgtgggctgtgtggattgcgctgactgcgcgggctgcgctggctgagtgggctgcattgactgagtgggctgcattgactgagtgggttgcgttgactgcgacgctgactgcatcactgccgatggcaattgcgctgccggcatcaatcgcgccgtccgcagccgaacgatctgctcgtacaccgaggcgaccgctccgccgatgatgacctgataacgattgccggctcgcgggaatgcaccgaggactccggggacggattcaagaccgtgctggttgacatggccggcatcggccagttcgaagtgcagtcgcgtggcgcaatgggtcaggctggtaatgttcgcggggccgccgacggcatcgacgatgcgcgccgcaatcactgcaggcgttgcgttcgatgcgttcgccacggttcctccttgctgccgtatgccactgtgttccattatcggcgctgggtgccccaaaagcacggcaatgccggcaaagcatcgcgaaacggcaactatgcgctacggtgctccgcgatggtgtcccgccataatgttccgcgatgatgcttcgccacacccgttctccgtatttgccgcagcgcccattccgacatcattccaccatgcagaatcctgcaatcgttgtcaaaaatcatcgttttttgccgcctattcggagtgtcgcgactgcggaagtcgtattctatctttcacacacgttgcgtagcagggttgttactcaaaacgaggcaagacctggagcgacgtggaatttgcgtatcgtgatatgcgaattccacgttgttccaggtctttttttgttttcgggcgactgcagacaatcgaagcctgaccttgcacgcggcagaggggccacgcaacaggcgcggtccgtcaacggcgaaaggacaaggcaatgacgacgacaacggcatcacccgtatcgaaacagacggcatccgcggcgcaggaaaccagcgcaaccggtgcggcggccaccgcaatcgaaaccatcgaaaccggcgtggccggagtggcgggcgcggccacaaacgcggcagccaacgcaatcgaggacctcgaagccgccgaatcgcacggcttctccacgcgcttcccgctcaacagcgcattcatcttcaccttcggcgcgctcggcggcatgctgttcggtttcgacaccggcatcatctccggcgcctccccgcttatcgaatcggacttcggcctgagcgtctctcagaccggcttcatcacctcctcggtgctgatcggctcgtgcgcaggcgcgctgtcgatcggcgcactgtctgaccggttcggccgcaagaagctgctcatcgtctccgcgctgctgttcctgctcggctcaggcctgtgcgcctcctccaccggattcgcgatgatggtgtgcgcccgcatcatcctgggcctcgcggtcggcgcggcttctgccctgaccccggcgtacttggccgaactggcgccgaaggagcgtcgcggctcactgtccacgctgttccagctcatggtcaccttcggcattctgctggcctacgcctccaacctcggattcctgaaccacaacctcttcggcatccgcgactggcgctggatgctcggttcggcgctggtgccggccgccttgttgctgctcggcggcctgttgctgcccgaatccccgcgttatctggtgaacaagggcgacacccgcaacgccttcaaagtgcttacgctgattcgcaaggacgtggatcagacccaggtgcagattgagctggacgaaatcaaggccgtggccgcacaggacaccaagggtggtgtgcgcgaactgttccgtatcgctcgtccggcgctggtggccgccatcggtatcatgctgttccagcagctcgtgggcatcaactcggtgatctacttcctgccgcaggtgttcatcaagggcttcggcttccctgaaggcgacgcgatctgggtgtcggtgggcatcggcgtggtgaacttcgtgagcaccatcgtggccacgcttatcatggatcgtttcccgcgcaagggcatgctgatcttcggttccatcgtgatgaccgtttcgctcgcagtgctcgccgtgatgaacttcgtgggcgacgtggccgtgctggccgtgccgacgatgattctcatcgctttctatatcctcggctttgcggtctcgtggggcccgatcgcctgggtgcttatcggcgagatcttcccgctgagcgtgcgcggcatcggctcatccttcggctcggcggcgaactggctgggcaacttcatcgtctcccagttcttcctcgtgctgctcgatgcgttcggcaacaatgtgggcggcccgttcgcgattttcggcgtgttctcggccctgtccatcccgttcgtgctgcgcttggtgcccgagaccaagggcaagtcgctggaggaaatcgagaaggaaatgaccaagcgctagacaaccggcacacgattcgcacaaaagttgacaactcttaacataagagtacccaaagtggcgaaaaacgtggcagaatagggaacatggtagcaaacaatgcgggtcagcccgccaccccagcagatctgattaatgtcgatgaggttatcggcaagtactatgacctcgtccccgatcccgaagtccccgagcagcgtgtcatcttcggcacctccggtcaccgcggatcgtccctgaagacctcgttcaacgaggcccacatcatcgccatctcccaggccatcgccgaataccgcaagaaggccggcgtcaccggcccgctgtacctcggctccgacacccacgcgctgtccggcccggccaagaagaccgccatcgaggtgctcgtcgccaacggcgtgcacgtgcgcgtcgactcccgtgacgacttcgtgcccaccccggtggtctcccaggccatcctgacccacaaccgtgcggtcgacggcacccagcgcttcgagggcgagggcctcgccgacggcatcgtcgtcacgccgtcccacaacccgcccaccgacggtggctttaagtacgaccccgtcaccggcggcccggccccggccgagaccaccaacgccatcgccgctcgcgccaacgagctgctcggcgacttcaagtccatcaagcgtgtgccctacgaggaggccatcaagtccgagtacgtcgagggcttcgacttccgcgagcactacgtggacgacctggagaacgtcatcgacttcgacgtgatccgcaactccggcgtgcgtctgggcatcgatccgctcggcggcgcttccgtgaactactggccgctcatcaatgagaagtacggcctgaacattggcgtggtgcgccctgaggtcgacccgacctggcgcttcatgaccatcgaccacgacggcaagattcgcatggacccgtcttccccgtacgccatgaagggcctggtcgacgagctcaacgccggcgcttgggacaagtacgatctggtcggc

SEQ ID NO: 2638 - DNA, 3727 bp, Unknown
  R36_18m  MAG No. k141_1098
cacatccatggccagcaggctgtcgtcgttacggaacttcatgccctgcacgccggcggtctggcggcccatcggacgcagctgctcgtcgtcggcctggaacttgaggctcatgccgagcttggagaccaggatgatgtcatcctcggcgttgcacagcgcggcaccgatgagctcgtcggcgttctcgccattctcgtcggccatgaggcgcacggcgatcaggccgccctggcgcggggaatcgtactcggccagcggggtcttcttgaccttgccggaacgggtggcgagcaccaggtacttggccacctcgtagttcgggatggacagcacggtctggatggtctcgtcgggcgcgaactgcagcaggttggccacgtgctggcccttggagtcgcgcgaaccctcgggcagctcgtaggccttgatgcggtagacgcggcccttgttcgtgaagaacagcagccaattgtgcgtggaggtcaggaagaagtgatccaccacgtcgtcctcgcgcagcttggtgcccttgatacccttgccgccgcggtgctgggcgcggtattcgtcggccttggtgcgcttgatgaagccggagtgggtcacggtgaccaccacgttctcttcggcgatcaggtcctcgacgttcatctcgccggagaacggcaggatcttggtgcggcggtcgtcgccgtacttggccacgatctcgtcgagctcatcgccgatgatcttgcgctggcgttccggcttggcgaggatgtcgatgtagtcggcgatcttgcgctgcaattcctcatgctcggccacgatcttgtcgcggttcatgcgggtcagcgtgcgcagctgcatggccagaatggcgtccgcctgcacctggtcgatgtccagcagccccataaggcccgtacgggcggtgtcggtgtcttcggaggcgcggatgagggcgatgacctcgtccagcatgtcgagggccttgagatagccctgcaggatgtggtcgcgctcttcggcctcgcgcttcaggtacgcggtgcggcgggcgattacgtcgagctggtggttcacccagtggcggatgaaggcatccaggctcagcgtgcgcggcacgccgtcgaccagcgccagcatgttggcgccgaaggtctgctgcagctgggagtgcttgtacaggttgttcaggaccaccttcggcacggcgtcgcgcttcaagaccagcacgaggcgctggccggtgcggccggaggtctcgtcgcgcatgtcggcaatgccctggatcttgccgtcgcgcacggcctcacgaatggagacgacgaggcggtccgggttgacctggtagggcagttcggtgaccaccaggcacatacggccgttgatctcctcagtgttgaccacggcacgcatggtgatcaggccacggccggtgcggtaggcctgttcgatgcccttgtggccgaggatggtggcgccggtggggaagtccggtcccttgatgatgcggatcaggttttccagcagttcctcgcggctggcgtccgggtggtcgagcgcccagtggacgccgtccgccacctcgcgcatgttgtgcggcgggatgttggtggccatgccgacggcgatgccggcggagccgttgacgagcaggttcgggaagcgcgcgggcagcacggtcggctcctgggtcttgccgtcgtagttgggcacgaagtcgacggtgtccttgtcgatgtcgcgcaccatttccatggccagcggggccatacggcattcggtgtaacgcatggcggcggccgggtcgtcgccgggggagccgaagttgccctggccgtcgacgagcatgttgcgcatcgaccaggactgggccatacgcaccaaagtgtcgtagatggcgaagtcgccgtgcgggtggtacttacccatcacgtcgccgaccacgcgggagcacttgttgtagccgcgatcggggcggtagccgccgtcgtacatcgcgtagatcacgcggcgatgcacgggcttcatgccgtcgcgcacgtccggcagggcacgctcgacgatcacggagagggcatacgccagataggactcgcgcatctcctgctgcaggtccttgcgctggatgcgttcgccggtgtccatcaggccgtagtcggtagtgtccgcctcctgcgggctcaacggctccatcgagccgtccggcgtgaactgctcgtcgccggtgttgttttcatctgccactgttgttcctttagttgtctaagtccgttgtgtacctccctctgacgagggaggttggaggattccgttacgcatcgatccaacgcacgttcttggcgttgcgctggatgaagaggcggcggggttcgacctcatcgcccatcagcatcgagaaggtctcgtcggccgcggcggcgtcctcgatgtgcacctgcttcagaatgcggtgctcggggtccatggtggtctcccatagctcctggtagctcatctcgcccagacccttgtagcgctggatgccttcgcccttgggcagctggcgtccgttggccttgccttcggcgagcacgcggtcgcgctcggcgtcggtgtacacgaagtcgtgcgggcccttggtccacttcaggcggtacagcggcggcatggccacgtacacgtagccggcggtgatcatcgggcgcatgtagcggaagaacagcgtcaggttcagggtggcgatatgcgcaccgtccacatcggcatcggccatgatgatgaccttgtggtagcggaccttggagatgtcgaagtcctcgccatagccgccgccgaccgcggtgatcagcgattcgatggtgtcggacttcatcatgcggtccaagctggcacgctcggtgttgaggatcttgcctcgcagcggcaggatggcctgcgtgatcgggttgcggccctggatggcggaaccgcctgcggaatcgccctccacgatgaacagctcgcactcttccgggttggaggactggcagtccttgagcttgtcgggcatgccggcggactcgaagatggacttgcggcgggtgttctcgcgggctttcttggcggccagacgggcgcgggaggcctcgatggccttctggatgatgttcttggcctcggccgggtgggcgtcgaaccagtcgccgagcttgtcggtcatcacgcgctgcacgaaggtcttggcttcggagttgccgagcttggtcttggtctggccttcgaactgcgggttggtgagcttgacggagatcacggcggtcaggccttcacgcacgtcgtcgccggagaggttctcgtccttgtccttgaggatgcccttgtctcgcgcgtaacggttgaccagcgaggtcagcgcggcgcggaagccctcctcgtgggtaccgccctcggtggtggagatcgtgttcgcgaaggtgtgcacggcctcggagtaggcagtggtccactgcatggcgagttcggcggagatgccgagcttcaggtcttcggcctcgaagctgatgacgtcctcttccaccggcgtggccttgcgcaccttgaccagatagtcgacgtagtccttgatgccgttgaggtactggtaggtgacggtctggtgctttgcgccgggctcgtccgcggcgtcgccggccacctcgtcgccggcctggtcattctcacgctcgtcggtcaggctgatcttgaggcccttgttcaggaaggccatctgctggaa

SEQ ID NO: 2639 - DNA, 6386 bp, Unknown
  R36_18m  MAG No. k141_1199
gccggcaagacccgcctggtctgggtcagcttcactccgcagcaggttgatattgacaccgattccgacaagggctgggaatacctcatgtccatcttcgatcagatggccgcatcccacgtcagctacatccgtctcgacgccgtgggctacggcgccaaggaggccggcaccagctgcttcatgactccgaagacgttcaagctcatctcccgcctacgcgaggaaggcgtcaagcgaggcctcgaaattctcattgaggtgcatagctactacaagaagcaggttgaaatcgcctccaaggtggaccgcgtctacgacttcgccctgccgccgctgctcctgcactcgctgttcaccggccacgtcgagcccgtcgcccactggaccgacatacgcccgaacaacgccgtcaccgtactcgacacgcacgacggcatcggcgtgatcgacatcggctccgatcagctcgaccgcagcctcaagggcctcgtgcccgacgaggacgtcgataatctggtcaacaccatccacgccaacacccacggcgaatcccaggccgccaccggtgccgccgccagcaacctcgacctctatcaggtcaacagcacgtactactccgcgctcggctgcaacgaccagcactatctggccgcccgcgcagtccagttcttcctgcccggagtgccgcaggtctactacgtgggcgcgctcgccggccgcaacgacatggaactgctgcgcaagaccaacaacggccgtgacatcaatcgccattactactccaccgccgaaatcgacgaaaacctcgagcgcccggtggtgaaggccctgaacgccctggccaagttccgcaacgaactgcctgcattcaatggcgagttcagctacgaagccgacggcgacacatccatcaccttccgctggatcgctgccgacggcaagaccaaggccgccctcatcttcgagcccggccgcggactcggcacggataacaccactccggtcgccagcctcgcctggaccgatgccgccggtgaccacgagactgatgatctgctgagcaacccgccgattgccgatatcgactaaccgttggcccataaacgccactccgctgtgcgcgctccaagtagtgcgtccggcgtaagctgggtccatggaaaacaaaccgcccgcagtgcactgaagctagtgcgctcgggcggttttgcatgtggcggggttgcgggtcatgctcagtcggagctggccggtacctcccgccggtgatgagagcaaagaaagagcagcaacatgttggaaccgtacgtgcgcccgggtattgacgaccgcccggatctcgacaaggcattgagtcccgaagacaaggatgccgtggcccgactggccatcaaagatcgtcggcgtcctcccgaggcatccgccgatcagcccgaggcccaggccgtgcgtctggcggccgccggttcgtcggctgctgccgctgccgcggccagcgtggatgcccctgcgcctgatctgtcgtctgcatatctcgatatgcgcgatccgatggtcgccgccaatggtcagcgacccaccgctgttcagatttcccgtcttaattggggctttttcgtggcttcgattctggtcggcgcgccttgggcggcgttgaacaccatcgccatgcccaacgccgtggcgcgattgttcgactacgacaccgcttctgccatatcggtcaccatcaatccgtccaccagccgtccgctgcccgtcgccactgacttggtggtgcctctggccgtgctggtagtcgttggcgtggtggcctccatgttcgcgatgcccttggtctccgcgctgtccgaccgcacacgtattcctctgggccgccgtaccccgtggatggtggcgggtggcgtgctgtgcgcgctgatcacgctggttctggggcggaacacaggcctcgtagtgctgtgtttcttctgggcgctcatgcagtttgcctatgcgatgatttccgtgccgttggccagcgccatcagcgaacgggttccggacaaattccgtccgcgcattgagcgctggcacggtatcggcgtgatgcttggccaagcgcttggtgtatgcatgggtgcgctcggcgtgatgttcgactccttcacgccgtttgcctacaccgccgtgctgtttgcggtttccggcatcctgaccgtgatcatgctgcccaaggagccttccagccaggagcagccacatcaacgattcgagtcgagccaggtgtttgaccagctgcgtccgccggcacatgcgcctgcattcgcccgtgtgttcgccgctcgcgtgtgcatgatgacgggcgttgggctgaccggggtctttctgtggtatctcgtgcgcttttgggtgtatggcaaggctgtggtgttcacttccgcgccattgaccattcccgcgggcctcctcatcgccggcatggccgcggcaacgctcatcggtgctgcgctcgcgtcctgggccgctgggccgatctccgagaagatcgaggaacggaacatcgccaccactgcagtggtggcggcatcctgcctgctgtatgccatcggcgtggcggtggcatgggggctcggcgtctggtccaccggcacggcacgcgaaaacggcatgctgctcttcgcgctgatctccggattcgccttcggcgtctacgatgcgttaggccttgaactggtaatgaatgccctacccgacccgcgcaacgccggtcatgatctcggcatctatgcactggccaattcggtcggactggcgctcgccgccatcatcggcgcgctactggtgaacgccttcgagcacagcttcggctattacctgctcttcccgtccgccatcgtcatggtgctgctggccggaatcgtcaccctcaccgccgagtccgcgcaatgacgggccgatccggctccccggccgccggcggcgttcctccccgcggcgggggcgttcgtctcggcgacgtggcgtccacaatgtgaacccttgctggattggcaagacagccaaacctatgtttacatttcagttcaggtcgaacggcctgaggaaataccgaaaggaggccacgcgatgactggattcaatgcttctgcgtttgtatccgcacgaattattagcccgtcttcgctggcggactaattcggcactgatgcttgaagccccgtcaacgaaggcagggccaatcaagctgacacaatcggtaaggccctgcaagttgcggggctttttttgttgcgctcacaaggcttacggcagaatcccgcagacggaaacggtagcggacagtacacggcaacaacacagcaacagaacaacaacctccctgtgagacgaaataatcgcccgccaatgagagtgaacgagagcaaaacaggagtaacaatgactgcagcagtcgaagagactggcttagggcaggcggcaggtaaagccgctaccttggtacgcgattcggtcaagaccgtgatcgccgcatcgatggtcggtaccgccatcgaattctatgacttctacgcctacggcaccgccgcggcaaactacttcccgcacatcttcttctccgcgaaggacaaccccaccgtcgcactgctgatgagcttgctgaccttcgccatcgccttcatcgcccgcccgctgggctcgctgatcttcggccacttcggtgaccgcatgggccgcaagaccacgctggtcgtcagcctgatgaccatgggtgtcggcaccttcctgattggctgcctgcccacctacgatcaggtcggcgttggcgcagtcgccatcctctgcctgctgcgcttcatccagggcatcggcctgggcggcgaatggtccggtgcggcactggtcgccaccgagaacgcgcctgaagacaagcgcgcactgtacggctccttcccggagctcggcgccccgatcggcttcttcctgtccaacggcacctacttcgtgctcgaatccttcaacaatcaggacgcgatgctggcttggggctggcgtgtgccgttcctgctgtccgccatcctggtgatcgtcggcctcgtggttcgcgttcacatggaggagaccccgatcttccgtatggctcaggagcagaagaaggtcgtcaagtccccgctgaccgaggtcttccgcaagtcttggcgtcaggtgctgcaggccaccttcctcgtggccgtgacctacacgctgttctacacgctcgccacctggtccctcgcttggggcaccaaggagcagggcgaaggcggcggcggccttggcttcaccaaccaggaatacctgctcatgctcatgatctccatctgcgtgttcgccctgttcatcgtgctgtcctgcctgtacgcggacaagatcggccgcaagcgcgtgctgaccttctcctcctgcgcactcgtcgtgttcgccgcgctcttcccgttcctgctggacggtggtctggtcggccagaagaacttcctcgccaacatggtgttcctgtgcgtcggctttgccctgatgggcgtcgccttcggcccgatcggcgcgttcctgcctgaactgttcgaggcgaacgtgcgctactccggctccggcatcggctacaacctggccgccatcgtcggcgcggcgttcgtgccgaccatcgccacttggctgagctcccactggggcgtccactccgtgggcctctacctcgccgtgatggccgtgtgctgcctggtgtcggtcctgacctgccgtgagacgaaggacgctgactttaccaagtgaaatcctccataactaaatatcgccaagttcacaacgtgaaaaatctcaattccacgaagtgaacccctgcgaggcttttccggtgcaacaggactaaacctgcatatcggaaaagcccacaaggaaagccaaaactaaaaacagtttctgcagaaccagcagagcacaataacaattaaagatttcacccccataaacaaataaataaaaggagcgccaaaaatggcagcaactatctggtacgagaaggacgccgatctgtccgtgttcgatggcaagaaggtcgccatcttgggctacggctctcagggtcacgctcacgcgctgaacctgcgtgactccggtgtcgacgtggtcgtcggcctgcgtccgacctccaagtctgtcgagttcgccaaggagcagggcctcgaggtcaagccggttggcgaggccgtcgctgaggctgacgttgtgatgatccttctgcctgaccagtaccaggccaaggtctacaaggaagaagttgagccgaacctgaagccgggcgctgccctggccttcgcccacggcttcaacatccactacggctacatcaagccgtccgaggatcacccggtgttcatggttgccccgaagggcccgggccacatcgttcgtcgtgagtacgccgctggccgtggcgtcccggtcgtcgttgccgtcgagcaggacccggacggcaagacctggccgctgtgcctggcttacgccaaggctctgggcgctctgcgtgcgggtgccatcaagaccaccttcaccgaggagaccgagaccgatctgttcggtgagcaggacgtcctcatgggtggcatcaaccacctgtgcgacctcggtttcgacgtgctgaccgaggctggctaccagccggagatcgcctacttcgaggtcttccacgagctgaagatgctggtcgacctggctaacgagggtggcctgaacaaggctcgctggtcctgctccgacaccgctcagtacggcgactacacctccaccgtcatcaccgaggagaccaagaagcgcatgcagtaccagctcaagcgcattcaggacggctccttcgccaaggagttcatggacgaccaggccgctggcgccccgaagttcaagaagctgcaggaagagtactctcacccgcacctcgagaccgtcggcccgaagctgcgcgccatgttctcctggaacaacgccgaggccaaggacaaggacgaggccgagtccttcaacggcaagatcgctcgtacccaggttcagtgattgccgcccctgaaggggatttaagctagcaaaccgccgttcccgcccatacgggagcggcggttttgtgttgttgcgcgcagcgaatcattctcaataacaactatgcgctgatttcttgcaggcaaacgaacaccgaatatgcaagatcgttgatatctcagcctttccccatatgtgggattgtgcgattctgttcaaaagggtgcagagttgttatcgagaatcgttctctgcacacggctgtccatactccaatagtgacctagctcacgttgtggactccagcggggctgcgacggcgttctcggtaggattga

SEQ ID NO: 2640 - DNA, 2793 bp, Unknown
  R36_18m  MAG No. k141_1338
tcggtgatgcgataggtttgcgtatggaagtcgcaagtgaccgcagtgccgtccgcgaataccgaacgctgcaccagcggatcatcatccacgaactcgtgacgaaccagttcctgcatgccgacccgctcatggaatgcagcgaccgcatggcagcgttcgatgtcgttttccgtgcgagcgcgctgttcgtcgtccatgtcgccgtcaacgccgatgtatgcggcatcgcgaatcaggtatggagctccgccattgagcaaggcgtacagcatgtaatcgtcgccgtccaccacacgctccatcatccacggctcgataacgcaatcatggtagacgaggttatacagcggcaccggcacaccttggcgcggctcgttgggtgagcgcatctggaagtcgtatggcgcgtaatggcagaatatcaggcttggcactgcccagtccgatacctcttcggacgaggagaggatgccgtgcgagagcagatattcgaagcattcggcgcggcggtcaaagcattcgcggcgggtcatgcggtgttcggggttcgagcattcgtcgccttcgttgcaggtgaagacatccaagtatgcacagtcgagcttgatgccatgcgcggcgatttcggcgaaattgcggcgtacgtagtccggtgcgagctcggcgcacaggtaggtctggcggccgcccgcccagcgtgcgtgttcgggcatcgtaccgtctgccagccgaatcgcattgttggcatcaaaggtttgcgcggtgaagtagtaatcgcgatactggtcatgcgtgccgaaaatatcgccttgctcatggcaggcgtcgaccagcgacttcatgccttcccagccgcctgcctcctgacaagccggcagatagtcggggtgtgcgttgtcgtatccgggctgtgcccaaccatccaagtgcatgtacagtcggcctgcacccatgctgtgcaatgttcgcatttgcttttcgcgctgtgcgaaggtgaccagtgactcgtttttctcggggtggtccttatcgtagtagtacgagtcgggctgtactttggttttgatgccgatgtgcacccatgaacgaccaatcaggtcacgcacggagggattgcgcgccgccttttcgacgagcgtacgcaagcgacctcgttcattgacgtacgaacgataggccttgcacaccgccgtgtgatcggcgtggtcgaggaactggtagcgtaccacgcggcgataattcattgtgccgaggcttggctcaaaccaagtattgatatgggtgtacgggccatcgctgggatggtcgatgccgtaaccggcattccatggagtttcgcagatggcgatatacccgtgtccgtctgcgcggagctgcgcgaaccacggcatgtaaccgccagccgtttcgaagcggccgtcgaaggcgatatctttggtgctcacggcggtaggccatgtgttggggatcatcacaccttgctcatgggtgatgagtgtcgtgtcatggtcgtcggcgcaatcgaagtccatggctgcgggccacgtcacattggtgatgttcaggccttgctcattgagcggaatccattcgaagagcacatcgcctgaggcacgctccacccatacataggtttcaaaggagtatgcgctgtgcccaaagccggtgaagatgctgcgaatgccggttcccgtgccggtttcacgctgctcatgggtgatggaagtggcatccgcgaacgcgaaggtgccttgcgcgcattgcagggtcggcttgaaatcagcgcaggtattccattcggcaccgtcgcgcgtaaaagcgaactgcattgttcgttcatcgaatcgcacggtagtgccggatacggtgaattccatagttaatgtgctcctgtatgttctcgattgctcccgcttacgggagctcgctcatataacaagataggggtggtctgctgtttgagaccacccccagtcggctttgccgacagcccccgccagcggggggggctagcgctgtctgtttattacttactgcttactgcttcttggtcagtgcggtgaacactgggccgccgccgtagtcgaatgcgacgccggagactgcggaggtgctggctgcggtggcattctggttccacaacgggatagccggaaggtcctgcagcagaatctcctcaccttgctgataatacttgtcggcttcctcggtggacggggcggaaagagccttgtccatcatggcatcgaactcggggttcttgtagttgccgctgttgccgcccttgccgtcggccgaactggaatcgtacagctgtaccagatagttgtccgcggatggataatcagggccccaaccgctacggtatgcggaggtcatcttgcctgaatccacattggacaggaattcgtcggaagtggacatcgggatgctcttggcatcgatatccagcgtgttcttgatgtagttgcagattgcctcaacccagttcttcgcagtgccatcagcattgtatgcaatgccgaactcaccgctccacggggagatggcgttggccttggcccacagttccttggccttggacgggttgtacttcagtacttcatttcccttgagttccttggagtaggcgctgattggggctgcaaggaagtcgacggcgggcgtggcggtgccgtggaagatcttctcggcgacggtcttgcggtcgatggacatggaaatggcctgacgacgcaggttgccttcctcgttctggccgaagtgttccagccattcaggaatggtgaa

SEQ ID NO: 2641 - DNA, 12562 bp, Unknown
  R36_18m  MAG No. k141_1529
atggcaaatggttcgtagcggattcatgcacgtcgctgtcatcaagtatccaaggtttcgcaatgccactcatcgcgcagaccgtcacgggctcaccggcacaggcgacgctgctggattcaatcatgaccataatatcgtcggtattgcggctgccaggtggcgtggtacaagataagtacgaccgcaaaaaacttatgattgcgttcggcctgattggtttcgcactgttcggcatatgcgcggccctaggatgggcgggattactcatatacccggtgctgatggtacttgcgatatgcctcggcatacgctcaggcctcctaggaaccacgagcaacacgatgctacgaggcatcgttcccgatcaattgctgcccaaggcgtcaagcctcaatgatggccgcgatgccgccctcgaactcgccggcgcaccagtaggtggcgtattgatcggcggcggtctatggctgccattcgcagtcagcgcgctgctgaatctattggaaaccgcggcggcgatgcggatcacaaaatactggcatcgtggcgggcggaccaatgcggagggccgcgcccttgccgacgatgaggccgatgagaatggcgatgcggccaacatcactcaggccgctgacgagcaggcaacgaccacgacatcatccgcgtcacagtattggcgtgagatgttttccggattccgctggcttcttagcgagcgattcgaacgtcgcctgattttgtcgagcgcgctggcgttcgcgtgcttcaactcgttcctgctgattacggtgctctcgatcggctccgacccatcacatgtggtgtcagccagtttcatgaacgtttctgtgtctgtgggcgtcatcgttggctcgctcatctcttccgtgctggttcagcatgtgcgcggcggcatagtcgccgtatcgttctacgtgctgatgagcatcggcgcgctcggcgcagcgctggctccgtggattcttgcgcgtatggcgtttctggcaatttcgctgctggccctaccggccggcaatgcggtaatcaacggattccaatcattgctcatcaacaaggagcatatgggccgcgtattcgccggcatgggcatgattgagacgattgctgccccggtgatcacatttctgtccggcatcgccatgcaacactggggttactcagtcacgtccgtggctttgggcttgtgcatcgtggcggccgcgatccctgccgtgacaatgagggaactggtcacactgcctaagccggatggctgggaggaccatatccgcaaatccgggctcaccaagttctgacaacaagtaagggcgactatctcccggatttgtgacgttcggcaaccgtcagcgtcacaaatccgggaagaggaaggtggatacggtttcagccgcgcgggcagcaaggtggacaaatcgttgccggggtggaatcgcggcaagtatgcaaaagcctcccgttcgcgcgcgacgcataagcgcgcaaacgggaggcttcccaaccgcagcatcatatgcagaaataaggagagtaaggcatatgctgccgcggtcacaccccgccgggaacctgccgcaggccgcgtccggcatcgaaagccctgcagtcgatgcgtgcggccggccgttcccggcgcggtggccatgtcagacgtcagtcagacgtcatcacttctgccagccgatgtcctgcggcaggttgccggcgaagccggacgggccgtagttggccaggcccttcttcgcaccgaggtacgaagccgggttggagaccgggatggtgccatacagcttgaaggcttccttctcggcggcgttcacagccttggtctgctcgtcatagtcggagaggctgccagccttcttgacgagctcgtcgatcttcttgctgcccacgtaggagaagttggacgggccgtcggaggtgtacagctgcggggcggacgtcacgaaggtcatggcgctcggagcctgccaagccatcggcagcacctggtagttgccggaagacacggtgtcggagaacttggactcggccacgttcacgaccttgaccttgatgccggccttcttcatcatcgcctggtaggcgttggcgagggcctgctgggtggcgttgtcaccgaagaaagtgaaggagatctcaagggtcttgccgcccttggcgtagtagccgtccttgcccatcttgtagccgtcggcctcaagggttttcttggcgttgtccacgttgtacttggcctcggcgggcaggttgttctcgtagcccttctggaacggcagcagcagctcggagcccggctgctcggccttccagttcaggccctggaactgcacgttgttgtaggtgttcacgtcgaaggcctgagtgatggccttacgcacctgcaggtcgtcaagcggcttggacttgctgttgtactccagcacgcgggtcttggtgctgtagccgatgcgcagctgggcgtccttgacggaacggatggccttgatgtcgtccttggtgttggcctccacggcgtcgatctcgccgttctggaaggcgttgagggaggcggtgtcggccatctgcttgtagacgatcttgtccagcttcggcttgttgccccaccacttctcgttcggcacgaaggtgacctgggagtcggagaaggagtcgaccttgtacggaccggcggcccactcgttgtgcgggttcttcacccagccctgggtgaaggtcttcgggtcggcggccttcgggttcaccagagcgccgaagacttcctgccacgggtagtacggggtcttgtaggtcaccttgacctgcttcgggctgtcgccctgctcaacgctggcgatacggtcgaagccgtcggtgctcggcgggttgtagtccgggttggagccgttgttggcttcccacgtggccttgaaggcggtccagtcgatgtcggagccgtcgttccacttggccttcgggttgatgtcgtactgcacgaccatcgggtccttgctcacgagcttcatgtcggtcaggaagtccgggttcaccttaatcggggagccattgacctggtcggtcatgagcaggctgggctggtaccagctccacagctcggacatgtagccggtgttgccgtcggaagacaggtagttccagttcgggccgatttcgacgatggacagggtcagcgtgccgccgtccttgacgttgtcacggctctggtggttgtcgtaacgctcggtgaccttcggcatgggcaggtcgccggtgtacgacgaatcgatgccggccggcggttcggtggcgctcgaggcattgctggaaccgttgccattgcccgcgccgcagccggcaagcagcatggcaagcgccgcagtggccgcggcgagcgcggtcagcttacgtgtcttgttcattgttatttcctcctctatatggttccgaccgtcatgcgaaatggcatgcaacctgatggccgctcggtcgggaagtgtcatacggccgcagcgccgggcgttcgccgcggcagcgggcctgttgttcggcgctcagcttgggcatgagcgggcagcggcccatgaacgggcagccttcgaacgtctcggtggggctgggcacctcgccctgcagcacgatgcgctggcgggtgcgttccgccttcgggtccggcaccggcacggcgctgatgagcgcctgggtgtacgggtgcaacgggtgctcgaacacgtcttcggtgtcgccggattccacgatgcggcccaggtacatcaccgccacgcggctggagatatggcgcaccaccgacaggttatgggccacgaacaggtaggccacgcccagcttgttctgcaggtcctcaagcaggttgatcacgccggcctggatggacacgtccagtgcggagaccggctcgtcgagcagcacgagcttcgggttgaccgacagcgcacgcgcgatggcgatgcgctggcgctgaccgccggagaactgcgtggggaagcggtccacctggtcggggttcagctccaccagacgcatgagttcaccgatgcgttcgcggatctgctctttggagtagtgctggaccttcatcggctcggccaggatgtcgtagatcggcaggcgcgggtcgagcgaactcatcgggtcctggaagacatactgcacggccgaacgcagctcgcggcgcttctcgcgcggaatcttgtgttcgagcttggtgccgaacatctcgatctcgccgtcctgcggctgcttgaactccatgatctccatgagcgtggtggacttgcccgagccggactcgcccacgagcgccacggtctcgccttcgcgcacgtccagcgtcacgtcgtccacggccttgacctcgccgatcttacggcgcaggaatccgccggcggtcagcgggaaggtcttgcgcatgtgcttgacgtcgagcaccatcttgcgttcgtcgcgcgggatgccggcgaacttcgacttggcggcctcggccaccgtgtacacgtcgtggaaggtcaggcccttgtccacgatctcctgggtgcggtggcaggccacgaactggcccgggcggcccggcaccggctccatggccggctcggtggtgtggcatatgtcggtggccagcgggcagcgcggcgcgaacgggcagcccttgggcatgttgaccaggttcatcggggagccaggaatcggcaccaggcggctgttgcgttcgcggtcggaacgcggcacggcacccagcaggcccatggtgtacggcatggccgggtggtcgaagatggagtcgacgtccgccttctcgaccgggcggccggcgtacatgacgacgatgtcgtcggccacgccggcgatcacgcccagatcgtgggtgatgaagatgacggccgcgccggtttcacgctgggccttgcgcagcacttcgagcacctgggcctggatcgtcacgtccagtgcggtggtcggttcgtcggcgatgatcacgtccgggtcgttggcaatggccatggcgatcatcacgcgctggcgcatgccgccggagaactcgtgcgggaaggacttcaggcggtcctccgggtccgggatgccgaccaggttcatgagctcgatggagcggtcgtgaatctgctgttcggtcatcttcggattgtgggtgaccagcgcttccttgatctggtcgccgatggagaacaccggggtcagagcggagagcgggtcctggaagaccatggcgatgcccttgccacggatctcgctcatctcaagatcggacttgctgagcaattcctcgccgtggtaggtgatggagcccttgacgctggcgttcttgtccagcaggcccatgatggccatggaggtcacggacttgccggagccggactcgcccacgatgccgagggtcttgccggggtacaggtcgaagttcatgccgcgcaccgcgtgcacggtgccggcttcggaggcgaagctgacggtgaggtcgcgtactgaaatcaccggttcggatgccatgccttgcgctcctgtggtgttggggttggtgttggttgttacgttgcttgcgttgcgttcgtcgctcatgatgcccgtctcccctctcactcggccttgccgccggaacgggagtacgggtcgatggcgtcacgcagtccgtcgccgatcagctgcacggagaaggtcaggacgaccagcaccacggacgggaagatcagcacccatggcgaggtctgcaccacggactggccggcgttgagcagcgtaccgagcgaggtgtcgggcgccttgatgcccaggcccaggaagctcagcgaggtttcgctgttgaccgcaccgatcacgccgagcacggtgttgatgaccagcaccgaacccaggttcggcaccagatgacgcacgatgatggtgaaggacggcacacccatgaacttcgccgcgcggatgtattcgcgatcgcgcaggctcagggtcagcgtgcgcagcgtacgggcgtagccgatccaaccgaatgcggtcaggccgatggccagccacagccagtcgctgccgccggccgccatgccgacgatcagggcgatgagcaggaaggacggcacgacgagcagcatatccagcagccacatgcccacgcgctcgaaccagccttcgaagaacgccacggccgtgcccaccagggcggcgatgatcgtggtgccgaacgagctgaagataccgatggtcaacgaacggccgaggccgcggatgatcatcgcgtacatatccgagccaccgaccgtggtgcccagccagtgctgggcggacggcggcgaggcgagggcggcgaaatcgggctcatcgtagctccactgggagaatttcgagccgaaaatcgccaaaagaatcagcagaatcagcaccaccagacccaccacggccgaggggcggcgcatgaagcggcgcacgtacagctgcatgcggccggtgcggtggaagtcgtcggcgctggaagcctcctgggcgttcctggcgtcggcggactgcggttcgctgccctgcggatcggtgagttccatatcctgggcggcggcgtcggagaccatgttttcgttgtcgttcatcatgttagatcgtcctttgcgcggggctcagctcagtcggatacgcgggtcaagccaggcggagaagatatccgccagcagcgcgccggacagcgtgcacacgccaccgaacgcggccacggccacggcaccgttgatgtcgttgttggcgatggtctgggtgaagtacatgcccaggccgttgatggcgaacacgttttcggtgatcaccgcgccggtgaacacgccggcgatggagaaggccacatccacggcggtcggaatcagcgaagtgcgcagtgcgtggcggcgaatggccgcgttgagcgtcaggcccttggcgcgggcggtgcgtacgtagtcggcgttcatggtgtcgagcagatacgtacgctgggtgaggtggtagcccaccatgcccggaatcgtcatcacgatggtgggcaggatcaggtgctgcagatagtcaaacacccaaagcaccgggttggagccttggtaggagtgcaggccggtcacgtagaacgcgcggctgcccacgatgttgttgaagttgatggccagcagcaccaccatcaggcccatgacggcggccgggaccaccaggaagaacgttgcggtggtgttgagcacgcggtcctgccacttgtactggcggatggccgtgtacacgccgatgctcacgccgaagaggatggagagcacggtggcgagcgtcaccagctgcagcgaagcggagatacgggaggcgatggccggcgccaccggcgactggtccgggctcaggccccagttccactgggtgaggatgcccttgagccagcggaaatagcggatgacgaccggcgtctggtcgttgatgttggccagatcgagcgaccggttaatcgacgcgatcggcggatgcggattgcgcgacatgtagttcgaacgcggatccatgaatgcgctggccaggaaatacgtcatcgatactgccacgaacagcatgatcacgtagttcacaatgcgcttgatgatgtacttgaacacccaaccacctcccaaataactagggaagtgataccccccccgctcaaaaccacaaattgagttcaatatatggaatatgggtattgacttttccgactttttcctgtacggaaaaccgcgaaaacacttactgtatattgggcaaacatccgtttgttaattttgtatttcctgagcctttgctggacatgccttatactttcgtgtcagcagtccgccggcccggatggtgacagtccccgccgccggcaacggattatccatcagcatcatcagcatcagacaggggcatcatgacgacagacgccagcgcacgggccatcaaacccgaacttctacgtacgtacaccgaagacttcaacaaggaccgcgccaacctgatcgcggcggacgcggcggtttcggccggcgtactcaaggcggccaccgactatcgcggcgtgcgtgcgctgccgcgcgacttctccatcgaactcaagcagggttcgatcaccaatcaggagcgttccggccgctgctggatgttcgcctccctgaacacgctgcgctacgagcttatgcatcgctggaaccttgaggacttcgagttctccgagacctacctcttcttctgggatgcgatggagaagtcgaacacctatctggagaatgtgctgcgcacgctcgacgagcccaccgactcgcgcctgttcgaggccatcaactggggcccgtccgacgacggcggctggtggcagatgttcgccgcgctggtgaacaagtacggtctggtgcccaagagcgcctacccggagtccgagaactcccgtaattccgatgatttcaagcagtacctcaactccaagctgcgcgagttcgcggccgagctgcgccgccgttcagctgcgggcgctggcgaggacgagctgcgcgcgctgaaggacgagtacatgggcaccgtgtaccgcatctgcgccgtgtcgcttggcgagccgccggagaagttcgacttcttcgcgcgcaccaaggatgatgatgaggataagaagggcgaggcttgcaagtgcaaggccgaggtcgacgcagacggcaagaccgaatcctgcaagtgcggcgactcctgcaaatgcgagggcaaatccgacgccaaggcctgcaagtgcgataaggacaagtccgacaagccgaaaaccggcaaggacgagcgcccgcagattcgcgagatcggtatcaccccgcttgagttctacaagaagtacgtgccggtggacgtcaacgatttcgtgacgctggccaacgccccgctcaagaaccgcccgttcaaccagcgctaccgcatccgcttcagcgcgaacgtggccgaggctggcgatatggaattcgtcaacgtgccgctggacgtgttcaagaaggccgcgcttgaccagctcaccgccggccacccgatctggttcgcctgcgactgcacgcagttcgccctgcgcaaggacggtttcttcgaccagtccgtggtgcgcgtcgaccagctgttcggcaccgagttcaccggcgacaaggcccacggcctcgaatacggcgacagcccgagcaaccacgccatgaccttcaccggcgtgaacctcggcgaggacggcaagccgaaccgctggaaggtggagaacagctggggcaaggacgccggcaaggacggctactacgtcatgtccgacgcctggttcgaccgctacgttaccgagctcatcatccgcaaggaatacctcgatgacgccacccgcgccctgctcgccgccgaaccggtcgagctcgacccctggcagcccctcacccgccgctgccgctgacgttccgctggcgggagcatatattcgaatgccccttctccctgttcagagagaaggggcattacgttatgcgagtacgcccggccgcacctattcgagactatcgcggctgagctgagcaaaagtgccgtcatcatcggccaattgccggtaggttccggcctcgctaattgttccgaactagttatccacagagttatccacatctcccgcaagctagagccacataccccggttttcatagcgagcatgtgaccgctgcgctacggtggcgtcatgaacgacatattgcccactccaccgcccggcgtattcgacgacgaaccgtccggctggacccggccccacacaccgggcgttgcgtctgcgcgcaccatcaatcctgagctacgttcatcaccacgtatggcgagttccgcgccaactgtgattacaggccctgtgtcgccagcaatgagcgaaaccctcacccaacgtaagcgggaaatgcttaaacgatgcacggacgccgcgcaacagctcgggcaaccggtgctcttcggcatggccacatcgctgatactgcaatccgtgccgcttcccaaggattgcgatatcgaccccgccgagctccataccgtctccgactcacaccgcacacgaatacgtgccatcgtgccgccaacgacaccacacatctggaagccgctgagcgatgcgcacaatgtgcgtatcaacaaacatgtgtacgcactggatctgatacacacttgggcacaactcgccgctcatatatcgctcgaatcgctggtcatacttggcgacgcaatccttacggcaatcgcccgcaagccgggtctggcgaacggccgcactgctgacggcatttatcaggacttcgtgcggcaagtcactggactcccgaaattcaacgcaaaatccaagtgcatgatcgctcttgcattcattacgccccgcgtggactctccgatggaatcaaagacccgcatcgcgacgacgaaatacgggcttccgccagccgtgacaaattacacggtgcccggcgcgacattcagcaacggcgcgccgataacgctcgatctcgcttggcccgaatttcgcgtcgccatcgaatatgacggcgatcatcatcgcaccgacaaaaaccagtggcggcgggacaacgacaagcgcgaactgctgcgacatcatcattggatcgtcatcatcgccactgccgcgaacatggccgatgagccatcccaagccgaactcgcctaccgggtcgggcggcagttggcattgcgaggtgccgtattcgatttcactttgacggcaacgccactcgatgagatcgcccggcggaggcgacgaagaatataacgtttatcgcgaaagtcgtacagtatccatgttgcgccgacgctgcgcgactcggtgtccgtgtccgatgtcccggtagcgatgtcaatcgatttatgtgtggaccgggccagatttcgctgtcccggttctccatttcgcccctttttgagcaaccaagacaaaatttcattcacctatcaccccaccgtgcaatattcgccatcgtacatcggcggaattccggggttttgggattacggataatgggcgtttacaaggggggctgtcccggttcccgaaaagaagccgaaatcacgaaccgggacagcgaaatctgtcccggtaatcgcgtcaatcggttgccgtcatcaccggaacatcaactgcgcataggtcgaacgcttcaatgcgcaacaggcatgcgaccatatcgcgatagcgatattccgacggaagtatgggactcaccacgcgaccaatattatttgccgagctttggagcctcgtggttggcgtggcggatcacggcatcggggaaaccggcgtggatgtagtcggacagcatccgcaatagcctctcgtcaaaggtgtgccgctcatcgctgctggcatcgaccaggatgaaatcccatgagtattcggtgtcaccgtcgttgatgatgagtccgcggccagtgatttttgcggccagcaacgcggcgatctgtatggcgcctcgcttgaccaaggccgattccgcttgagtcaggttgcccgaaaatgtgacggtatacatcatcagtccccccttctttgttattttctagaacagcaatgccttattgtaaacagacagcactctgccataatccttttttcaatatgcggcccatggcattcccagcattaaaaaaaaaagaaacccggcggagggggccgccgggtgagagagaagagagaagaagggttcagttatggggttcgaagaacctcgccaccggtatgaacttcattccgttgacatcttctatataaccgctccatgcttggcgaattgatgtgcttgtctgggaaaagtcttggcggagtgtgacgaatttgtgacgcccgccgacaaccggcctcgcattgtcggggcttgaccgcacatacggcaacgggccacctcgcaacacttcatgtgcgaggtggcccgtcagctacgagctagcaatgccgaatcactcggcggcgagcttggccttctcggcggccagacgctcggcttcggcggcgcggcgagcagccaacgcttcatcgaagcgagccagctcctcttccacggcctcggtcgggatcttggcgaagatcggcgtgggcttaggcaccacggcgccgacctcgatcgcctcgctcttccacgggtgcacgttcacaccgagctcgtaatcgccggtgatgatcggatacgtgaagccgggcttgtcgagatcctcgacttccttgagctcaggcagcggcgagaaggtaccggtgccgccgagcgcctcccacactttctgtgcggagtgcggcaggaacggtgcgagcaggtggttcgcgtcagacacggcctgggcggccacgtgcagcacggtgccgagacgagcctggtcgtccttaatcttccacggttcggtggcagaaatgtacttgttgatgtcgccgaccacacgcatcgcctcggacagggcgtgcttctggtggtgggtttcgatggaggagccgaccacgtcgaacgcggcggaagcctcttccagaaggccacggtcttcgttggtcatc

SEQ ID NO: 2642 - DNA, 3266 bp, Unknown
  R36_18m  MAG No. k141_1652
gccggaactgatacgtccgctccagttcgcggtggaggatgtgccgccttcggatccgacgccttggcagaccgagccgaatatgacgtcccagtgcttccccgccagccacggcattcccgcacgagtcgtgctctaccgcatgccgttgcagaccgaggcacctaccaagctcgaactgcaattggccgtcagggatgagctggtggcccgcatagcggaattgtatgggcgcaggcccgaggaaatcgaccccgactggggcctgtgacaacactgcgggccgtgtcacttgtaataaggtagtggcacggcccgcagctatatcgccgccgaaacatcatcaaactgacgcttcggcgagcatacccttctacttgacgatggaggaatcgttccgagcccagacatggaccgtggcgggcatcagcgttgaagcgtcgatggcggacaatccggcgatgtccttgtcttgcaacgaatcgtgactgaaacgcgctccccagctcactttcttggatgagtcctccaacatcagcacgaccgcggtgccatgatcgccggaaagattgccggcttcaatcgtttgtgctgcgttcgcatccagtgtgatttccttggaggttaccgaagcaccggcatcatcgtaggcgcgcaaggtgaccgtcctgcgcgcattggacgtattggccagcgtgatggaggcctttactccgtcgggaagggccaaccccgagaattcggatggctcgccggcattgaccaatgcgaaatcggcttggccggagtcaccggagcgtgtggccttgacggagaacgacacggcatcctctgcggtggacatcacgcccaacgccccatcaggagcctctcccaagtcgatcgccgtcaccttatcggcagtgacggtggcatctttggcgggaaccaatcctttgtcggtaatccatgacagcccggtgctggtgtctgccttggcgaacagataagcggtgaccgcatcgccggcagtgatggacggcgccaccgacgcattggaggcggtcggcagcggcagcgcgaaatcagaacccttcggtgtcagaccatccatggtcaccgtacgtaccacggacgcgataggagtctccttgctggaaacggtcacgaacagaccatgctgcccatcgaccgcggcggacagttccatcgaggactccccctcggccggcacagacagcgtggattgtgtggacaatgccattttcccggctgtctcggaaccccagacggcaatgtcgacggtggtcggcttggtggagggattcgagacgatgagctgctgtgtggtaccggtcgtgccgccggagagcaggaacgactggctgagcgaggtcgatacgcaggatgccgccgatacgcctctcacatcgccgtcatcggcccatgatgcgatggtgccgacggtgccggtgccagctgcggcctgcaacatacgggtattgatcaggcgagctccctgatcgatcttctgagcaccggttttcaccgaggaatcgtcggtcggatcggcgtctttcaaagttacgtcatcggaactggacttttgcccgatcgccgagacagtggcgctgtagacggagccgaacgccgcatagcgcgcttgtgtgctcagattgccgacagtggcctggaaggcgctgtcgccgtacgtgccggtatcggccaatcctataggtgccgggcagtaggtttcggactgggtcggactaactgtctggtcgatggcattatcggaagcggccaccttgtccacccagatattggggatgggggccatgacgagaacgacgaacagcgcaatcaacaccagcatggtgatcacaccgagcacgatgccgatcgcacgtttgaaaccagaagttttgttgctcatgcctgctcctccaatccgtaggacggtcgtctgcgaggcatggcgaccaagcagtacaacgccgtgatcacacctaggcatatcagccaggcgtgtctccagacactatgctgtgcacgttgctgccatgaggtatccacctgctgtgaggtgctgctacgcagcgtcagacgatagtagctgccgctatccgtggagaccagggactgggtgccgttcgatgcggcgatattcgcgctcaactgttcatacggcatgtcgttcgaggaatcgccggtctcgggaaccacgtagatgccgccgaatccaagcgcgctgatggtcgcgatggcctcttcgtcgggattggacagcagcgaggcacaggcctgggccagctgttcgtcaaccgcatcatgcttgccggacagcaggcgcgcccgctggaccggggaactgtcgatcagatcgccgcgcgaggtgcgcatcaccgcatagttgacgatgttgcgggtctccgcgctcacggcaagcacacgatgatcggcactggcctccagataatcggtggtgaccatgggcaggccgttttcggacacgcccagtcccgcatccttatgacgttcgatgccatacatgcattggatgccaatgcagcacaccagtatcagagcaagcaccacacggccagacacgatgagcacatgcagacggtcccttttcggtgcgggatcgctgccagacgcatgcaacggttggaatcgcttcaccgccccaccggcgacgagacacacgcaggcaaggaagcccaatatcatcatcgcgatgccaggctgcgcggaaccggccacgacaccatcggcatccacggctatggccacacggctggaaatcagggcgagcgcgcctccgcaaacgattaccacccacatcagccgcgaggtccgcaacgcgaacggcagcaccagcgaagcaagagcgagcagcgtgatgacgccgaacagcacagtgaccgccaaatcggcatgctcagtcgatcccatttgccatcccagcgcacgctgtgcggcctcaagcaggctcagcgacgccggcgacccgttggcggatgacgttggcaccgtgatgtcgccgaacagttgacgccacatgcccaaatcggcgtaacgcaccgcattgacgagccgaggggccaccgcaaaggcggcaggaaccggaataagcaccagcatggcgcgcttgcggcccacgaacagcaggaacatcaggaacacgacgatcagcgcgaacagcagctgcggttcggcggccaccacagggatgaagcacagtgcggcgatggccgcggcctgaacggatgtgcgcggcttga

SEQ ID NO: 2643 - DNA, 16932 bp, Unknown
  R36_18m  MAG No. k141_1796
cagaaaatcgaccatgtggcgcagatcaagttcggcggtctgcagaacgtggtgaacgccttgggcggtatcgaactgtgctatgacgaggatgttcaggattcctattccggactgaactggaaggcgggatgccatacggcggatggttccaccgcattgtccttctctcgtatgcgatatgccgacgcgcgaggagacttcggacgcaacgaacgccagcgacaggtcatctcggccatcgtcaagaaggcttccagcagtgagaccctgaccaatccgtccaaaatcgtggcagtgtccaatgccgcgatgagcgcactcaccgtggatgaaaaaaccaacccttacacgttgctcaccatggcgttggcgttcaaaagcgccaccggctcgaatggcatctccggcagcgtgtactggtccgacccagattattacgttgatggcgttggctcctcggtgctgctcgatgacgccaggaacaccgaactgttcaatcagcttgccgacggcacgcataaggccggcgccgtgggcaatctggcggaaggctgaccgacgctttcccggagcccatcggcttcatcgtcggcgcatgatcgccaccattgcctacgccgccaatcatgcacgggcaagatgtcatgtggataactcggcaagctagaaccacataccttgattcggcttgcgctttcggcatgcgctcccccacgctggaagcatgacatcacagcagaacgattcgaagcgacattccgcccatacggcatccgccgtatcccgggcgaagcaccgtttgggcgcgccgccattgcgcgcccgcctgaccatgcttgccgcggcgtgcccgatgatcgcgcaggcactgatgatggtcatactgctgttgcacgggcaatggctgttcgccgccatgatcacgccaggcatattcgcctgtctcgtgtccctgctgctgacgctcccctcgcctccaggcccggagaaggctcccgatccgcaacaggcaacgatcgatgtcggtatcacgggcgacgccgatgaccgcgccgcagacctccgtcatgcgccgtcgcagccgatagaatcgctgctgcacttcgcacgcctgccatggcgcgccattgtgggccgctggcttgaaccccttgaccttgcggtgccgatcggcatgaccggaagcgagccgctgatgctcgatctgaaccgtcaggggccgcatgctctggtggccggcaccactggttccggaaaatccgtgttgctgcaaagctggtgtctggcgctcgcctcgatgaacgggcctgagcatctgaatttcgtgttcttggatttcaaaggcggttccgcgttccgcaaactcgaacggttgccgcataccgtgggcagcgtatgcgatctggatctggcgcatgccgtacgcgcgttgcgtgcgctggaagccgaactgacacgccgtgaacagctgtccgccgctgtccatgcttccgatatccgtgatatggtcaatccgccaccgcgcctgatcgtggtcattgacgaattccatgccctgaaggaccagctcccggattatgtgaatcgtctggtgcgtattgcctcgctcggcaggtcactgggcatgtatctgatcgcctgtacgcagaatccgatgggtcaggtcagtgccgatatgaaggcgaatatgtccgtcagcatttgtttacgggttcgggaccgtctgcaatcatgcgagctgcttggtgatggtcgtgccgccgacctcagtccggcaatgcccggtgcggcgttctgcaacgattccgaacaggtgacggcattccgctgtgcaacggcacgcgatatcgatgcggtgtgccgccagatcgcgttcgcatcgcggttcgtcggaagcccgccgcaaccgtccctgtttaccgcgccactcccccggcacgtaaaagaccggactgtggccgaccacgcaccgcaacgcattcgatttggacttgccgacgatggcatcaacctgcgagaggcgacggtatccctcaccggtggcaatatcggtgtcatcggcccgcaggggcgcggcaaaaccacgttgctgaaaacattggctcgacacgccagcatggctgatggcttggcggtacgtgtcagttccccgcatcgccgggtatggggatcgcaatggcttcgcaacggccgctgcacgccgtatgccagctcggatgcaccaccgcctccgcatatcgtgtggttcgtcgacgacgccgatgagttgttcgacccattccgcaccgacgagcaggcgctgtctttcacacatgcgttggccgatgagtccgtcagcgtggtattcgccgtcagcacgattcgcccgatacgtataccagagcattgcaataccagaatcgtgttcccgtgcggggaacgaacgtctgaccttatggccggagtccccgctcgcctattggatacgatgagtcatatcgatgccgacaacgcgggccgggccgtgctcatcgagggcacatcggcatgtctggtgcagtgcgcttcgtgaaaacttcggttttttctcggcgaaacctcttgaaaatcaccacggttcgtggttaccttggtactggacttaaggaacaacaccagccacggggcttttaagggaggcaagcaatgagcagcgcttttgattggcgagccaaggccgcatgtcgtgacaaggatccggaactcttcttcccggtgggcaacaccggtgcagcctatcagcagattgaggaggccaaggccgtgtgccgcacctgcaaggtgattgatgcatgcctgaagtgcgctctggacaccaatcaggattacggcgtgtggggcggcttgagcgaagatgagcgtcgtgcgctgaagcgccgcgccatgcgcgcccgccgttctcaggccatgcagatgcaaatctgatgttttgattatcgcttcgtcatactaggaaaccctcccacttgggagggtttccttatttttgggcttcgcatcactcatcctgagcggccctgagcttcatatcaagcaccacgcgggtgccgcctccgcggcgcggctcccaatgcacggaaccaccgaaatcattggtcacaaaggtgttgatgatctgcgtgcccaaaccagaaccggaagaacgagccaatcctccctgttcttcggagccgagaccggaaccgtcatcctcgaccaccacattgaggttcgggccggagcggcccacggaaatcgtgatatggccatccttgcggccttcgaacccatgctccaccgaattggtgatgagctcggtcagcacgagggacagcggcgtggcatcctgagcgggcatcatgccgaacttgcccatgtagttgatatcgatgtgctggtctttcatcgtggctaggtccacggccatgcgcagcaggttggcaatcaccttgtcgaagtcgacgacctcgtcggcggtctggctcaatccctcatgcaccatggcaatggtctgcacgcggcgttgcgcctcctgcaattccttcttgacctcatccgacttggtcttacgagcctgaagcctcagcaatgcggagacggcctgcaggttgttcttgacacgatggtgaatctcggaaatcgtagcgtccttggtctgcagctcctgctcacgacggcgcagctcggtgacgtcacggcatagcagaatcgctccgatacgaccgttgttgtcatataagggcagcgagcgtatcgagacggcggaacggttggcgttgagttcggagtcgaccgcggctttgcccgccagcaccaacggcagggtttccggaacggggtcgttctccttcaacagctgtgtgccgagttcgctgaggtaatggccaggcatggtggtcagcaggccgagacgcctaaagcagctgatggcgttcggggctgcgtatcgaaccacgccgtccatggtcaggatgatgaagccgtccgccacacgagcgatatggcgctggctcatcaccgaatccttgtaggggaactggcctcgcggaatcatctcgtacagctgtttgcccgcgttaatgctttccgactcatatcgaccgttggattctcgtgtggccatattggtctcacgcacgaccaagcccaaggtcttgccattgtgccgaaccggcgcgtacacgttgcagacggtcgccttgcccacggttctcaataccgtggagcggaacaccacgctggagagcatggcggcgtccaattcgccgaccatgtcatccggcatgacgtttcccaccacgtcttccgcccgtagcgtcatcacggtggatgggcggcattgttcggccaccacgtatttgccgtcaccgttctgtaccagcagcagcaggtcggcaaagctcagatcggcgatcacctgccaatcggcaacgagatgatgcagccactcgcggtcctcgtcgtcgaagtcggggcgcgttgcaaggatgtgtgaaaaatcagccatgcccctatcatacgcagacacgtcgccgccattgcggcaagccacacgggcaagtatgacgactattacgacatcgcatcttcaataccgcaccaatcgcgttgcacggctgcccgccgttcaggcggtcatcgcctcatacacctgagaggacaatgcggcgatctgctgctgcgcggttcccgagaccactcccgaggtcataaccaccatcacataatcccgttctgttccgtccgcggccttgccccacaccacggcggcatcattttccacgccggccagttcaccggttttattggccacctgaatgccagacggtactccggcgggtattttggcgcgtcgcgtctgcccgagcaatacgtcaagcatggagcggctggcttcggcggaaaccagtttgcctcggtacaatgcagcgaggaatctgccgcaatcggaagccgacgtccagttctcggtgccggtcccgtctgtgccggcatcggacaacacccgcaactgcttggatgagctgaagccgtatcgggcggccgtaccagtcacccgttgcatgcctgtggccatgtcgccatcgccgaccatcaataccagctgattggtggcagcgttcgagctgacggtgatcatctggttgatcagcgaggtggtatcttgcccgcccgcggccaaggtgccggcatgttgcttatcgtacacggcaagcatcacgtacagtttgatatccgaagccgccaccatgggctggccgccgacgctcacggttttgcccgtggccagatcctcgacatacaccgaccaggtgcctccattgccggccacagctgccgtgaccgccgaggacacatctgacatccgcttctcttccgccaccgtggtcaggtcgggagcaggtgccgccttgcgctccaaggtgtcatgcacagggcgttgttcgtgtttcgatgacgccgttgacgacgatgccgacgctgttgccggtgagtccgatgccgaggcgacgggcgatgttttggcgtgcgatgcgccgagaccgttatgcgcgtacatccatccaccgacgccgattaccaaagcggcgatcagggcggcgatcaggatcaatcccacgacgctgcctgttgcacgcgtgtcgctactatgcttggtatgctgagccaccgtcactgccccaatgtcttgtcaacactggccagcacccggctcatcaggtccgcggccaccgactgcccctgatattgggtgacaacggccacggcggccttatgaccattggcttcgacgatggcgaagtaattccaggtgtcctggatgccttggcctcggtgggcatgcacgatcatgtcggacggaatggttacgccttcggaagcaatgtccacgttcatcaatgacgcgcctcccttggcgtccactgcggcgagcatgcgggccgcatcgcgggaggaaccgtaattctcataaccggcattgctggccgccacatcgccgaaatcgcggttgaacgaggtgcccttatacccatgcgaagatgcccacgaattgacgccgctccagccacctaccgccgcggccgccatattgccggcattgttgtccatggaacccatcatcgcgtttgcctgcgcgttggcggtgtcatcgccattgtcctgggccgcaagatagaccggcagatagagaccggcagccacgaattgcttgccggactgcgacgtggtcgcgatggtggcgtcctctgaggagtcggcggatgttccatcgatgaccatggcggagacggccacatcggaggacgagtatgaatccgcgatgtcagacaactggctggatgtgatcaccggagtggaaggcttcgacttctccgtcgagcttttcttggacgaatcgtcgccgttcttgtctttggcgctatcagacgtgttcttcttggctttggacttggcgtcagaggaatccgtcgtgccatcatcggcggaatccgacgcatcggacccggtcgactgtaccgatgtttgcgcctgcggctgagctccccacaatcccatgctatgggtgacgaacaagccgatgaccaacgccacgacgcaaatcagcgcgatgagcacaatcaccaccgctttggtgtgatcgccgccaggacgcccggcgggaggttcaggagaagcaggtgccgcagggccagcggtcatgggtcccggtgccataggccccggcaccgcggaacccggcgccgttggcggcgcgacggcgggcaacggcgccgccggctgcttcaccagcgtcagcgcgttatcgtcataggcaggggccgccggattggcctcgggctgctccaatgggcttccgcactgcgaacagaaggcatttccttgctcgttggcaaacccacactccgtgcaatacaccatcaccgaaccccttattgctgtgacgttctcatcttcggattccatagtatcgccaccattgggtaatagtgttcgtgtgagtcggtattgacaagcataaaagttacgctaacgtaggttacggcagcgtaagaagcgtatcgtcaactcgtgaaacgggggcatcaccatggcatcaacaaccgacgacgcggaaaagacgatgcatcacgacgctcataacagcgcgacgattgcagaggatgccaccatcgcatccaagcgtcaggcggctatcgaggcgcgcgaacaggcgttgcaggccaaggctgatgccgtacgggccaaggcccagttcaaggccgaggccattcgagccaaagccgaggagaaggcccggcacaagctcgccaaagcggagcaccgtgcgctgaaaatcgagggcattgcccctgcggaagtggaacgcaagattcgtctcgacgtgcacggacgaccaaagccgttgatgcgcggctggattcacgcgattgccgctcccctgtcattggcggcaggcatcgtgcttatatgcctggcacatggcgcgagtctgaagtgggcgtgtgccgtgttcatgacagcgtcgctgattctgttcaccaattcggcctgctaccatctgggcgattggagcccgcgcgtcaccgatgtgctgcggcgtatcgatcatgtcaacatcttcctgctcattgctggcacgtataccccggtttcgtttgcgctggaaccgttctggcgcaatgtgatcatcatatcgatgtgggcgtgcacggccatcgccatcgtgattcatgtgatctggatcaatgcaccacgctggctgtatacggtggtgtacatcatcttcggcatctacggcctggcttatatggtgatgttctggaattcgccgtatgcggggccagccgtggtggtgctgctgtgcgccggcggtgcctgctacatcctcggcgccatcgtctacgccttgcgcaagcccgacccttggcctcgcgtcttcggcttccatgagattttccactgcggaacggtggccggatatgcctgccatatggtggccatctacatggtgatcgtctcgctgtggcaataaacgctacgacatataagtatgcccccgcctacgggggcatactagtcacttataactcaggccagcggcttggcggccttgaccgtcacggacagctcgcggccgttcggtgcggtgtaggaaacgacgtcgcccaccttggcaccttcgatggccttgccaatcggggaatccggggtcatgatgtcgtagtcggtgccggccacgatgtcacggctgccgagcacgtaggtcatctcgttgccgttgagctcgatggtcaccacagagccctcgcccacggtgccttccggggcattctcgatgatcttggaatcgcgcagcttgacggtgagctcggtgatgcggccctcgttcttgctctgcgcctcacgggcggcctggtagccgccgttctcggacaagtcgccctcggcacgcgccacggcgatcttgtgcgcgatttcctcacgcagctcgccttcacgatgggcgagctcttccttcatcttgttgtatgcttcctgcgtcagcaggtagaccttgtcctcagccatatcgtcctcctgaaccgttgtcgatgctgaaacaattttcgttatttatgacaaaacgccggctatgaccccggcgttcgtcatgtgctgacctatggtcagcgggtggaaatgatgtcgatgacgaacaccagcgtgtcctcgccgccgatgccggcctgcgggatgccgcgggaaccgtagccgtattccggcggaatggaaaccaccagacgcgaacccacgttatggcccggcacagtctggtcccagcccttgatgacctgtcccacgccgatgccgaagctggcgggctgatgacggtcgaagctggagtcgaatggggtgtccttaccccacaccacgccgtggtagttcacggtgacggtgtcgccgcgacgcacgatcgggccgtcgccctcggtcagctccacaaccttgaggcccttcggggcttcgggcgccgggaactcgataacgggcgtggtgccgaattcggcattcacctgaggcatctgatctgccattagtcctccttcaaagacacaatgcgccctaccttagcaccatcggcgaatcggcggtagtccttcatccctgtacgatacgacacgccggccgtatacgtcgattccggtcatcatgctggtgaataccagacatgtcaatcagcattcgacgacattgacggcaagcccgcccttggaggtctccttgtatttggccatcatgtcttcaccggtctgcttcatggtttcgatggcctgatcaagggtcacgatatgtgagccgtcgccgagcatggccatacgcacggcgttgatggcggtgttggcggccatggcgttgcgttcgatgcatggaatctgcaccagtccgcccaccggatcgcaagtcaggcccaagttgtgttcgatgccgatctcagcagcattctccacctgttccggcgtgccgcccatgactgcggcaagtccggccgccgccatcgaacaggccgagccgacttcgccctggcaaccgacttccgcaccggaaattgaggcgttgcgtttgaacaggtatccgatggcaccggcggtcagcagaaacgtgaccacgccctgttcattggcgttgtccacgaaatgccagtaatagtgaagcacggcgggaatgatgccggcggaaccgttggtcggagcggttacgatgcgcccgcctccggcgttctcctcagagacggccaaggcgaagagatccacccatgcggcgtcggaagactcgagcacggcgtctttgcgccggctgtcgcggcgcagcacatcggaattcgaagcgagacgccgatacatcttcggcgcgcggcggggtacgtcaaggccaccgggcaatgtgggctccgccgaggtgcatccgtggtccacgcaggcgcgcataacacgccagatggcatcaatatcggatcggacctggatgcctgagcgtgaagcggtttcgttggcccatacaagttcggcgatgctgagatgatgttcccggcacaacgacaccagttcggcgcatgatgagaacgggtagggtgcctcgacgccgaaatcagtggatgatgattcgtccgcgtcggcaaaggaggtgccttccggaggacgttcatgaatgccgatcatcgggtcttcgggagcgcctttgcgcacgaatccgccgccgatggaataccagacctgttcgtcgaccaagcttgcggcggcgtcgaaagcctggaatcgcatgccattggggtgcgcggccatgcgcttccattgttcgaacaccacgtcacggtcgtagtcgaaatggatgcgtttgaggccggcgaggttcagagtatcatccaacgcgcagatctcgcggatgtgcatcatgtggtcggtatccacggtggccggcagattgccttcgagcccggccatcgcagcacgatcggtgccgtggccgagaccggtcagcgccagagaaccgtaaagcgtgattttgacacgtgcggtgcgatcgaccaaatggtcggccagcaacgaggaggcaaaggcatgtgccgcgaccatcgggcctacggtgtgcgaggatgaaggtccgacgccgatggtgaacatgtcaagcacactgaacatttggctccttctcccctgctggttcggcatgccggtgtcaccaggcgtcatgccatcacgatatcgtattccagcctagcgcccggaatctttcgctttgcgcgatgatggccgcgcgcgtcgtgccggcgagcgataagtcagtcagtgagatagtgcggagaacatcataaccagtacgatgataccgatgatggccaatacgatctgcaccaccatcagcccgatggtcagtcccttcttggtggcgattttgggcgcgtacgcctgtgccaacaggaaggcgatgaagccgaacaccgcgtagttgacggtcagggccatcacatcgctgttcgacaacaccacgccgttcagcggctggttcagcgtgttcatcatcgtgctcatcacgaacatgccccacacgccgtagccgattaatccgacgacgccgtacagccatggcttgagtttgtcgttggcacgcagggtcagggcttcggcacaccacaacagggcgaagccgacgatgtaggtgaacgccacggcgatcagtatcacgatagtcgcccacggcaggagtgcggtcacattgccgatcatggacagatagaatcccgagcaggcgatggcaccaacggtgagtgcagtgcccgcaatgacggcttgggcaagcatggtgggcagggcgccttgttcgactcgttcgacatcggtccagcgtgaagccatgtggattcctcgtttcatcaggtacatcgtcacaacgccacatagcctaacggccttttgtttcggccttataagctctccacatagtaagctgcgagcccctctgacgaggggagctgtcggcgaagccgactgggggagagaccgcggcacagccgcaaaaaacggcatcggccacaggccgatttcaaggtgcctccggtgggactcgaacccgcaatcattcaacggtcaaaccccaccgattccaacgtcttctgaacattctcgacggtctgcgcccacattttgcccacatcctgagaaaacagcagaccgcccatgcgctcagacaggtcgtccagatcctcgtcgaacaggtcagcatacacgtcgagcgtcatggcggccgacttgtggccgagctgccgctgcacggtcttgacgttcgcgccggactgcaccatgaggctcgcggcggtatgccgcagatcgtgaatggtcatatgcccgcgctcgatgccggccctgcgcaacgcgaccgcgaaccagccatcgctccgagtcggattccaaccgttcgtcatgggctcgtccaaaggcttgcctggagcggtgaaaaggaaatccgacggactgcgcccctcgcattgcccggcaagcgatggtctgagaatctgcggaaacatgacgacgcgaacgcgagactcgaagccgaaacaccggaagactgacgacggcaatgaatatggcggcggtattcactcaggatgccgccgcctaccaatacgaagggaacaatgtcacgaatcaccatcgacgttttggaacagcaggccgagcacatgggtttgaaggttttggaatccgatattccaggcaccacctgcggattgtattgcgaccggctgcggacgatctggcttgccgactggttgaacgaccggcagaggctctgcgccctatgccatgagattgtgcacgcgaagtaccatgatcttggctgcggcacgcggttcggagtgaagtgcgagcgtagggcgcggcgcgagacggctttgatgctgataagcccgtccgagttcgccatggccgaacggatgtgggacggtgacacatggcatatggcagccgaattgaacgtgaccacgcaggtgcttgaggactaccggcgactgttggaggaacggtcgcgcatcgcatgattttccgttccggctctattgtaaaagaatgttatatatgtatatatgtttagtttcgcttatatctacagtgtcagaggcgataaaaataagtagacatatcgcttataagtagaacatttggtatagttaaagaaacaacagaaaaagccctccgaagctctagaccagcttcggagggcaaatggaaaaccacacacgattctccacgcaccagtctaaaccgaggcgtggagggaaagcgatggacttcgtgggataccgcaatacgaagctcgttgagcaactgacaaggcaaggccgcatcaccaagacattcaaaggcaagcgcacattcgactccgaccagttcgcactgctgcacatgatggcgtccgccacctacgactggcctttggatgacaagacgcaaggcttgggcaagatgccgcgcacctacacctacggctggctggagatggcacgcgccctcggcatgaccctccccgacggcatcgaagagatcgaggtcatcgggaacgagccaagagcaccgaaacttgaaaacgctgcctatcagcgcataagcaaggccgcgaagaagcttcaggcgaacggtcttatcaaatgcctgcgcaaaggaagcccacagaaacgcaacaacgcggtctggctgctcaccatcggcacgccggaggagaacgctgatgtcgaagcgtacgtgcgcgaacgtatgcgtctctgacccgtggcgcacgcgcagcggactggatgtgacaggcagattctcaaggatggcttgtttgagaaacgctcatgattcatcagccgtcgattggcgggataatccttgttgagacatattgcaggagagcaaggaggacgatatgagaagaatgagactgacggcaacgctcactgcggcgctattgctgcttgccggctgcggggcgcaacaaggagccaacgaaggcaatcagccgcacaagaagcccgagcaagcccagcaacagcccgaaccagagaccagcgagcgcgggaaccgcgtgaagcacatcggagacaccgcatacatctacgctgacgcctcaagaaagacggagtgggcacgatggacggtgacgaacatcacgctcgacgctccctgcaccgacgagtatgccgagcctccggagaacggtcacatggtcgtcatggacgtgactgcccagaccacgaaggacttgccaaccgaccagccgctgtatctgggcgtgacgggcgattggcagtacgtgctcaaggatggcacgatatcgaacgcacccgtgaatggttctgcggcgttgtgcctaccgcaggccgataggctgccggacgtaatcggacccgccagcaaggcccaaggaaagcttgtgttcgaccttccaaccacggacgggtatctggtctataaggacggcgacgtcaccggctgggaatacccgttgagctgaacgacacgaggcaagaggctcggagggttcggtaatgttaaattatgcaatatcgttgaagtgaaactcaaactcacgcccgaaactcaaactcgggtgcgaaaaatcgcatggaacacaatgcccctctctcagctatggctgggggaggggctctttcttatcggctcatcatcttggtcagcttgtagcgcaccgacctctccgcgtcgagaatggcattgcactcatgtcctacaagactcgctccggtcatcttgaacacgatgacatggtccctcatcggatcaccccagtaacgcatctccagcgggtctatcggcatgctgaaccggttgccgtggtttacggcgtagtcatggatggcctgcaatgcgtgttcggcgccttccctgtagccttccaagtaggcttcgtctggttcatcgttgctcatgcggtcaagtatagtgggtgtttttgtgttcatgcgtggtgcttgaatggcatcgttagctaaaagtgaaaggaatggtccaataccagtctaacgagtagtattcgagtggcgtaggaaataaaacctttaatattacattagttcgttcgattttacattagttggctcgattttacattagttggctttgtttgatgtggttttcagagaaaaagcactgaattcagagaaagatcactgaattcagagaaaaagagaccccggccacccgcataccgcgagcgccggggtgcgaatgtttcttcacgatctggctaatcctgacacattcattccggcgcaccgcgccatgtaaaaaagaatgttaaaacatgtattacttatatatgtgtaattgagattacatcattcttggggattctattactttaaattctctccgttatgtaatttgacttccccgttggaatgtgtttacaattccagcgacaaaagaaaaagcccttgggactctggaacagtcccaaggacaaacggaaaaccagctagattctccatgcaccagcatactgcaaggcgtggagggaaagacgttggaagagatgggataccagaacgcgcaagccgtatacgacatcagccgcaccggaaggctggcgaaaaaacgcggagaaaaccttgccgtgtacgccatggcgcaacttgtgctcgactacatggcgatcaacacctacgactgggacagggcacgcaaccagccgccggagaagctgcgcaaggtcaacgttccgtgccgctactacacgaagggctggcgggcgatagccgacgcatacggcatgattctgctcaccccggaacaagccatgagcgggaatgctgacaaggaaatggagaaacgcgagaacaccatccgaaagaacatcagcaacgcttggctgttcctccaagagcgcggcgtgataaagaagctcgaacccgcttcgctcggcaagaacgccggattcctgctgctaatcggcgacgacgaggagaaccgggcggtggaacggtgggcgcgccaatgcctcggactaccaatgagccggtgagccgtgggcatgtccacaagcgccgtgggtctgatccggtcagcaatccttcgtcttgcttttctcgccatccctatcgcgataagcatcgttaaacgggaaaagactacgggttatcacccaaaggatacctatgacctccacgaaagtcgaagccatccaagcgaccatcacattcgacggcaccgaatgatcgaaccagaaagaaaagaacacgtagccaaacacgacaacattcgtgacgaccagctgccaggtcacaaacttcagagattttgtcgcgaccctttcacgaagcttgttcggctgctcttccctatcggccttcagcttttcgatacgaagccgtatcgcggccgtcgactcagcatcaacctccggaacacgatccccgccgtccgaccggcgctcgtttccaccatccgaatcccgcacctgccgggattcaagctcctcggcctcacgctgggcagccgccacatcctccggagtcggctggcccttcacgtcggcatcactcatcggccaatcaaccccaagttcaccaatcgatgcccaaaagcagcatccgacaccccaagcctttcctggatgccatcgagactgtccccccgcgcccacgccatcctgatatagcgcgcaggcataatcaactcagccgcgaacgaattggcccacctctcaaccgggtcggtaccacgagtggacaattcgccacgatattcaacgtagccaaactctccgccatcgtcacgatgcagccaataatggcctatctcatgcgcaagagtgaacttccgcctttcccgcgaatcattcgaattaacgtagattcggacggctcccccgtgtttcttaagaatgaatccgccgacattgtcctccaatggagtgagcacgacttccagacctaattgctccgcgatcttctccggatcaaccggcacggtcagatgcccatcagatgaactcaccgtctccaaacgtgctctgacggcctcttggaagggatctttcacgattgcacctcccacacagtcattcaccctctcattagctatatcctcatgatatacgcggacaagcgtggacatatcgcatcctaagccatcggcacattcgtctcacatcaatccgacagcgattccgtgcccacattttgctcacactcttccggtaattgcagtgatttggagtgatttggagtgaattgcaaaccatgcggaaaccattggaaaaacaaggaaacccggcatccaagccgggtttccgaaagtgcctccggtgggactcgaacccacaagccgaagcgatcgattttaagtcgactgcgtataccatttcgccacggaggccaacttttctattata

SEQ ID NO: 2644 - DNA, 3244 bp, Unknown
  R36_18m  MAG No. k141_1821
cggcgactgctgggccgatatggccgagctcgccaagatcggcatcatccccagccccggcgaattctacggcgctcccgcctacctgcgtttctccgccaccgccaccgacgaggccatccgttccgcctgcgaacgtctcacggcgtaatgagatcgcaagtggcgttgagccgttcacgccccaaactgggcggccttgctgccaaatttgcggcgtacggcatccagtgcggcctcggcatcatgcaaacgtgcctgtgaggtctggccgcgggcattgtcggcctcttcgagcatgtcatccagtgaaggctgcacggccgtagccgccgcctcactgagcgaagacgtgctcataccggccaagcgaatagttttgggcaggggagtggcagactccgccgaggccggcagccccagcatgactttcagctgccgcacgcattccgggtacaacacgccggccgtatcggtcggccgctccatcgtaaaagaccgggtctgatagctcaggtcggcgaaccgcaacttcaccgtcagcgtgcgcgccaccagccccttgcgccgcagcgtgctggctacttcgtcgcaggccgaacgcagtagcccacacaccacgcgcatatcgcgtgtatcctcggccaaggtttcctcggacccaatggatttctcctcgcgcaccgtggtgattttgcgggaatccaacccgtgcgaggccgcccataatccacgtgccgcagccggggagccagtggcgcgagtcaatgcagcctcatccagctgagccaattcagccaccgaatgcacgccccaagcattaagccgcttctccaaagacggcccgatgcccggaatgccacgcaatggcatcatctgcacgaactcagccgagcgggccgccggaatcagcagcatgccgtccggcttggcattggtcgaggccattttggccaccagtttgttgcaggcgatgcccaccgaacacgtcacgtggaagcgctcggccacctgagcgcgaatccacgcgccgattgcgctcggccgcccccactccagcagtgcggcggacacatccatatagccctcgtccaccgaaacctgctcgaaccggtcggtgacggtcaaaaacacctcgtgcatgattcggtgcgacatcatgcggtaatacgccatatccaccggcagaaagacgccgttcgggcacaactgatgggcgcgcgcggccggcatcgccgaattgatgccgtatttccgggcttcatagctcgcggcggacaccaccgcgcgcggcccggtgccgatgatcaccggcttgcctttgagcccggggttgcgcgccacctccaatgaggcatagaaggcatccatgtcgatatgcagcacggtgcatccggtctcgtcgtggccccaatcgcgtttggcggcctcaagtctcggtgcggtgctcatgccaccattgtaggaatgccgaacgaggtcatgctcactatgtggcgcgcatggcgcggcgctcattgtcgtaatgccaaatatcgccggaattccaagggtttgcgcactgtgcggctgtttcgcatggtgggtgcgattccacggaatcgtccacattgcgtcactgtccgtaacgccttccaagtcgctgcgcgctgtcccgactctccgagtagcgtaaacctcgtgaagaaggcagtggtcggtatcctcaaccgtgttcccgtggtgcttatcgtgattggtgaggcactggtgatttatttggctacggccgtcgccaaacttgcgttcacccagctcgacccgctgtattcggtgtggtaccgcgtgggattcatggcggtgctgttgctgctgtggtgcaggccctggagcaaggctaagcgagcgcagctgtttcaccgcgacgcccgcggctgggggctggtcgtactgctcggctgctcgctggtgctgatgaataccctgttttatgtggccatcagcaatatggatatgggcattgccgtgtctatcgaatttttgggaccgctttcggtggcggtgattaccggcaaaagctggcgtgaacgggtcggtatcggcgtcgcggcggtcggtgtggtgctgttggccggcatatcattggccaatccgtccggcaatggcacgtttttgtatggtctgattgcgattttgatcggcgggtcgatgtggggcatgtacatcatcaccggccggcgcgtggcggctggcggcaattcgctggataatctgtgcatcgccgtgaccatcggctggctggtccagtccctgttccttggcgtgccggctgtggctcatgtggttcaccccaaggccgatgccacgtgggcgcttgagcccggcggctcgctgaagctgctggctctgctgtttgtgatttccctgatggcctcgttcattccctatgtggtggagcagatcacgctgcgacgcaccacatccggcgcattttcggtaatgcaatccatcaatcccgccatggcggtggccgtgggactggcgtttggcgagattcccggcgttggtgaaatcatcggtgtggcgttggtgatttgcgcggttatcgttacgttctccggcgatgccgcgcccgcggacggtcaataatgtgtcgttcggcacgccgtatccgcaggacgtggtacagtaatttgctgttgcgcattattgcgtaacgtggagtcatgcctgagtggccgataggggcaccctgctaaggtgttagtcgtgtaaacggctcgagggttcgaatccctctgactccgccgattaaggttccgggtgaaagctcggaacttttttgttttccggaaactccgggttaagtaactcctgaaataaccgaggacgggcggtctccgcttgtggtaagcggagtcggaggtacgccattgtccgtccgcctccaaaccgccattttagtgggcgaacgagtgcggcacgtcgggaaaagtccgagcgacgaaagaaaaatgtccactaagtgagacttttgcgtggtgttcgtgaatggtgattgaagattaaccggtttatatattgcttgtccaatcgcttgctcatcgcctccctccccgcagtacttgaccgagatgggcggtaccctagagagagaagaagagttccgaagggcgggcaaagatgagccatatcgctgggcaggggcaacatcgctccaactcgacacgaaccaaccgtgcggcgctgattatcgtgttcgtga

SEQ ID NO: 2645 - DNA, 4200 bp, Unknown
  R36_18m  MAG No. k141_1875
cggaggaaacggtcagatgcaccttttcaccggcaccgcattgttcgacggtagcgcccggcaatgtcttgatgaatgccagatcgcgctgatcggtgatgaacaccgcgtcggtaccgttgtcgaaactccacttgcgcagttcgctcaccggcatgttcgggatgttgatctgcttggtgggcttgaccagttccgccttttcgatacgggccaatcgcagtacctgccagatgcgcggcttgccgttggccttgtcgagggtcttgtctttggagacgtaggcctttttgtccttgggtgcggcggaaccaacgtccgtgtagacggcggcataatacacgccttcgtcaatgaagatcttggcgggggccaccagcttgcggcgggtacgacctgtaccgtcggtgtactccatgtccaacagcgaatcggtgttgatcgcacgcttgacgatggagaagcttcggggctccagctcatagccggtcaggctcagccacggggtctgaccgggactgacatgacggcgcaaacgctcatacagggattcggcctgcccacgctgcttgtccggcagcaacggcgaatgcgccaggtagctgaccgaggcggtgagcatgctgaggtattgcggcgaaatgccggcaagacgttcaaggcccaacgaattggtggcggaaacaataccctcggcatccagcagcggccagtcgatatcgaagaactggctgccagccatctcaccatcgtcggaaacggtggtcagggtgttgatgtccttatggatgatgttgacgaatttcttgagttcatcatcgttctttggcttgccgataaagcgttcgcccagctcgctcatcgagaattcctcacccagatgagcggagaggaacagcatcagacgcaggcgacgatcaacctcactgcccgtttggaaagcggagccgttcttcttgttctgagccttgatagactcgggatcacccggctctcgcacatcgcgactaatcgacggggaaaccaccgaagcgctcacaggactggcggattcgtcggccagagtgaaccggctggcggcgtgcaaacggcgatgataagcgtccacagcctcttgcgggctgacaatcgtggcccccggatgctcaagcacaaacatggccaaatcgtcggaatcggtgtacgccacgttcaggtgttcgccatccacgtcaacggtggcggcgaaacgacgcgaatcaataaccttgaccagtgaatccggaatgggctgcgtccccaagccaggcgcaatcgaatccaagccaagcccgggaatcggggtctgcggcacacgcggcgtagtgcgcgacacatgctgggtgagctgggactgatccggctcggaagaaatcgacatcgaacgagccagatagttggcggcggcaagcaccggcatatcttccggctcgaacatcaggcggatgcgcggttcgtcgcccaactgcagacgataggatgcgaagtcctggccttccgacttggacgagtactcaggctgccgtgattcgatggcaatgcccatcgcagcgagcttggcgcgatcacgctggaactgcttggcgaacgcggccttggcggcctgatctgccagctctccatacgagtcggcgtaagccttgacgcgctgcgcaatttggcgggatgtgagccattgcgggaacgcggatgacaacacagccagtacgtccagctcgtgcttgccccatttgtcggaaaaacgccgacgtccgcttgtgccctctgccattagtcctcacgtatagttattgtttcgttataagtgcgtatgagtttccccacactcactctatcttagaggctttttccacagttgagcgccatttcacaaaaataatatcttttttatcgttcgaccgtgttgtaaatcacacccaatcgtccggttcgatgccttgcgggccaacgtattcgccgttcggcacgtagctcggctcacccttatcttcaagtttggcgtcggcgaacatcatgacgtcacgtccgaatgtccagtcgccctgaatggaaaccgagttggctgcggccaaagatggcacggcgtaggggaaccgttcgtcgaaatcgcggatgttcttgtagtatcgcggatcaagttcgacgttcgggaagatgtaattgccgtcttccatctcatacgtgtccgtcaggtggaagcgatcggaacgcataatgaacaaatcattggtggttttcaccggaaggaagcgcatacgatccacttggacgcagatagaaccgttgaacagaccgattgcggcacccatggcggtttccagctgaatcacctgttcggagttcgggtccgtgggattcacggtctttttgttacgaatcaccggcaacggcaacacaccatcgcattcggcgagcttgtctttcaaagcgtcgatgcgaatccagatcgagttggtgttgaagtaaggatgcttggcgatgtcttgggccgcttccttatcatccggatggacctggctcatttcacgcagtatcaggcgaccagtggccttgtctcgcacgatatggcctcccttgcgatcggccttggtgcggatagccacttcggccatgaacggggcacctgtgttttcgaagtgctgggccaacgtacgcgaggggcgtgcaccgagattgtcggaattggagatgaacaggtacttgaagccgcgctcctccaatacgtcaagcaggccggactcccagatggtggagaacaggtcgccgtggccgggcgggcaccattccagctccgggttcgcagggtagctcacaggttcgccggtggcggccacgagcttgggttcctgatgctggatgatttccatcggcacgtcatgctggctgaacttgcgatgatgcttgagcgccttcatcgtgtccgccgaagtgcggaaagaattcatgaacgtcagcggcagttcgacgttcaggcgggtgcgagcggtaagcacctgaccgatgatgatgtcgatgaagcgcatctgcttggccttgtgcctacgcaccggcaacagcgacttggccttgtccaatcccatggaggtgcccagaccgccattgagcttgaggaatgcggtcttggcgaaggcgtccacggccttgtcgtggttgatggtctcatagacgtcgtggaagctgggcacgtggccaagcggctcgatgtcgtcctcacgaatccagctggaggcttcttcatggcgccatacgtcatacaaatggcggaactggttgatggcggtttcgctcatgccgtgctcgcgcatcttggcggccgaaagctcgaaagtctcatccacttcgggggtgtttacggtttcttcggggatatccgaggtgacggcgtcggtgtcgtcagcggcggcgatatccagttgggccttatcgtttatttcggtcaattcgggtccctttcatcaaatcaataggaaccagtctagcccctgtttggggcaaacacatacgacggggggcggaggcggtgaattgtcggtgataattccaataacacgccaagatgaagtccgtgtttaatccattacgaatggcttacaaaggtaagtccgtcgtcatgttgtctcatgttgtcgggttataggccaaaatgtgtgtccgttttgtcttgtgttcctttgtggcggtggacgttcctcctgttcgagttgtatgggcggggaactcgaggtcggccagaatgtgtgtccggaatggccggtcaggccttgcggcacaacggttgagtgactttcgagttggcgtggcagattgggtggatgaacacaccttgttgcgccgtgtgcggcgagccgatgaagcggaacggaaggacgagctcgggacggatcaggtggcggtgccggaacgccggctgcgggagctcacgcacccagtcgcgcgacaacagcgcccgtgatctgcggtgcggtctggattggctgttctcgaagcagtcgcaggccgagcaccggctgccggcacgcacgctgcgccgccggtgcgagctcatgtggggcctgtggccgcccgtgccgctggtggacgaggtgcatcatgtggtgcatgtggacggcatccatctgcaccgcgacgcggtggtgctgatcgcggtggccgacgggcccgtgatcggctggcacgtcgcca

SEQ ID NO: 2646 - DNA, 3974 bp, Unknown
  R36_18m  MAG No. k141_1894
acggttggaatcgcttcaccgccccaccggcgacgagacacacgcaggcaaggaagcccaatatcatcatcgcgatgcccggctgcgcggaaccggccacgacaccatcggcatccacggttatggccacacggctggagaccagggcgagcgcgcctccgcagacgattaccacccacatcagtcgcgaggtccgcaacgcgaacggcagcaccagcgaagcaagagcaagcagcgtgatgacgccaaacagcacagtgaccgccaaatcggcataatcagtcgaccccattcgccatcccagcgcacgctgtgcggcctcaagcagactcagcgacgccggcgacccgttggcggatgacgttggcaccgtgatgtcgccgaacagttgacgccacatgcccaaatcggcgtaacgcaccgcattgacgagcgtaggggccaccgcaaaggcggcaggaaccggaataagcaacagcatggcgcgcttgcggcgcacgaacagcaggaacatcaggaacacgacgatcagcgcgaacagcagctgcggttcggcggccaccacagggatgaagcacagtgcggcgatggccgcggcctgaacggatgtgcgcggcttgagcgggtcttcggtatggtacatgcccacggcacggaacacgaatgcgaacgcggccggcaggaacaccattacggtgagcatcggcatattggcctgcgcataccagccgaacataatgccggtggatgcccacaacagtcctcccagcacacgaaccacgtccgagcgggtgaatacgcccgccagcgcccagaacgacaatgcgctcagcggcgcggccacaaacagtatcatcgccagagcggcggtcacatggccgagcgtgaccagcgaggccagcatcagcaccagcagccacggcgtgggcggcgcaggaatgccggtgccgctgccaaacacccatggcgtggtggcggactgcaccagttgagtgaagctggcaccggtggaaagcaacacatcggaatacaacgatccaccggagaatatcgaacggaacaccggccaatacatcaccacgatggccgcaaagcacaccagcgccatcaccacggctgcgctccagcgatatatggtgcgtgtccgcagatgggcacgttccagcggactgagcagcactctgccctgctgggattggaatgcatcccgacgatcatggaactgcttgatctgccgactgtcggcgaacaaaacctgcagggacgatgcggcgaccttcgactgtctggccaccagcctgcgcgatttcatgtttcccgcgatatcggccaaagccaaccatggcaggcacaattgcacccatgcttcatacggcttcttgccgaacatcatggctatggccatgccaaaactgcgaatcagcctccacagccagacgataatccaggatgacatggccaggtcagtgtacagatagcgctgttgggagcgatgcaccgtcatcgcatgattgaccgtgtgatcttccttaagcggctccccgcctcgcgtacgaatgccctcataccgtgcgcgacgatgtgatatctccgcttgcgggactaccaccacgcgtccgccgctcaggcagacacggcggcagaaatcgaccgattcgctgtaggtggtcagccaggcattgatgccccgcagtcgcgtgaattgcgacatggacaccagcgcgcctgccagcgacaccgcaaacacatcctgccgcccgtcatactgctcctgatcgggttctccatcgaccaccagggaatgcacggcgtggtgacccgcatacataccgacatcatgcagatgggagccttcccaatcgcactgtttgcacccgagcacactggcgcccggcgtattgcgccacgcctcaagcaatcgttcaaggcatgagtcatccgaagggcgggaatcatcatggagcagccacaatgcgcggggagcgtcatccagatcggcacgatccaatgcccggctgaccgcatcgccgaaggagcgtgcgcccttggccgagacgatgtgaatggtcacatgcttggactgcggcacctccatcaccggccccgatggcgaggggatgacctcgaacgaggtggttatcctcgaactggtgcgcccggtcgcgtcggcgatgatgacgacccccggaagaacattctgcgtcaataccgaacgcaatgtagaccggaggaaacgcatatcctcctcaacggtgatcacagccgtaatgccggtatccacatcctgcctatgcgtatatggtcgagaagacatggcgtcggccaacgcctcatgaatatcgctattacctgtcggactcataaactcccagtgtacgcaccagacttgaagggggtgtgtgtggaactacgcctgctcccggtgctctcgcttatatcgacggcgttcgcgctcgctcatgccgccccaaataccgaatcgctcatcatggtcgatggcccatttcaggcattgttcacgcacttcgcatttggcgcacacacgcttggcatcacgggtcgagcctcccttttccgggaagaacgcctccggatcggtttgcgcgcacaacgccttgtgctgccaagatacatcgccatcaggtcggaatagtccccacaattcatgccatggctcttcggctgaatcgtcgaccacaccccacatgcgattctccttgcctattgagcttttcatacggactaaattacacacatgcaatttcgtttttgtcaaattctttctcgtgtcattacatcatttttatggaactgtgtgctatggcgcggacacgatgccctgatgccgttgcacatgatattgtgccgttcctgcgcaggaacaccatagcgcaggaacacccggcggatgctgtgtcaaagtgtcattcagacaatcgacagtttcaggaggggttatgacgcaggaatcaggtggggcggatccgcatatcaacccgccaagcttcattcctgcgggaaatcgacgcacccgaccttccgggcaggtgccacgctccttcgcccctgcccgcgcctcacgtcagtcaggtcaggctccatcggcccgtccgtccgtcacgggaaatgacatcgaagagcctcaactgaacgccaacgccacggcaagcgccaacgtcgcggacaacggcaggcggactccgcccagtttttctccgaaaaccggacgtgccacccgcagcacggctccggatgccgccgcaccgcgcagcattccgccgtcgcgagcgcggatgtcttccggctcatcccgcaacgccgtgcgcaatccgtcggatatgtcggtttcccggccctcatcgccagcagcaaacgtgtccacgaagttcagccatcttggccggccggcggcggcaacggcgaaaacggtaacggcacaccggccgcgcgccttgcgcatcatcttatgcgcgattgcggtactggtggcggcgttgattctttctgttttcggtgcctggcaatgggtggacagcaaactgaaccggagcgactggctgaccgacacccccaacacgccggcctcgacctggctgattcttggctccgacgagcgagacggttccaccgattacggcggcgtggacaatatctcaggcttcagaaccgatacgattctggtgctgatcaagcctaaaagcgggccgagttcgctgatttccattccccgcgattcgcttatgaacgtcgatgaccagtacatgaaaatcaatgcggtggcgcagattgccggcaagaaagccttggtaagcaacgtcgagcagattaccggccagaaaatcgaccatgtggcgcagatcaagttcggcggtctgcagaacgtggtgaacgccttgggcggtatcgaactgtgctatgacgaggatgttcaggattcctattccggactgaactggaaggcgggatgccatacg

SEQ ID NO: 2647 - DNA, 4111 bp, Unknown
  R36_18m  MAG No. k141_1901
ccaaatactatattcccacgccctcgccgacctctcatgaagtggtggccgccgtcaaaggggcaggtggtgtgattctgatcgcccatgccggtgatgtgagccgtaaccgcagactgttgtccgatgaccagatcgaggcattgatcagcgaaggactggacgggctggaggtatggcaccgtggcaattcaccggagcaacgagaacggctgctcaccatctgccgccggcaccagctgctggtcaccggtgggtctgactggcatggcaaaggcaaaccgaacaaactgggggagaacctcaccgacgaggccactgtcgaagagatcgttcatcgcggcgtgcttccgctatatcggtgattcagcaatacaaaagcggccttgagataatgcccaaggccgcttatgcgcgattcatggtcacagcgtgccgaagccgacggcgtgcttggtttcggagccgatgatcgcgtaaccgagtgccttggcgggcacgatgatgcgacggcccttgtcatcggtcagatcgatcgtcgtgttgtcggccacggcctgcgcgatggcctggctcacattatcggctgattcgtcggtgctgaagttcaccggtcgtgccacgttctgaatgcccagttcgatatccatataaggctccttgttctgccgtctttgtgacgaacatcatggtaagtggccgtcaccggccgaggttctgtactctattgtgccgcgtgtctgcgtcgtcatgtgcggtgttacgcgctcggcgtggcgcggaacaccgcacacgacattatttggatgatgtggatgattcggccagcggattgccctcgctgtcatacccgtccaacccggcacgggcatcgcgcagagcgcgttcttcccgctccaacagcggaatcaccgtggtttgggcactcgaggctccgtgctgaacgaaactgtccggagtatcgtcattcaccgcatcgtcggtcggggcggcggattgagatgcaggggaagcgtcggttgacgtcgtgccgctatgcccgttcatactgaggagctccttcagcgtgatcgtcaccgaagaatgggaagcgccatgtgagggctgcggtttggtcgatcccgtaccggttgcggtgccggagacactcgcttgcgggtgattggcggtccggtcagtatcgggttcgacttccggggtaagatccacgtcgccagcggccacgatgtcagcggaaccggtgcgatctggatcgggcgtgtcgtccgagacctcggccgccgcggtaccggattcggactgctgcggttgtgcgggtacctgcgtggcgggtgcctgatgacggtcgtcctgcaacaatgtgccgacggtgattgtggagggggaaccgggctccgtcgacgcggcggcggccgaccctgcggctggggccgatgccggagtgtgcttgatcacgcccaactggtgtgcgagtcgttcgacctgtgccttgaactgcatgatgcgattgttgtccgcacggttcaacgcctgaatgaattcgcccacctgttccatctgcagccacaggttggccctgagcatgatgagatcgtcaagtcgagagcccatcatgcggccgtatgcggaaagcacggcgttgcgatgggattcgtcgagcttgccgaaaatccaggcaaggtctcgggccggatcgttgacctgcatatcctgccagttggtcaccgtggtgatggtggaaccggagaacaggaagtcgccgtcggagaatccgccgtgaaccgtgcaggtggagaacgaccatagtccctcagtgtccatgatgcgcgcccagctgtcggtgatttcttggggaacatggccggcggagcgtaagcggcgaatccaggcggtcagctgcgaacgaatctgaccggtggtgactaccggatatttggcattggccagaaaagtcgaaggcagacgatgaatggctccgatggaggtgccgacggccgcgcagtcatccaatgtcaacaggtcgagaggccgcgcctgaccatcacggtggacggcgatcatcacggtcgtctcgcctgtgggaccgggcttgcgcggggtcagcggtgtggactccgcctgggcctgctgccccacggcctgtgcggtggccgtctggccgggtcgggaaacgtctcccggggcgaacgcgaccacacggtccatatcgaagccgaggccaccaagctcgcgcgcggctgccagtgtctgcgccgctttcacacggcggatcagacgtgtacgcccttccttgctgtcagtggcgtatacgtcgtacaacttgcctgaggcatcttgaatcacggtctgatcgatgcctttggcctcgtcggttgcgctggcctgcacgttctcgcgtacaccggccacccacagattcggcaggacggctgaggcgagtgccgccaacatataatcgctacgtttcatcacccttccacactaatacatccgtggcgattcgcaccccagaatgacacgcaaaacgcatgattctggcgatgttttgtcgtgagcccgattcagccataggcgtgagtcgtgccgtgagcgcgaatcgtgccacaatggacgcatggaacaggcgcaggggattcttgaggggctcgatgagcggcagcgtaccgccgcgactacgttgcaagggccggtgcgcatcatcgccggcgcaggtgccggtaaaacacgcacggtcacgcggcggatcgcctatgcctgcgccaccggggcatggaagccggagcgggtgcttgccgtcaccttttcggtaaaagcggcggcggaaatgcgcgcacggttgggccagctcggcgtaggggaaggtgccggacgttccggttcgggtgcgggaactgccggagtcacggccgcgaccttccactcagcggcattgcatcagctcaacagcgtctgggcggacatatgcgaggctccattcccgcatgtgatcgaagatcagcgtgacgtcgtctcccgcgcgatcatccgcgccaccgcacgtaccgatgccgatccgctgaccgttcgcgatgtgctcgccgaaatcaattgggccaaaatctcgttggtggcggtggaagattatgcgcgggcatgtgccatcgcccataggcagccgcccgccggactcgacaccgctcggttcgccgacgtctacagcgcctacgagcaggaaaagacctcgcgtggcgaaatcgattttgacgatattctgctgctcgtatgccatatcatggatgattttcccgaagccgccgcccaaattcgttccaccatcggctggctcaccgtcgacgagtatcaagacgtctcgcccctgcaacacaggctgctgaccctgtggctgggcgggggagggcctgacggcaagagcgcgatgaaccgcaacgtatgcgtcgtgggcgatccggcccagaccatctactcgtttgccggtgcctccagctgggatctgctgcgtttcgccgatgaattcgggccgctcgccgccgatgtcaatctcaacaccgactatcgttcgacgccggaagtcgtgaatctcgccaaccgggtgcttgcggccgcgccgaaccgtgaggattacctgaaactggtttccgcccgcgaatccggcccgcgcgttacccgaaccgcttatgagagcgatatggaagaggcgcagggtgtggcggcacgcatcgcccggttggtcgccaacggagccaagccgtccgattgcgcgattctcacccgcatcaacgcccaacagccggtattcggtgccgctttgcgcgctgcaagactgaaataccgcgttcgtaaggattcgggatggcaatcatccgcgctcgccgacgatgccgcgtccaaacgtgcgctattggaggcgatgggtttggacgccaccggacttgccgcaaacgacgatcccggcgttacgatttccacgattcacgcatccaagggtctggaattcaagcacgtgtttctgatcggctgttcggaaggactcttgccgtacggttcgccggaaacgggggatgcgctggaagaggaacgccggcttatgtatgtgggcatcacccgagctgag

SEQ ID NO: 2648 - DNA, 7461 bp, Unknown
  R36_18m  MAG No. k141_2041
ctccatgaccttcggcaccaacgactccccgctggccggcaccgagggcaaggaccacaagctcaccgcccgcatgatcaaggaccgtctggaccgcgagctcatcggtaacgtgtccatcaaggtgctgcccaccgaccgccccgacgcctgggaggtccagggccgtggcgagctggcgctggccgtgctcgccgagcagatgcgccgcgaaggctacgagctgaccgtcggccgcccgcaggtggtcaccaagaagatcgacggtgtggtcaacgagccgatggaaaataccaccatcgacgtgccggaagagtacatgggtactgtcacccagctcatggccgaccgtaagggccgtatggacggcatgaccaaccacggctccggctgggttcgtctgcagttcaccgtgccgtcccgtggtctgatcggcttccgcactgctctgctgtccgccactcgcggcaccggcatttcctcctccatctccgctggctatgctccgtgggctggtgccatcaccattcgtcagaacggttccatggtttccgatcgtcagggtgtggccactccgtatgccatgcagcgtctgcaggcccgtggcaacttcttcgtcgaaccgcagtccccggtgtacgagggtcaggtcgtgggcgtgaacaacaagcccgacgagctggatgtgaacatcacgctggccaagcacatgaccaacatgcgttcctccaccgctgacgtgctcgaaaccctgaccccgccgatcaagatgagccttgaggagtccctggacttcgccaacgaggacgagtgcgtggaagtcaccccggagtccatccgcgtgcgcaagatcatcctcggccgtgaggactggtacaagtggcgcgccaagcagcgccgccagaacgccgcccagcagggtaagtgatctggtgcgactgtagccgaccattctctctggctcccctctctgaggggagccaagtttattcctcgccaagtcatatccccacctatactgaaacgcatgactgtgaagagcactactgaactgcgtccgtggtcgtatcgccagaacgcgctggtcaaatcgttgatcacgattgcggcgggcgtggcttccgcctttgtgggcacgttcgcccaccgtatgggtgcagaactgagtattccgtatggtctggtgctggcatttctgctgatcggcctatcgacatggtgcgcccgttcgcgcatgggagcggtcggactggccctgcacctcatcgcctcctcgctgaccgcatggggcatggcactgaccaccacatccggcaaggcgctcatcgtcgccggatttcaaggcgacatgccgttcttctcccagcatgccggctacatctggctgtacggcctgatactggttcaagtcgtcctgctcattcttcccgcccgctggttcgttattcccactcattctgaatcgcgcgcgtaactatatatggcggcacatttccgcgaatgcgtcgcgtatcggcgggcgtaggggattacggccgctaccatagaaccttatggcacgcatgaaactgttttacttgggcccggaaggcaccttcacccatcaggcggcaatgacggccgccgaccagttcgccacactcggcgacttcgacctcaccgccctgcccgacgtgcccgcgatcatgcaggccgtacagtcgcgccaaggctggggcgtcatcgcatgggaaaacaacgtcgaaggctatgtggtcccgaatctcgatgcgctgatcgacgcccccgacgcggccggcttcgcccggatcagtgtggacgtggccttcaacgccttcaccgtgcgcggccacagcatctgcgactgcaccggcaaccccgtcagcgcccacccgcacggcctggcccaatgcacccggttcatcgccgaacaccatttgcagcccgaacccgcatcctccaacgccgccgcctgccgcgacctgaagcccggccgcgtggcgctcggccccagcatctgcggcgaactctacgatctcgacaccctcgccgaacatgtgcaggatttcgatggcgcgcacaccgaattccttgtcatcgccccgcgtgatgtggtccaggaattcaacgcccgcgcccaccgcaatgacgccggcgacttcgaaaccatcatcaccttcatcccgctggtcaccggccccggcgtgctcgccgacctgctggacgtcctgcgtgatgcggggctgaacatgaccagcttcatctcgcgcccgatcaaaggccacgacggaacctacagcttcatcgccacccttgacgcagccccctgggagccaagattccgcaccgcactggaagagatcgccggacacggcgactgggcaaaaaccctggccgtctacccacgccgcgaacgcccgaacccgccggtcgacgcctggatgctgcccgagggcggcgtccacatcaccaatcgcgcgtcggaaggctggcagtacgccgagggagcaaggaaggaactgctgtggtagacacagtcggaatcgtcggactcggattgattggcggctcgctcgcacgccgcctgaccgagcgcggcgtacgcgtcatcgcgtggaaccatcgctcgcacccctacgcccaggccgaagccgatggcattttctgcaagagcacgctctccgaactcatggatgccgagccggatgtggtcgtgctgtgcaatccgctcaaggcgatgccctcaatcctcgccgccctagccccgcttatgggcgaccatccgaacaccacgctcaccgacgtgggctcagtcaagggcatggtccgcgatcaggtcaaggctgccgcgctggggaagtgctacgtcggcgcccatccgatggccggcaacgaactgtccggctggcaggccgccgacccgcatctgtacgacggtgccctatgggccatcaccgtggacgagtccacggactaccgccgcttcctcgacgtcgccgcgatgatcaccaaggacgtcggcaaccgcgtcatcgtcgtggacgacgaaacgcatgacaaggccgcggcgatgatctcccacatgccgcatgtggtgtccaccgcgctgatcaacgaactggtcgccaacccggaccgcaacatcgccgccgcgctggctgccggctgctggagggacatgacccgcgtgtccctgaccgacccggaccgcacgcgcgcgatggtcgaggaagactcgctgaacgtcgaagtgctgctgcgccgcatggcggcacgtctgaccgatatggccgaccaactgcacgctggtgccgacggcgagcaggatgtgatgggattcttcgccgaaggcgaccccttccgccggtacaaggccgccgtgacgcgagccggcatcaccgctgcacaagctggtacggccaccgcgcagcaagccgacacaactgccgccggattcccggaacgcgagctcgccgtccccgaagccggctggcagcagaccttgctgttctccgcacgccggggagaagccatcaccggtttcatccatccgcgtcaggccatcgtccaactgcgccccgccatgtaactgcgccccgccatgcagcccgtgtgcaggttcccctcgccgcctgtcacgaagaaggctgcgcgagggggatgaagttcccgcttgttttcgtgagaagaccgtgtggctccgctgttcgaaagacccaaaggagtaaggtagtctgtaccgtttttcgggaaacgcatcgaagtgaatgcggcggatggttaaggggatgatgacgtatgacgttaccaaggcagattccggccggtgcccgcgtggtggtgcgcatcaccgacggcattgacccggtcgaccaccgtatgaagttccgcgactatgtgggtcacgtggtttcctgggacggatacacgttggagatggtgcgtgacgccgccgccaatggttcgcgcccggcccagaacgtgaccatccatcaggaacagattgccacattgaaacccgtgccggagcggcgcaacacgccaccccggccgtaacccaaggccataaagaattcggaggagaacgagagtgtcatctacgcagttcgacggcgatatcgactccttcgtctcctatctgaagtccaaccgcggcctgtcagcgaatacgctcaaagcgtatcgcgcggatctcacggcatgtctgcacctgttcgagctgcgcggcgtgaccgatctgaacgagatcacgctggatgatctgcgcagctggatggcggtggaatcgcgcgatcacgcccgcagcagcatggcccgcaaaaccgtggccgtgcgcgggttcttcgcgtgggcctatgagcatgggctgaccaccaccgacccggccgccacactgatgactccctcgattcccagcacgctgcccgcggtgctcaccgaatctcaagctgagcagttattggatgtcgccgaacaggccgttgcaacaaaccagtacaagggcgatgggggagcggcagccgcgtccggcagcggcagcggcaagacagctgataagtcggccgataccgtaaaccgcagtgaggcacccgcccgtgcagacaagcgcgacaacgcccgagtcaccgccgaatcgcagcgcaacgccgcgattctcgaactgctgtatgccaccggcatccgtgtcgccgaactggtgtcgatggatatcgccgacatcgacttctccaatcgcaccatcaaagtcaccggcaaaggcaacaagcaacgcgtggtgccgttcggactacccgcccagcgtgcgctggagacttggctggaacaggggcggccggtactggcccgtacggcaacggatgcagtcaagtcccgtgctgccaacgccctgttcctcggcgcacgaggcggccgtattgaccaacgcatagcccgtgacatcgtgcacagagcggcccgagaggccggcgtgccggacatcagcccccatgcgttgcgtcattccgccgccacgcacatactggacggcggtgccgatttgagggaggtgcaggagatgctcgggcattcctccttgaaaactacacaacgctatacgcacgtctccatcgagcagctcaagaaccgttacggacaggcctttccgcgggcgtgaccactatgtggacattggttaacaaactcagcaaagactgaacctagccggcaagaacccctgaattttacatgggtgtaacaaaaaatacactgcttgtctcccaagtgcgcaaaaatgacaggtaatcagcaacgggggtggattgttcgagacatcgtgagatgcaagtctcacggtgacggggaatccagccccgtttgcatgaggcggggctgagacgtcctgcaacctaatgaataggagaaatcatatgaagaagaaagctcttgctttcgctgccatggcttgctccgtggccatgctgctgagcgcctgcggcggctccaacagcaacgctgcctccggtaacaccgctggctccaacatcatcactgcgtacaactccgaaccgcagaacccgctgatcccgggcaacaccaacgaaaccggcggcggcaagccggtcgacctgctgttctcccgtctggtctccttcgacaaggacggcaaggcttccaacgaagtggccgagtccatcaccccgaacgatgacgccacccagtacaccatcaagatcaagtctggctggaagttcaccgacggcactccggtgaccgctgagtccttcaccaaggcctggtcctacgtggccaacgccaagaacgcccagaagtgctcctccttcttctccaccatcgccggctatgacgatctgcagaaggatggcctcaagggtgacgagcagctctccggcctcaaggtcgtggacgacaccaccttcaccgtcgacctgagccagtccgactccgtgttcccgattaaggtcggctactcggccttcgccccgctgcccgagtccttctacaaggatccgaaggccttcggcgagaagcctgtctccaatggcccgtacaagctggaccactgggaccacaacaaggaaatcgccctcgtcaagaaccctgactacaagggtaacgagcagcccaagaacgacggcgtgaccttcaaggtctacaccgacgactccgccgcttaccgtgacattcaggccggcaacctcgacgtgatggaatccgtcccggccgccttcaccaagaccttcaagaccgacaagaaggttcaggcttactccgaggtcggctccgtcatccagaccttcaccatcccgtcctcccttgatcacttcaagaacgacgaggaaggtcagctgcgtcgtcaggccatctccatggccatcaaccgtgaccagctcatcgacaaggtgctcaacggcaacgccgccgccgccaccgagttcacctccccgaagaccccgggctactccgactccctcaagggtgccgacaacctgaagttcaacgcctccaaggccaaggaactgtgggccaaggctgacgccatctccaagtacgacggccagctcaccttctcctacaacgccgatggtggtgccaagccgctttacgacgccgtcgtgaaccagctcaagaacaacttgggcatcgacgcggccaccaacccgatcccgaccttccaggagttccgtgacgccgtcaccaaccgtcagatgaagggcgccttccgtaccggctggcagcctgactacccgtccgccgagaactacctgtggcagctgtactccaccgctgctgctgacggcaacggctccaacgacggtgactacaagaacccggccttcgacgacatgtgcaagcaggccgccgccgccaagtccgtcgatgacgccaacaagctgtaccagcaggctgaggaaatcctcctcaacgaccttccggccatcccgctgtactactccaacgcctccggcgcggcttccctcagcgtgaagtccggctacgccttcgattggcagaacctcccgacctacaccgagatgtccaagaagtgagtctgactcactgaacggataccgttaggcagttcggaaataaagggcgaggatcgcaagatccccgcccttttttgttgtgtgaggggtgcttgcttccgctggcgggagctgtcgccgtaggcgactgagggtggtgacaccatgatgaaccaccctcagtctcgcttcgcgagccagctcccgacagcgggaaccaagttaaagtatccactatccgaccgcaaccatggacatatccaccagcattgcccaatctcaaaccttgcgttaacgcaaatttacatatcacagtccgggcatgcggtaaactgtcggagtatttatcgaccggcaggggtcttgttataccctttctggccggtctaggaaataaggagcaaccgtatgggtaagtatcttctgcgacgcattc

SEQ ID NO: 2649 - DNA, 6657 bp, Unknown
  R36_18m  MAG No. k141_2155
cggcgacgacatgcgattgaaacgactgcgcgacgactgggcggacgatgccagaagccgcagcctcgccgtccaggaatggcgcgccgcgatggagaaccgcccgcccttcctcgatgacggacgagaaagacacccggagaatctgtccacgcacgacatggaacgcctcgtatccgaagcgttcgccatcgccgccaacctcaacagcgcggcggacgacgacgaataccgggcagcgatgcgcgagggcctgcacacgttcgacatgctgcgcgaacgctacgggcttacgcaggacggcctgtggataacggccacggacatgaacgaaagccctataccagcgcacgtaggaaaaatttgacagcagcctcgaatccctacctccgtcgcatgtcggtgcaaactcagaaggaatgtcctcccgagagtacacatccgctctcattcattgaggtatcgcgcgtaacgagttttcattgtaaatgccacggtatggtgacggattttggaggacgataatgacaatacaatatacagcgcagccggctgatccggcgtcgagtgcggtgctgacgcgcgggctggtgaagcggtatggggattttctcgcggtgaacgggttgaatctgaacgtgccggcgcatggcgtgtatggtttgctgggaccgaatggtgcgggcaagtccacgacgatgaagctgttgcttgggttggcctcggccacgagcggcgatatgtggatgttgggggagaaggtgggtggccggcacaggttgcaggcgggccgggtcggttcgatgatcgaggggccgagcttctacccggggttgagcggtctggataattgccgtatggtggccgattacctgaatctgccgggttcggccgcgcccgcgattttgcggcaggtcggtctggccggccatgagggcaagaaggcgagggactactcgctggggatgaagcagcggctgggcatcgcgatggcgttgatctcgcagccggagctcctgttgctggacgagccgacgaacgggctggacgcggaggccgtggtcgaggtgcgcgagatgatcatgggtctgagccgcgaacggggcatcacggtgatcatcagctcgcatatcctttccgagatcgagaagatggcgccggtcgtgggcgtcatcgcggccggccgcctgttgtatcagggttcgctcgacagtctgcgcgaggaggggcacatcgatttgcgtgtctccgacccgaagctcgcggcggcgatgctgggctcggaccggatcgactaccggtggctgccgggcagggatggcggcgtgctgcgcctgccggaactgccggaccagcggatcggcaccctgatcacgcagctcgtcggccagggcgtcgcggtctatcgcgtcgcctccgagcgcaagacgctggagcaggcgttcctcgaactgatcgaaagcccgcagagccgcgagcccacgcctcatcaggcgcaaaatgccatggattccgacgccgcacgcgcatccgcgcacgcatccccgcgtcgtccgttgccgatccggcaggctgcgggtcgggcggcgttcgcggcggcggacggaggcgcacgatgagcggcgcggcagtgttcgcggcgacgggccgccgtccgccgcgcccccgcgcgaagaccggcagcccgttcacgctggcgcgtctggagttgttgaaggtgcggggctcgtcgttctggtggatgctgctgggcatgatgctgctggtttcggcgtgggcgggcatggcgttcatgaaacgcgccggcagttccgtcccggcgttgaggtcggccgcgttggccgatggcgaggtctatcaggtcgtgagcctgctggccccaattctggcggccctgttgaccagccgcatcgccgtgctggagacctcggagcgcatgaacctcacatggctgtcgttcggccagtcggacgcggcccggttcgtgggcaagctcatcgtcgccggcaccggcgtggggctttgcttcctgatcccgttgctgtgggtgccgatcgcggcgaaggcccttggcttcacggtggccggctcgttcgccgcgctggtgtgggtgccggccctgaccggcttcctgtccgcgacggccacgagcgcggtccagctgatgttctcgatgatgatcgacaagcaggccatcggcctgggtctgggcgtcatcgccggcgtgctgggctccggcctgggtgcgatgaacagacccgcgcttggctggctgttcccggccggcctgagttcggccgcgagcccgttcgtcagatccgtggatgcgggcggcaacgccacgatgctgctcgccgcgcgcccgtggatggccgtggcctccgcggccatggcgttcctcggctggacgctggtcagcatggtcgtggtcaaggtgaaggagtcaagacgatgacacacgcaaacgcagtgaacccggcaaccaatccggcaatcaacccggccgccaatccagctgccggcccgagccatgccgcgatgccccgcgcgcatgcggcgggacgccgcaggccgtccgtgtgggcggcgttccgctgggagacgcgcaaggccggcaacctgtggtactggatcgtgaccgtcttgttcgacgcaatcggcatgttcaacgggtggagccagtacaccggctaccaggcggagttcgccaggcagggcgtgacctgggccgcgatctggggtcaggcgatcctcctgccgagcatggtgttcatgccggtgcttgtggccgcgttcgccgcgcaggtcgaagccaacgagcatcgaggccgcaactggcagcggctgaacgccgccggcaccgtgaacgcggcgatcgccggcaagatgctgcatgggctcgcggcttcggcgctgaccgtcctcgtgttcgaggcagagttcatcctcgtcggacgcttcgccgccggattcgacctcgcgcagctcggcccgttcctgctgcgcggtatcccgctgaccctgtcggtatgggcgatcatgacgctcacgcaggccgtgagcgcgaaggccgaatcgttcgcgggcacgatgagcgtgatgatggtcctgaccatcggcggatgcgcgctgagcctggccgccccggccatcgccgggccgtatccgctcgccctgatcaccagcgcctccgccgcccgcgacctcgcgaacatcgccagcacggcatccatgctcgcctccacgaccgccgccgccatctggaccgccatcagcgccctgatcttccaccggctcgccaaacaagccgtctgagcaaccgtccacgggctcccctcacctgcgggagcccgccacctaacaccatggaaaggcttcatcatgcacaccaccagccaacacaacgaacgacacgacgaacaacacaacgcgccacacaacagcgaacagtccatacgcctgccgcgccgcgtcatcgccgtgctgatcgccgccctcgccgcgatcatcctcaccggctgctcgaccggcatcggcgtggccggagacaggaacctccaaggcatacgcacccaagacggcgactcctacacgggcggctacaaggccgactacagcaagttcaccggcgaggaggccgtattcggcggcaccggcaagaaggccagcatccacctgaacggcaccatcacaggcacattcggcaccggcagaatcctcgtgaccaacggcagcgacacgaaacgacccgtgcccgccacgaacggcaaaatcgaccagacctacaacgtcacaggcaccagcttctacatctacgtcaccggcgaccaattcaccggcaccgtgaacctcacatccaaggagcaatgaccatggcaaacacatcccaatacccaaaccagcaaccggcatatacgccggcaccgccggacggcgggcggacatggggcggctgcgccagcctcgcattggccgtccttccccttctgtgcacgctcgtgccccagctgctcggcatccacctctacacgacgggctgggtcaggaacatcctcgtcatcatcgacttcgtatgcctcatcgcttcgctcgtcatcgcgatcgtcacctatcccgaacaggcgggaggacacagaatcgtcagtacaatcgcgatactcctatccgcaggcctgactgccgccggcggcatgctcatcttcctcatgttcatcaaccagtaggaatccgactgacaacggaaaacttctttggaagttcatctaaccgcatacacgccatacagcacaggccacatgcgatacgcttcaacacggatggggcagcacccagggaaggagaatcgcatgaccgcaaaaaccggaaacgacaagcgccacgcggttaccggcctgatcggccacgtggccgcgttctggcggtccagcccggtcgcgcgcatggtcgcgccgatactgtgcctatgctacgacgtgatgatgctcaccagaatcgtattcacccatggcgggggcgattcggcagccatgaaactgttggagcatcaatggggaatccccgtactcgccatcctatgtgccttatctgttgtggcgctgtcgttccgtatcagaatgccgttcgctattttgtgtgccatatgcggattgtatctatgcgcttgcttgattcaagcggagccatatctgatgttgcctctcttgtttgccgtctacacgtctacagccttggccgcgaccgctgaacgtgccattgcgggaatggttttgtcgggattgtcaatcgtttgcggcctctggattgcgaccttccccgccttgcagactgatatacttctgcccgagtccctccttgcgtcgatgaccgctattttagctctttggtcgcgcaacatcagtcagcggcggaagggagcggccttggtggaagctcaacagcaacgaagcctggaattggaacaggaacgcgatgaagaacgtcggcgggcggacgtcgcagccgaactgcatgacagcgtgggccataatctcaccgctatcattgcacttactgaaggcttggagggattgacacaggagccggtggaaggcgctataaagagtatcaataacttagctcggcaaagtctaggtgatacacgcgaggcggtacggaaactttcatctccggtgacgttacggaaaacaaaaacaggaacggtggaactgtgcagctggaatgatataaacccgattcttcaacatgctcgtgatattggaatcgccgccattctgaccgagacaggaaggcgtccagacgatctagcccaagctgatttatgcttccgagtgagtcgtgaggctgtcacaaacacaatgcgccatgggaaaaatataacgcgaattgtggtttcatgggatcatctggataatggggaactccatataacagtgcgtgatgatggtaagccaacgctgaacaaagataaccgcgctaaggggaccggtttcgggcttgctggcctagtgactgaagttacgcggatcggcgggcaccttcactatggctcatcatcagggcaggggtggactgtttcagccattattccacagcaaaaacgtccatatattcctgtgcaggagggaaacgatgattaacgtaatgatcgtggacgatcagcagccgaccagaatgggtttttcgctcatggtcatgaaagatcctgcgcttcgcatgacgttgcaggcggggaatggacaggatgcccttgatattcttgcggcactgcaattacatgggcagagcctccctgacgtcattcttatggatgttcgcatgcctgttatggatgggctcgatgccacggcaagaatcaaacagttatatccttcaatacgtatcctgattttaaccacatacgatcaggatagctatgcgtttgggggattgagcgccggagcttcgggattcttgcttaaggacgttaagactaaagacctgtgtcgggccattcactcggtgtacgatggagacgccatactcacaccacggattacaaaggaagtgattcgccgaggggttcccaacgtcagcatcaatgctgacattctggccatcagaagtaaattcgattcattgggacctcgcgaattcgaagtctcagcactggtcagcgaaggaatgactaacgctgaaattgctcagcgtctcggaatgcaactggaggcagtcaaaaaggcggttagtaggtctcttgccaagctcgatgtcaaagaacgtgttggtatcgcggtgctctggtataaggccggaatgccgaatctgcagaagtgacagattccgtagaataatgtagggtttctgaatcgtgaagggctcgtagcgggcgaacccgtgacggtccatgactgtcctcgtttgaatggcgatcggcgcgcatcgtggtaccgccgaccggtattttctcacgtgaatgaagtagcttcagggaatgagtaacagaaaagccaccggcgacacgccgatggcttcaggtgagctcctgcgactgggcttgaaccagtgaccgtccgattaacagtcggatgctctgccaactgagctacgcaggaatgtctgctgtgtttgagatttctctcgcgcacaagtcacacatcttacatgcttgccacgaaaaag

SEQ ID NO: 2650 - DNA, 3509 bp, Unknown
  R36_18m  MAG No. k141_2179
acgggcggccaccaccgaagaggtgatgacctgccacggctccacgtccaagccgaagcccttgagctggtcggccaccacgtgctggaagcgcgaggagttgttcgtggtgtattcgatggtcatgccggcggcttcggccgcacgaatggaatcggctgcgtattcgaccggattcttgccgcgatacaccacgccgtcgaggtccagcagcgcaagctgataggcctcggcgagcgggcgatcggtgcctttgaggaaacgggtcattacgccgctcactcctcggtttcggtctcggtctcgtcggactcagccggttcaacggcatcgtcagcggactcggaagactcctcggcttcagattcctcagattcttccgatgcatcctcggactcagcattttcgacatcggcctcatcagactcggcatcgccgtcttcagcctcgtcgtcctcatcgccgtattcctgctccggatccggggcgtactgcgcctcgtccggatcgatgccgagcttctcgagcacgtcggagtcgtcggtgatgtcttcgagatcgtggtcaatcaccacgtcgtcgctgttttcgtcaatctcctcgtcggcatactgatcctcaagacggtccagcaggtcattaagctgctcggcttccttgctgcggccggcctcttcaaggaagtactgctcggcctgcacggcacgcatacggtactcacccggaagaccctgagagcggccgacggtatgaaccacttcaatggccttgtcccacatctccaaatcgccaagggcaccggcatacaccaggaacatctcgaccttgggagcgccatgcagctgcttgccctcatcggacagcgccagttccacggccttcttcggttcaccgacaccacgctcgcagtcagcgatgaacggcaggtagtcgaggaagccgttcatacggtaggcggtacggaactcacgcagggacagcttgtagtcgccctgacggtaggccacgaacgcgagcgtctcgcgggcaaagtcgatgcgggaggcctgacgggccacccacttggcgtgctccaaggcaagttcgggatcgctctcctccagcgcgaaagcggcgaggatgtgcagaccaatgttctccgcatgctccttggacaggccgcgcagacgttcgcgctcatccttggacagcatcgaccattccatgcccttgggcatcttgggctcgtcgggacgacggtcggtgtacgggttctgcgaggggaagctcatcgtgccgtcggagttacggcgcggacgcctcatgtattcagagcgcttctcctcacggtactggcgcttctcttcctgcgaaaactcgcggaattcgccgtcacgacggttgttgtcgcggcggtcgtccctgcggaagttgcggcgatcgccatcacggcgatcgtcgtcgcggcggaagttgcgacgctcaccatcacgatggaaatcacggcgatcgttatcccttcggtcatcgcggcggaagtcacgacgatcattgtcacgacggaagtcacgacgctcaccatcgcggtggaagtcacggcgatcatcgcgacggaaatcacgacgatcgttgtcacggtgctggtagcgcgggttctcgccgttctcgccttcgtgggaacggtagccgccttcgcggcgcggcttgaaaccttcaccgtcacggcgcggaccactgccgcggtaaccacccttgtggaagccaccggacttgccgtacgacttacggtagccgccgtggccctcgccatcaccatcacggcgcggcgcgtaaccctcaccatcctcacggcggcgcggcttgaagccctcgccatcgcggtcgcggcgcggacggaagccgtcgccatcgcggcgcggaccgttgccgcgatagccgcccttgccaccgaaaccagagcggccgcccttgtggaagtcgccacccttgccgtacgacttgcggtagccgccgtggccctcgccatcaccatcacggcgcggcgcgtagccttcgccatcctcacgacgacgcggcttgaaaccctcaccgtcatgacgcggcttgaaaccgcccttgccgcgcggcttgaaacccttgccgccgcggttgcccggtcggcgatcgccataccccttatggccgccgccgtaggacttgccggaacgctcgttaccttctgccattacttgttttccttaattcgttgttgattaacggttttccacggcgccgagcgccttcttgccacgacggatgagcgcgaagcggccggccaggaagtcggcttcggccagcacctgctcctcatcctcgatacggttgttgttgagatacacgccaccggacttgatggcgcggcgtgcctcggaagcggacttgaacagtccggcagcctgggcggcgtcgattacgcgatcgccgggcttggagacggggaagacgtgctcgccggtctcgccgcccaccttgacaccatcgagcacggattccagcgtttcctcatcgatgtcttcgaggttgccaccgcgtccgaacagcgcaccggaagcgtcgatggcggcctgggtagcggcctcgccatgcacgaagctggtgacctcccaggcgagggtcttctgggcctcgcgcttgccggggttggtcttggattcctcgaccagtcgttcgatttcggccttgggcaggaaggtgaacgccttcagcaggctttccatctccacgtccgggcggttgatccagaactggtagaacttgtacgggctgagcatcgtggcgtcgagccagacggcgttgccctcggacttgccgaacttcttgccggaagcatcagtgatgatcgggctggtgaacacgttgacgtccacaccgcgcaccttgtggatcaggtccaggccggaggtgaggttgccccactggtcggagccgccgagttccagcgtgcagtggtattcgtcaaacaggtggaggaagtcgttgccctgcagcacctggtagctgaactcggtgaaggagatgccttcctcagagttcaggcggcgggcgaccgtgtccttggcgagcatggtgcccagacggaagttcttgccgacgtcacgcaggaagtcgatgacggtcatcgaggcggtccaatcgtaattggacacgaaacgtacggcgttcgcgccttcggtgtccagaatgccgccgatctgattcttcaggcgatcggcccagccggccaccacgtccttcgggttaagcgtacgttcgccggactggcgcgggtcgccgatgagtccggtggcgccaccgaccaaagcgatcggatgatggcccgcaagctgcaggtgacgcatgttgatgagctgcacgaggttgccgatatgcaacgatgcagcggtgggatcgaagccacaataataggtgatgggctcgccgttcagtgcttctgcgagtcgatcccggtccgtggactgggaaatcaacccgcgccattccagttcctcaag

SEQ ID NO: 2651 - DNA, 8945 bp, Unknown
  R36_18m  MAG No. k141_2431
ccatatatggcaaggtttaccgagaatcgttggaccagcgcgattattcccgcactgctgattcatatcccaatcggtaccgtctattgctggagcgtgttcaagcagcttatcgctgaccgtctccacgccagccccgcctccgtggaatggggcttctcactcgccatcttcttcctcggcatgtccgccgcgtttgccgggccaatggtggagaaaaacatcaagaaatccgcactcgtctccatggtctgcttcgtggtcggcttcgccggcacgggcgtgagcatcgccctgaacttcctgccgggcgtgttcatctgttatggcgcgatcatgggcatcggcctgggcgtcggttatctgactccggtcaagaacctgatgctttggttcgccgacaacaagggcctcgccaccggcatcgccgtcgccggcttcggcctggccaaggccattgccagcccactgatggaatatctcatcggcacggttggcctggtcagcatgttcttcatcctcgccgcggtctacgcggtgatgatgttcgtcggcttcctgctcatcaagcgtccggccggctgggtgtacgatcccgcgacctcacacgtcagccgcaagacaatcctcaagaagcccgtgttctggggcatctggatagccttctatatcaacatcacctgcggcctggccctcatcagccaagagaaggacatcctgcacgatgtgctcaaggccttcccgcagtatgccaacctgagccccgccaagtttgccgccgccatctccggcatcatcggactggtgctcgccgtggactccgtgttcaacacggctggccgcgtgggcttctccacactctccgaccacctgaagcgccgcgagaccgtctatcaggtaatcttcatcatgtcgattgccgtgtgcttgctgcagatcttcaccaacagcatcgacaacgctctgctgtgggccgtgctggccatgctgttcctcgtcaacgcgggctatggtggcggtttctcgacgctgcccgtgctgcttgatcagcacttcggcaccaaaaccgtctccaccacgcacggtctgacgctgagcgcctgggcgttcgccggtctgtccggcaaccagttggcctcgttcgtagttgcccacgcgcctgatcaggcccaccgctacgccgcactcatcccggtgctcaccggcctgttcgttgtggccctgatcagcatcagcctggtcaagtacctcggcgacagaaacgtcacgaaggccgtcgaagaccgaggctgagctgccgcaaaacaacgattctgccggagtcgggcgcatcgatcgcatcagtcgatgtacgtcacgattttggcagaatcgttgttgttgctgttgagtacctgaggtcgtgcggcttacgcgccgaccagttcgagcatttgggggatgctctttttgccgaattcgacttgctgggtgccgtcggcgtgggtgatgacgatgcagggcacgctcatcgcgccgtactggtccttaagttcggggaagtgcgagacgtcgtaggcttcggcgcgcacggccgggctcagggaggcaatgcgctgggaagcaagcacggtttccgggcacatcgtgcaggtgagcgagacgaggatcatgatgttcagcgggtccgtgatggacttcgcgcgttcgaccaggtcatcgcccagcggctggccgggaccggccgcgttgtacaggccaagcacgaacgagttgaactcgtggccggaaggtacgccgtggaaggccagaccggtgaagaccagtgaaccattgccgtccttgccggccttgccgtcgccctcagccggcacgcagatgcgcacagttgggcgggcgagcggcaggacgccggcgacgtcgaatgtggcgcggccggaatcgtccaacgaaccataagtgggcagttcggtgccgtccggcaaagtgacggccaatggctcgccaaccaccaaagaagtaggcacagaagcaccatccaccgccgtgatcagccctgcggcatcgacggcgaccgagttcagcttgccattcgacaacgcgactatctcgccgatgaagccctgcaattccgccgaaagcggggtgctgtccagctcaagggcaagggtgaccgggcgggtcatgcggccgaagaccacgccaagctgctgcttgatggcggcggagaacagttcgccggacttcttggcggcgttggatgcggcatcggcactgcgcttggcgggagccggggtgggcgtcgtgccagcggccgaggcggcggaggcggctttggcctcggactcctcataagcggaagcagtgggacgcggcggcaccaagccggttttctcgctcatctgcttggcataacgctccagttccacggcggcaatcgcaccgtcggcggtggcggtgaccacttggcgcaggttcttgacgcgcagatcgccggccgcgtacacgcccggcaccgaggttctgaggtagtcgtgcgtgaccacgtaaccgtggtcgtcgagctccaccacgccgcgcaccaaatcggtggcgggcacatagccggcgaacacgaagacgccgaaggtgccggcgtcggcgggcttccacgtttcggtctggccggtggcaaggttcaggatcgaggcttctcgcaggcctccttggccggcggtgacgcccttcagctcgacctgataacgcacgtcgatcttcgggttgttcttggcttcggcggccactgcggcatcgcaggtgaagtccggttcgcgcacgagcacggtgactttggaggcgtatttggtcaggaacacggattcctcggctgcggcgaatccgccgccgaccaccagtacttccttgccggtgaagaactcgccgtcgcaggtggcgcagtaggccacgccgcggccggcgtactcggcctcgccctcgaagcccagcttgcgcgggctggcgccggtggcgatgaggatgccgaacgtcttgaggtcgccgcgtgaggtgtgcacggttttgatgtcaccatccacgtcgagaccggtggcttcggcggagaggaattcggcaccgaagtcctgagcctgctggcgcatggtctgggtgagtgcgcggcccgtggtgcggcccacgcccggatagttgacgacttcgttggtgatggtgatctggccgccgaaatcgtccttttcgagaatcagcacgcggtagcgagcgcgggccaggtacaggccggccgtcaggccagccggcccgccaccaatgacgacgacgtcatagagattgttggtctgagtcatgaaaactcccttacatacactggctcccctctctgaggggagctgtcgtagtgagactgagggaagcatatcggatcaggctagctctcgcgagcactccccccagtcgctttcagcgacagctcccctcagagaggggagccaaggttaccgcctattcagtgtcgatcacagctggccgacaaggtcgaggctgggctcgatggtttcctcgccaggggtccagttggcggggcagacctggtcgccgtgctcgtggacgaactgggaggcctgcacgcggcgcagcagctcctcggcgttgcggcccacgttggaggagatgacctcgtaggccacgaccttgccctccgggctcacgatgaagtcgccgcgctcggccacgccatcggcctcgttgtaggtgtcgaggtccttggccagcagggcggtcgggtcggcaagcatcgggtactcgatcttggcgatcttctcgttggcgtcgtgccaagccttgtgcacgaagtgggtgtcgcaggagacggagtagatctcgcagccgatttccttgaacttggcgtagttcttggccaggtcttcaagctcggtggggcacacgaaggtgaagtcggccgggtagaagaagaacagggaccagtggccgagcacatcgtccttggtcacttcgtggaactcgttgttctggaatgcgttcaccttgaaatcggtcagttcatgctgcagaagagtcatcatcggtcctttcgggaattgttaatcttcaagcgtttaccaccacctatcgtaatgtggtgagccacggctcgcgcgggtgtaacgtatgagccttatcacaccacccgcaacccttgtgctgactatcatcacggcccacccttaaacaggattgagatcgtgagcgttctcattatgctttgggcaaagccagattatgcacgcagtcgcgaatccgcacttccaatcgctactatgggtaccagcagtccgctgataatggaggtttcatggctcagtcagactttgaacaggaatcgaccgcgaacgcaacgtggagtcgcatgctgcaaggcaaccggcgctttgccgagggcaagcccgaccatccatggcaggatcaggagacccgtcaaacgttgcttgatggccagaacccggatgccgcggtgctttcctgctcggactcgcgcgtgcctccggaaatcatttttgatcagggcctgggcgacctgttcaccgtgcgcaccgccgggcaactcatcgatagcgcggttatcgcctcgctggagtacgcggtcaagaaactgcacgtcagcctgatctgtgtgctcggtcacgagcactgcggcgcaatcgaggccgccgagcaggagctggacgacctgatgcacaccatcacttccgaagccgacggctcactggaggccgcggatgcgatggacgacctcgacgagcacatcgccgccgccgaatcgattattctgcgccaggccggcatgtccgtctggcaggcgcgcgaagccgagctcgacgcgcatgaagacatcgagcgcgtacacgtggcccacaccatcgagacgctggtggaacaatcccccatcattcagcaggcattggctgccgaccagctgatgatcgtcggcgcccgttaccagctcgacaccggcaaggtcgaggtgctgagtttctgaccatcagtcagaccccgttcaccgggggtaatgcggtcgtggtacatctgtgtgcagagagatcgaagaacacggaagtctgaaccaatgccacctgcccttactattcactacggatccgccacctatacccccaatcctgcacgtgccacgaccatcgggcgtgcgccggattgcgatctggtgattcacaacccgtacgtatctcaccatcatgctcgcgtcacctttaccgacgatggttggctcttggaagacacgggtagtgcaaacggactgtccatcaacggcattcacaccacttccgtactgctgctgaacagcaccaaagtgacgctggcacaaggtgccaccatcgtctgcatcgtcggaaccagcgggccgtccacgccggcacagccccccgcgacgccctgcggcaaacgtggcccagcctgcgctaccgccggcaccatcagcgcaaccggcacaacccacgcaactcgcgccgcaacaggcacgcccagtagtgcaacccacaccaccagcaccgcaaccggcacaaccggtacaaccgcaaccaacgccagccccgctggccccgcaccgcgtatccccggccctcgcgcacctgcaacagcaaccccgcccaacagcagtggcaccgacggcagtatcgccagtgccggtatcacccgcatcaccatctccgtctccctgcgcatccccttccccatcgaatgccgccggcaccgttctggcaggcagcacgcaagcggtaaggctcgaatcccaactcaccaccaaccgcgtgcacgggtccttcagccccgagcacgacaccacaggcgtcatcggccgcgatacctcctgcctgattcgcatcaacgattatctggtctcccgcaaacactgctcgctggaaaccaccagcagcggcatcctgctcactgacctgaactccgccaacggcacttacgtcaacggccgccgcgtcgcgaagatctggctgcgggaagacgacgtcgtcaccgtcggcaacaccgacctgatcgtgcatgaaggcgtgctgtgcgaccgcacgccgtttgtcagcaacgacgcggttatcgccgaaaacatcggactgaccgtgggcaaaggcacccggctgcttgacggcatcaacgccgtattcgccaagggcacgctcaccgccgtaatcggaccttccggcgccggcaaatcaacattcacctccatcgtcgccgggctcaacagccccacggacgggcgcgtgctgtttgatggatacgacgtgcatcagaacatcgaactgttgcgcagccgtatcggattcgtgccgcaggacgacgtggtgcaccgcaagctctctgtggacgcggcgctcgaatacgccgccaagctgcgcctgcccggctcaaccaaggccgagcgcgccgaaatcatcgacaacgtgctcaatgagctggaactcacgtctcgccgtaagaatcgcattgacagactgtccggcggccaacgcaagcgcgtgtccaccgctatcgagctactcaccgaacccgaactgctgattctcgacgaaccgacctcgggcctcgacccggcgctggatcttacggtgatgaccatgttgcgccaactggcggatgccggccgcgtggttatcgtggtcacccattcactgtcgtatatcaacaagttgtgcgataacgtgctcatgctcgctcccggcggccatccggcattcttcggcaccgtgcaggagatgagccaggcgttcaacggcaaggaatgggccgacatcttcaacgatgtcgccgaatctccggaacgggtgtattcgattactgattcacgccagcgcaccatgcaggccgagtccaccatcacgcggcacaccgagcatgagaaaccggcaaagccattccgcatcaaacagaccatcactctggtgattcgtcagctgcatttgatcatcgccgaccccggattgctgatcttcctgctgttgctgccattgctcctaggactgctgtcgctggttgtgcccggttctcatggcttgggtgagcccgatttcaaagacgccgccaccgagccgaaccagctgcttgtgctcgtcatactgggtgcctgttttatgggatcggctttgtccgtgcgagacatcgtctccgagcgagcgatttacggccgcgagcgcgcggtgggtttgtcgcccacgtcatacaccgcctcgaaactcatcgtgatgggtttgcagaccttgttgcaggcggcgattctgaccactgcggtcagcctcggcaagcccggcccggaccatggtgtggtcactgattccggcatacccgaactggtgttggcgatttggctgactgcgtggacttccgcattgttgggcgaagtcggctcggcgttggtgaagtcgggagaacagacgatgccattgctggtggtgctggtcatggcccagttggtgttctccggcggcatgattccggtcaccggccgcgacagcctcgagctggtcagcatgatcttccccggacgttggggcttctccgccgccgcctcggatatcgggctcaacgatctgctgtatggccccaccaaggtgccgatgttcaaaaaggatgatctgtgggagcacaccacggatcagttctggttcaacattggcattctggggattatggtagtcgtcttcaccattgtgctgcgtatttgcgtcagcaatgccgtggccaagatgcgtcggcgctcatagaactggatcgaaactagcccgcaaccggcttacttcattcattaggtcaattatgcgttcatttggtcactgcactccaacactgaccattgaaatgccgccattccaacgcctcaccatgccgacaacccaccaaatgaacgcgcaacctaccaaatgaatgaacccagccctatatttggtgctacaacgactgcaaatactgccccaaatgcggcaccgcaaattccagctgcccatgacctgccgggcggatgagtttgtccttgaatcgtcgaaggcgagcagcgcatcggaaacaccggtcgacacgtcgtccgcggtaatgacatttgaacctcgacgttgtgtggattgccacatgtagtagccaacaagctgcaccatgtacgggtatccttcagactggcgagcggcttcaagcgcatcttccccactgatggtcttgccggaatccgcaactgtttccaagaacgcattcttgacgtctggaagcggcacgttatccaattcgcggcgtagcgcacggcgcaggaatgtggttacctcgttatccagcaaatcgttgatcatatatggcaagccagcaaacacgatggcaacgcccttcttatcctcatcaggcgtatcactttcatcggcatccgtaatgacgtgctgcacggctgtagcaatagccaccaaatcatcatgcgaggccgcttgcgtctcatcgatagtgatgagaatgcccttccccttgccgagtttcttactgcccagccagcacaccccaatttgacgtgccgctcccctagagttgaagccatgtcacttggtttgaatatcctcctgatttttgtatttctcgttatcggttccgtgttctccggcaccgagttggcattggtctctctgcgcggctcgcagatcgagcaaatggagcaggaggacgctcgcggcgccaaagtcgccaaaatcgcacgtgacccgaacaccttcctctccaccgtgcaaatcggcgtgacgctctccggcttcctgtccgcctcgttcggcgcctcttccatcgccccctacctgattccggtggtcgaaagctggggcgtgcaccccggcatcgccggcggcctggtgaacatcatcctgaccctcatcatctcctactgctccatcgtgatctccgagatggtgcccaagcgcatc

SEQ ID NO: 2652 - DNA, 8182 bp, Unknown
  R36_18m  MAG No. k141_2448
cggcgaatgcatccatagctacggaaacagaaataagcaggatttgaatgattatcggaatcatggtgcgacagaaggttcatcgccggattaccgtgcgatgggcctcgaccagcgttcctacacgccgcctacgcctagctgaaaaatacaccagcactatatcacgcgatgcacgtcgaatcaaaaaggcgggaggcctccggagaggtctcccgccgacgattcggaatcgaatcacttgccttcgttggcgaggcgttcgcgtgccgcgatgatttccttctcggcggcgtcagcaccggtccagtagtcgcccggcaggacttccttgcccggctccagagccttgtactgctcgaagaagtgcttgatttcagccttgtggtactcgttgacgtcgtcgatgtccttgatgtcatcgaaacgaacgtcggcgggcacgcacagcaccttgtcgtcgccgccggcctcgtcgaccatgtggtacaggcccacggcgcggcactcgaccacgcagcccgggaacacggagttcggaatcatcacgagagcgtccagcggatcgccgtcctcgcccagggtgccgtcgatgtagccgtagtcatccgggtaacccattgcggtgaacagggtacggtccaggaagacgcgaccggtctcgtgatcgacttcgtacttgttcttggagccgcgcggaatttccacaacgacgttgaaggtttctgccatgtcatttctccttgaaaatcgacagttacgttatcgtctcaccacaataccctgtttgcgcctgcaaaacaggtgcggaactcaagaaaccgtgctgagattatgccgacactatgtctaaacagacgaaatcctcccctcaaggggaggatttctagcggtttacgcacacgataaacccatgcacgtcaacggcatcactgttgcattaccgttgcactaccgcatcactgcacggacaggatgtgggccacatccgcccaaggagccagagacacgtagttgtcccaaccccactggaattcgcggccggtcagctcgtcgcgcacgttgagcggacggtcggtgggcagacccagctcgccgagttccaggtgaatcatcgactggtgtgcgttgtgtccatcgaggttcacgaccacaatcagcgtgtccgcttggccggtgccggtcagttcggccggcgtgtggcgtgcgaaagccagaatattcgggtcggacgtaggcagcacggtgaggttgtggtagctcaacgcggccgggtgggcgcgacgaatcttgttgagcgcggtgagcatctcggccacgccgtactgcttggccttgctccaatcgcgaaccttgacctcgtacttctcgttgtcgatctgctcttcgaagccggggcgctgcttgttctcgatgagttcgtaaccgttgtagataccccaggacggcgagcccatggctgccagcaccgcacgcatgcagtggccggctacaccgttgtctcgcacgtaagcggtgagaatatccggcgtggtgggccagaaggtgttgtgctggtagtagccgtcgtcgccattggtgatcggcagatactcttccagttcgtccttggtgttgcgccacgggaagtagcagtgggactgggtgaagcccacgtagctcagggcacgcatcatgcccgggcgggtgaatgcctcagccaggaacaggatctccgggtgcttcttggtcacggcggcaatcacgtcctgccagaaacgcaccggcttggtgtgcgggttatcgatgcggaagatggtgacgcccgcctcgatccacagattcatgatgcgttcgacttctttttcgatgccgggcatgtcggcgttgaagtcgatcgggtagatgtcctgatacttcttcggcgggttctcggcgaaggcgatggagccgtccggcttgtggcggaaccagttcgggtgggccttgacccacgggtgatcgggcgagcactgcagtgcgaaatcaagcgcgatttccagacccagttcatgtgcacgctggcacagggccttgaaatcgtccatggtgccgagcagtggatccacggtgtcgtggccacctagctcggagccgatgccgaacggggagcccgggtcatcggggccggcgaccagcgtgttgttgcggcccttgcggttggtcacgccaatcgggaagaccggcggcaggtagacgatgtcgaagccctcggcagcggcgcgttcgaggccggccatcgaagtcttcagcgtaccctgaatgatcttgccggtgttcggatcgatggtggcgccttcggaacgcgggaagaactggtaccaagccgcgaagctggacttcgggcgttccaccttgaaacgctggggctggctgggggagatgccatcgcgcagcgggtgagtctcgtgcagggcggcgatggtaggattgtcgccggcggcgaggcgatcctcggcgctcagcgtctgatcggccatggtctcagcggccttctccaaggtcttgcgatcgcgtgcggtcaggccggcgtccggggttgcggcccaacgggccagcagctcggcaccggaattgagcgcgttgtccacgtcgtccatcacacgcaccttgatacgggcgtcatgcagccaggagacgtacgtgtcttcccaaccttcgatggtcacggtccattcgccgagctgacgcttgacggccgcgtagccatcctcccaaggcttcagatcgctgtgctcgccgcacttgaccatcacggtccaacgatcgaggccgggatttacgcaggtcatggcctggcgcatggtttccttgccgcgcgggttgcgcacgatggcggtggcacccaccttggtgcggccttcgatgaacacttgggcggtcatctcaaacggttcgccgagttccacacgggcggggaagatgccacgctcctcggcgggagtgatgtccatgacattgatgcggccgaactggccgggctcgtttgcttcgatggacggtgcgggggcttcgacagccaggcctttcagcgctgctgcggcgcgtgccgtttcggcgctgactctcttgcgcttggttgcggggctctttcgggcagaagtcgcctttgacttcgttttcgtggtgctgttatcggtattactagtgcgcgtggtcgcgcgatgttgtactgctgccataaggccctattctaagggcttttgaacatatgttgcgcattgtggataactatcaggtaaacgttcggtcaaccgcatgaggtggataactcggcggaagagttatccacaactcgccggcaaacggcaagctcggaccacataggccgaaaaatcggctgtagcgaatgaaaatctgccatgatcgtggcctacccgcacacagtgcagtatgcggggaacgtaccaggaaaggacgaatgatgataacgacatggcggcaacggggcatggccatcgtagcgatgctgaccggtctgataataatggtgggagtggtgttcggctcggcgaatacggcgtatgccgcgacgttgacgcccgccgacgaaagatatcacgtgacgtttccatacaacgatatggaatattacgtcggtgtcgcggggctggacgcttcgggcaacaaatactactgcatcgaagcggggaaactgagcgactatgtgataggccccaccacggtgcttgcctccgatgagaacgcccggcgtatggcatggatccttgaccggtaccgcgacacggatgccgccacccatgcggcgatcggcatcatcgtgcaggatcacttcgggcgcgatcgggacgagtgggcgagacagatggcggtcattcaaggccggtatcccgagatcgtggcgaaggcggcccggatatgggatcaatcggccggcaagacgcctgcgggcacgacggtggaacgcaccgatgccgaggctttgcgcagcggttccatctcggtgaaagtggtgaaccgcgccggtgacgcgatcgcgggagtgccgttcaccgtcaccttgcagggggcggcgcggttcgtccaaggcggcaacacgttctcgggggtgtcgacgagcgccgggtcctcgatcgcgtgggaggcgaccggcgccggcgaggtgacggcgaacaccacatacgagtatgggcggatgcacgtcatggacagcactcaggacatgctggccttcgattcgatggcttccgccggcggttcgtcgtcgacgttccaggtgcgcaaggatttcgttccgtcggtgtccacgcaggtgtccgataaggtgcttgatgcggcttcgccggtgttcgatgatgtgaccagcggcgtgggggacgagggcagtcattgggtgcccggtctgaagctgcaggcgcgtggatactatttcgacgggctcggcaaggacgatctgggcaaggtcatcgcgccgaacgcgcgggagagcgcggacgcttttctcgcccggttggcgtcctcgggttatgagccgagtgcttatggcaaggcgtccttcaccggtgtggggcagcgggttcgtgtgcgggccatggccaagccggacggtgacgccgcctatctgactccgaagaccggcggctttggcacctgggtgtgggtgttccggcggagcgagcaaagcaaacgggcgcaggaataccttaccggcgactgggtgagcccgttcatggaggcttcggaaagcaacgtggggcgcgggaaggtcgaagtcatgtcgacggttaccgaacattcggcggatatcggcgccgaactcagcgacaccatcaccgtatcggggttcccggcggaccacggccagttcacgggcgatgaaacctatggtttcgcggcggatcagccgtatgcgacggtgagcgtatggtggtccggcgatcccgacaacccctccaacgatgaggcgtacaagccatccgggggagaggtccccacggaagacgacaaccaccggttgctggccacctgggagattcccgcgatgaacggcacgttcaaaatcggcgccggggcgttggacgcgcatggcgctcccatgcatctgaccgccgaacggcatgggtggtacgtgttcgtttggcggttcgagggggatgaccgtgtttccccggcgtccagccggtatgacgatgcctgggagcgtgtgcgggtgttgcccccatgcgagtcggagaaaccgtgcgaaccggagaaacccgagacgccaccggcgccggcggaggcaaccacgcccaacactcgcccgtcactgcccgtcacgggtggcgatgtgtcgcttgcctcggttctggccgtgtcagctctggcgataggcgccatactgtccatcgtcgttcggtggcgtcgttgctatgaccgatccaagcactggacgatgcgctggccgatacgttgacccgctgcggcatgatgccgatgatgtcggctggatggtgaaccgcactccgcttctgagcagaaggacgggagctgggcacgaagtcgattgtgacatacgacttgtgcccggcttccgcttcgttgagaaacttcacgcctgtcgcctcccgtggattagacaactgaaggtccgcgatgaaaacgacgagacgtttatgatcgccgacttccctgggcaccgtagctgcctgatcgcctttcatccatatcgccccggtcaggtcgtcacctacaacggcggcggcagcgtcgccaccggcagcaacgccccaccgtcccgtaccgtgaccgtccgtgcagaccctcggccccgtatggggctggacgtgggccgatccggccgcgacgaccaacagcgccgtcgcgctgaccatcggcgtcgtcatcggcgccagcgccctcaaggccaaggcatccaaggccgaataacaagaagcccccgaacctgaaccgtatcacgcggcaggttcgggggcttttcgccgtatatgggtcaggccatcgcgggctgtgcctgattggcggtcaggtatgcggccagtgccttgcggatcagagcgctcttgccgatgtgctctcgttcggcctgtgcccgcacctgtgcgtccatgtcgggcgtgaggtatgccttgtagagcacgtcggccttccggcggggctggtcggcgagggagcggccggcgaagatgtcgtcgatgtcatccatcgtgatcgccctttgcgggcggatggtctcgccgatgatggcgggggtgtgctcggtgtattcgtccgagagctcgtcccagtctgtttcgttgctcatgatgtcctccttggtgtttttagtcgtcgaacttgtagagccattcgcggcggcagtccatcgcgtggaacaccttgcgggtgcgctgggataccagcagctccacggggcgttccctgaactcgtccgggtgtccgaggatcgccatgaccctgtcgccggcgtgtctcgactgcacctcgaacacggccaccggatgccggaatatgtagtcgatctgtggctgtgtgaaccagtgcttgaaggctgacggttcgcattcgatcatgcttattatggtaccataatttagtaccacaatcaatttagtaccacaatcgagtcggggaaacggaacatcgtgatcctcctaggcggcgaggcgcgtggcttccacggcggcgcgcagctggtcgtcgggcatggcgatgtaccgttgcgtggtctcgaccgaggcgtggccgctccaccggccggggaacagatagccgttggcggatcggatcagcagggcgaggtcgtcgccctccacgtccctagatcgcccttaagcgccctcgacaatgcggacatctggcatcggcgcgtgccgatcgtgttggggggagtagcccgccgccttgagggggtcgagccatagattgattgattctgcccagagcgggcttggatgttgttttttcacaggacatcatcgccccgatcggatatgcggccccgtagggcacgacggcggataaacgaaaagccgtcacgaataatcgtgacggcctcgcccgcagtagcggggcatggatttgaaccatggacctctgggttatgagcccagcgagctaccgagctgctccaccccgcgtcggcttgtctttaagacagctctattaattttacgattacttccaaatatgtcaaatcggcgtgtcgcgctcgtttggccgtgtaaaacagcgccacgaatagcgcgttatccatttttcctatacccgtttcgaccgatcgccggcgcaggggagtgcgccatatccgaccccgcaccataatagaagcatgcctatcaagattcccagcggccttccggccagagacattctcgactccgagcgcatcttcgcgcttgaaaagcccgaagcggagcgccagcgtgtgcgtccgctcaagctggtgatcctgaacctcatgccgaagaagatcgagaccgaaacgcaactgctgcgtctgatctccaagagcccgctgcaggtcgaggtcgacttcatgaagacctccacgcacgaggccacgcacgtctcggccgaccatctgctcaagttctacgagaatctcgatgcgttcgccgacaactactatgacgggttcgtcgtgaccggcgccccggtcgagcatatgccgttcgaacaggtggactattgggacgagttcaagacgattctcgactgggcgtccacgcacgtgttctccacgatgtacctgtgctggggtgcgatgggcgcgctctaccagcggtacggcgtgcataagatcgactatgccgagaaggtgttcggcgtgttcccgcagtatctgcaggacgagtattgcttcctgacgaacggtttcgacgagatcgcgttgcagccgcattcgcgtctcgccggcgtgaacgaggccgacgtgcgcgccaatcccgatctgcagatcctcacgtggggaccgcagtcggggccggggctcgtcgccacgcgcgacttctccgaggtattcgcgctcggtcactgggagtacggcaagtacacgctcgcggaggagtatgagcgcgacatggcgaagggcatgagcaatgtgccgttcccgaagaactatttcccgcatgacgatccgtccgtcgagccgttgttctcgtggcgcgcgcacgcgaacctgctgtggcgcaactggctcaac

SEQ ID NO: 2653 - DNA, 3563 bp, Unknown
  R36_18m  MAG No. k141_2477
gcggagaagatcaacgtcaaccaggccgcgctggtcaccgtgctcttccacctgggtcagatggctaccgccacccagtccttggatgaggagaccttccagattctgggcgaagagatcggctggaacatccagctcgtctccgcagaagaggaagacaaggaactgctccagcagttcgacatcaaccttgacgaggaagaactgcaggatgacgaggatctcaagcctcgcccgccggtcgtcaccgtcatgggccacgtcgaccacggtaagacacgactgctggataccatccgcaagaccaacgtcatcgcacgtgaggccggcggcattacccagcgcatcggtgcctaccaggtcaccgtgaaccttgaaggcgaaccgcgcaagatcaccttcctcgatacccctggccacgaggcgttcaccgccatgcgtgcccgtggtgccgagctcaccgacgtcgcgatcctcgtggtcgccgccgacgatggtgtgatgccccagaccgttgaggccatcaaccacgctcaggccgccaaggtgccgatcgtcgtggccgtcaacaagatcgatgtgcccggtgccaacccggagaaggtccgcggccagctcaccgagttcggcctggtccctgaagagtatggtggcgacaccatgttcgtcgacatctccgccaagcagaacctgcacgtcgacaagctgctcgaagccgtgctgctcacggctgacgctgagctggacctccgcgccaaccccgacatggacgcccgtggtgccaccgtcgaagcccgactcgacaagggtcgtggtgccgtggccaccgtgctggttcagcagggtacgctccacgtgggcgatgccatcgtggccggcacttcgtacggccgcgtgcgtgccatgctcgacgagaacggtcagccgatggaagcggccggtccgtccacacctgttcaggtgctgggcttgacctccgtgcccaccgccggtgacctcttcctggtcgcctccgatgatcgtgccgctcgccagatcgccgagaagcgtcaggccaccgagcgtgccgcccagttggccaagcgtcgcaaggtcgtctccctcgaggacttcaagaagaagttcgccgagtccgagatcgacatgctcaatcttgtcatcaagggcgattcgtccggttcggtcgaggcgctcgaggattccttgatgaagatcgaggtatccgacgaggtcggcatccaggtcatccaccgcggcgtcggtgcaatcacccagaatgatgtcaacctggccacggtcgacaaggccgtcatcatcggcttcaacgtacgcccgaaccgtcaggtggcggacctcgccgagcgcgagggcgtggagatcaagtactactcggtcatctaccgtgcgatcgaagacatcgaggcatccctcaagggcatgctcaagccggaatacgaagaggtcgtcacctctcactccgagatccgcgagatcttccgctcctccaagttcggcaacatcgccggcgttatggtgcaggacggcgaggtcaagcgtggtacgaagtgccgtatcctgcgcaacggcgtggccacggtcaacgacctcgagatctcctcgctgcgtcgcttcaaggacgacgttcagtccgtcaaggaaggctacgaggctggtatcaacctcggcaccttcaacgacattgaactcggcgacatcatcgagaccttcgagatgcgggaagtcgagcgcaagtagtcattgttaagccccctctgacgagggggctgtcagccgcagactgactgggggagagacatggtagttccatgattttctctcccccagcctcactgcgttcggcagcccctcgtcagagggggctcaagtctagaaaaggaaattcctatggcaggaaccaacccgcgcgccgcacgtattgcggccttgattcagcgtgtcgtcgcctcctccattgagcgcgaactgcatgacaagcgactcgccagcatcaccgtcaccgaagttcgtgtgaccaacgatctgcagatcgccaaggtctactggacccagctcggccacgaaggccacgaggaaggcgaacgcaagcgcgcccagcaggcgctcgatcaggccaagggtcacctgcgttctctggtgggccacaaggctggcctgcgcctgactccgcagctccaattcgtgttcgatgaagtgcccggcgaggctcacgagatcgaagacattctcgccgtggccaagaagcgtgacgaagaactcgcccgcgcccgcgccaccgcccagtacgccggcgacgccgatccgtacaagcacgacgacgaggccgaagccgagggcgatgagttcgagtccgacgaggagtagtgtgcttcatacaacacccagcggcctactcatcatcgacaagccgcaaggcgtgaccagtttcgacgccgtcgccgccgtgcgcggcgcgttgcacatcaagaaggtcggtcacgccggcacccttgaccccatggccactggcacgctggtcatcgccttcggccacgccacgcgactgctcaacgccatcgtggcgcatgacaaaacctacgaggccaccatacgcctcggcctgcgcaccactaccgacgatgccgaaggcgaggcgcttgtcgatgatgaagcccgctcccgctggcaaacgctgtcagcgcagctgactgagggcggccagagcggcgaaccaacggcgtcaccaactgcctcatggcaaaacctgctcactcgcaccatcgccaccaatttcaccggcgatatcgaacaagtccccaatacgttctccgccatcaaaatcaacggccagcgtgcctacgacttggctcgcgaaggcaaggatgtggaactcaagccccgcctggtgaccatcagcgaattcaccgtgctggatatccgcagcggattcgtagcaggggagcaggccgctgaaccattgcgggaagacgcgaacacgggaacgattcccgcacttgatattgacgtgcgggtcagctgttcatcgggcacctatatccgcgcgctcgcccgcgacctcggcaatgaacttggcgtcggcggatacctgacccgtttgcgccgtacgcgagtcggccgattcgcgttgccggacgataccagcggacttatcgcctctgaggcgatgcttgacacgcgaacccataccgtcaccgcacataccgatcagaagacgttcactaatcgggaagggcaaaccgtcacgcgcaacaagtgcgtattgaacactcctgaaggccttgccggtgacgagcgccgcaactggctgcttgaccatgccctcaccatggaacaggccgctcgaggcgcgatgccggcgcttgacatcacacctgaggaagccagcgaattgcgcttcggccgccgtatcgagcgtacaatcagcgagcccactgccgccattgtgccgcaaacgcatgatgtggcggcgattatcgagcgtgccaacgctcatcaggccaagccggtcaccgtattccccctcgcgtaaagtagacgcggtgaaa

SEQ ID NO: 2654 - DNA, 7111 bp, Unknown
  R36_18m  MAG No. k141_2536
cagactataccccagcgcatacaagctatctcgagccacatacgcgaaaagggcctgcataagcagacccttttcacaaggaatcaacccctaactagcgcaagctagcgggcatcaaccgatcagttgttgtggaagccggagtagttcggggcttcggcggtcatcacgatatcgtgcgggtgcgattcgcgcagaccggcatcggtgatgcggatgaacttgccacgctccggcatctcggcgatgttgtgggcgccgatgtagaacatggactggtgcaggccaccgagcatctggtagagcacggcgttcagcgggccgcggtacggcacttcgccttccacgccttccggcacgaccttgtcgctggaggtcacgtcggcctggaagtagcggtccttggagtaggacttcttgccgcgcggggccatggcgccgagggagcccatgccacggtacagcttgtactgcttgccgtgcaggagcaccttctcgcccggggcttcctcacagccggcgagcgtgccgccgagcatcacggaggaggcgccggccacgagggccttggcgatgtcaccggagtagtggatgccaccgtcggcgatgcagggcacgccagcggcacggcaggcctgggcggcctcgtacacggcggtgagctgcgggacaccgacaccggcaacgatacgggtggtgcagatagagccggggccaataccgaccttgacggcgtccgcgccagcctcaatcatggcctgagcaccggagcgggtgccgacgttgccgccgatgatctgcacgccgtcgaaggcggagtcgtgcttcaggcgggaaatcatgtcgagtgccagacgagcctcaccgttggcggtgtcgaccacgagcacgtccacgccagcctccatcagagcggaggcacgctgccaggcgtcgccgaggaagccgacgccggcggccacgcgcagacgaccctgctcatccttggtggcgtccgggtactgctcggtcttgacgaagtccttgacggtgatcaggccggtcaggtggccttcctcgtcaacgagcggcagcttctcaaccttgtgctgggcgagcagacggtgagcgtcgtccttggaaatgttggacgggccagtgaccaggttctccttggtcatgacatccttaaccttcagggtgtcgtaatcctcggaggcgatgaagcgcatatcacggttggtgatgatgccgacgagcttgttgtccttgtccacaaccggcagaccggagatgtggaacttgccgcacagcttgtcgaggtcggccagcgtgacctcggggttgacggtcagcgggtcggtgatcataccggactcggaacgcttgaccacatcgacctgagcggcctggtcgtcgatggacagattgcggtgcaacacaccgatgccaccgttacgagccatggcgatggccatctcggactcggtcacggtatccatggcagcggagaggaccggggccttcatcacgatcttgcgagtcagatgagtgctggtgtccacttcggagggaatgacatccgtctcgttcggcaacagcaacacatcgtcataggcaaggccgagcttggcgaaaatcgggggaaggggagcatacgccgactgggcgtttaattcatcaaggtttgtagccatgtaaacactatatgaaaatgcgctgaccttcacgacacacgcttgtgagcgctcacttatccgctgccgggtcctgcacctcgcccacctgcgagtcccgcgaatttgcaggcgaatcagtcatcgaatccgctgcctgagagccaatcgaatcccggctctcccctactgcagactgcgatttaggcactgtatgctgcgcgtttttacgtgcggattcgaacgtcaggttctcggcttggatctcgggaatacgatgccgcagataggggtacatcgtggctatggtcagcaccaccacagcgatggccatgcccacggccacgtgctgcgctttgaagaacagaatcgtcagcgaaccgaatgcgatcaacgcggcccatccccacagaatcagcacggcgccacgcaccgaatgcccgatcttcagcatgcgatggtgcaggtgcatacggtccggatgcatgggcgactggcctttggccaaacgccgcacaatcgccagacacatgtcgagcacaggcaggaacaacaccagaaccggcagcagaatcggcatgaacaccggcagatagatgctggcatgaatcgaggccgggtcaagacgtccggtcatcacaatcgaagcgcaggtgatgagatagccaagcagcatcgaaccggaatcacccatgaacagtttggcgggatgccaattatgcagcaggaagcccacgcagatacccaccatcatcacgtcgatcagcgtggccaacgaagcataactcggggaagaccgggcgatgatatacgaataggcggcgaacgctatgccaccaatcgccacgataccggccgccagaccatcgaggccatcaacgaaattgaccgcgttgatcgaggcgacgatcaggaatgcggtgatcgccatggacagactcggcgaggcggtaatcagcgaaccacccaaaggcagtgagatgatctgcaatccgtcccaagccacgaatacggaaatcagcagctgaccggcaagtttcagcatccaatcgagatcccacaggtcatcggccatgcccagcagactgatcatgatgccgccggcaagaatcacccacatctggtaattgccgttgaacaatcccgagagaaaaggcagccgactggcgaatacggtagccacggcaaaaccgatcagcatgccaaggccacccatgcgcggcgtgggaatggtgtgcacgtctcgggcacgcacctcgccaaccgcaccgatttcgatggcgacgtggcgaatcagcggagtcaccagccaggtgacgccaccggcgatggcggcaatcagtaggtagattctcatgcgccgagtcccccgccgttgaggtggagggccttgcgaatcacgttttgggcgatgacgccttcacgcaggatctcgatgccgtcgcgcgcgtacggatcggctttgacgacggtgctggagacatggccttgggtgggaccgccgtccagatacaggtcgacttcgttgccgaacgcgtcaaccgcctcctggacagtctgtgcgctttcgtcgccggaacggttggcgctggacgcggccagcggaccagtggccttgagaatcgcgaggcacagcgccgaattggggatgcggatgccctgcgtgccggggcgaccatcggcggtgtcggccaaagtctccaacgtgcagtcgggccgggctacggcaatcggcgagaacgcgccgggcaggaacgccgccgacaaacgattcagtggagacggcaggtcgagaccgagttcatcaagctggtcggtggatgcgagcagtacctgcaacgccttatagcgcgggcgacgcttgagccggtagatacggtcgatggcggccttattacgcggatcgcacgccactccatataccgtatccgttggaatgacgaccaatccaccatcccggatgacacgcgccgcttgtgccagcgattcatccgtgactttcagcgttgttccgccctccacgctcacgacacctccgttcgcctgtgtattcacaatctaccattgcaccattgcgccccgacttgcatagttcatcatcgctcgtttgccgtactgctgttttccgattcgccccatacgcacagaccgtagatacaatgagttcgtccatgctctttcgcgaaattacaggagtgttcaatgagcggaatcaatgctgaatccaccaccatgcctcccgtcgaactgcgtatgccgcgcgccagcgagcgcgtgttcgccaacttcaacttcactgtgctggattgtcgcccggtgacgattggcgagggttgcgtgatcggtgccggctcggtggtgacgcgcgatattccgccgcacaccgtggccgtgggcaatccggcccgtccgattcgcgaaatcacggacgcggacgcctccgccctgcagtattacgcgcagtagcagcggcggccccgcgcctgtggctacttctcggcgaagagatagcggtctcggccggtccaatctttgccggtggaggcggtggcgaaacctgtggccttggcataggccactaatcgctcgccttgggtgagatcatgctccataaccaatacgccgccgggcttgagcaggcgccaggcgcgctcaataatgcgttcagggatgagcgtgccgtctgccgaaccgccgtatagcgccagttccgggtcccagtcgcgtacttctggttgttcggggatgtcggtttgtggcacgtagggcgggttggtgatgacgatgtcgatggtgccgtcgagttgcgccagcgtggccagtgacgtggcgtcggcgacttccagttggtaattggaggcgatggaggggtatcgtttcgcggttaccgccagattgcgccgggtccattcggcggtacgcggggataattcgacggcccatacttggctgccgggcacttcgctgactatcgacaggccgatggcaccggaaccggcgcacaggtcgaccatgcgcgggtggatcatgctgtgccgggtcagccagtcaagaccggcctggactacggtttcggtttccgggcgcgggataaagacgccggggcccacctgcaggtcgaggtagcggaaaggcgtgtggccggtgatgtattggagcggctcgcgtttggcgcgtcgggaaagcatggcgtggaaggcggcaaggatattggtgacggggtcggcctgaccacccccagtcgctgcgcgacagcccccgccggcgggggccagcgaatcgaggccctcccccatcagcatggccttgtcgatatcgcgtagctcagcgtccacggcctcggccagcaacagtttggcatcatgttcgggcgtctcgatgccggcttcgcgcaactgcgcggcggcttgacgaatcaggtcggctatcactgctggttggccagacggtcggcttcgtcggcttggatgtcggaatcgatgacggcctgcaggtcgccatcgagcacggcgtcaaggttgtaggccttgtaattcgtgcgatgatcgacgatacggttttccgggaagttgtacgtgcgaatacgttcggagcggtcaagcgaacgcacctgcgagtgacgcatgtcggcggcttcggcggcctcctgctcatgtttcatggccagcaggcgagacttcagcacacgcagcgcggcggcgcggttctggatctgcgacttctcatcctgcatgttcactgtgatgccggtgggcaggtgggtcatgcgcacggcggaatacgtggtgttcacggactggccgccggggccggagctcatgaagatgtcgattttcaggtctttcggatcgatctcgatctcgtcgtcatcctcgtcggcttcggggaacacgatgacgccggcggcggaagtctggatacggccctgcgattcggtgacggggatgcgctgcacacggtgtacgccgccctcgtatttcatcgaagcccacacgccgtcttcgggagcgggcgtgcccttggcgcggatggcaatctgcacgtccttgacgccgccgagctcggtggtgttctcggactgcacgttcacgctccagccacgcttctcggcgtaacgggtgtacatgcgcagcaggtcgccggcgaacagtgcggcttcctcgccgccggtgccggccttgatctccatgatggtgtcgcgcgcgtcatccgggtcacgcgggatcagcgcggtgcgcagcttctcttcgacaccgggcagttcggcttcaagacgcttggcttcctcggcgaagtcggcgtcttcgccggccatctcctgagcggctgccagatcgtccttcacctgcaaccaggctttgtaggcacccacgatggcacccagttcggcgtgacgacggcccagcttgcgcagcttgtccgggttggacacgacttcggggctcgccatctgttcttcgatggactggtactcctcaagcgcggttgccgccgccgggaactgttcgtctgccataacacgctttctttcgtacggtggtgtctattcggttgtgcaggtcaaaaaaaatgtcaaagaatacaaaaacgccagtcctcgatcgggtatgccggagcatgccgaatcgaatcggactggcgtgaagtatgctacttgctcttcttgccgtagcgcttctcgaagcgagcaacgcggccaccggtgtcaagaatcttctgcttgccggtgtagaacgggtggcactgagagcacacgtcaacgaacatgtgatcttccttgccagcggtgcgggtcacgaaggtgttgccgcacgagcacgtcacctcaacggggtggtaatcaggatggataccctgctgcattttacgtctcctatggattcgggggacccgggtcgtcatgcccctatggcaggacgtgaaccggaacctaagggattgtacgcgcctatctggacgtgaagacgcgctgtgccgccgcaggaggcgacgcaaaagagtggggccgcaggggcttgaaccctggaccgggcgattatgagtcgcatgctctaaccgactgagctacggccccacgttcgctgcgtaaaacagccaacttgcaaagtgtagcatgaacccaccaacgccggcacacgcgccatgcacccatgccatgcacccgccagcacaacaagcagcatctcccggcgctacttctcccccatgtaccccaacgggttctcgatgaaccgtcgcaagcccatttcggccgcgccatatagcgagggatgcagcgccaccggcggcacgaacacgcggatcttcacattcgggtatcccagaatttccgaacgcagccggccttcaagcacggtggccagctcgtcgccgaagtgcgtccacagtccgcccaacagcaccgtatcgacatccaccagattcacggcggaagcgatggcggaaaccagcgcatc

SEQ ID NO: 2655 - DNA, 8151 bp, Unknown
  R36_18m  MAG No. k141_2554
aagaaccccggcaagttgaccgacagacggtccgaggcgtccgggaacctgcggtacacggaccccaggggccggccctaccgttcatgacggctcagggaacccctccggacgatgcccaaacgaccggccgaccaggcccgggccgaactggaccaccgggtgctccgggcgtcccacagccgcatccccgagatcgtcgaactcgcccgaaagatccgccgtcatgggcccgacatcctcaagacaatcgaattgggctgttcaaacgccaggctcgaggcgtccgacaacaggatcaaggccaccatccgcatggcctacggcttccaccacgcgaacaatcccatcgccctcgtcatgctccgctgcggcggactcgacatacgcccaccacaaccaagaacccaacccacgaaaacagcagaagcctcttttttgtgctatcccgtaaaactgcgggacggcagctcattttcgccgtttgagccgtgccgtcccacatcaccctttgcggaccgtgacaccataacaccgagaatggcggaatttcaacgattccgtaattcgtactgcgggacgccacgctagtcaatcgattgacactcgtgccatcccgcaacagtgtgggatacgacgtcaaaatccgcgaaaatcgcgtgccgtcccgcgcgtacggcaccgcacgaatacatgctgatgaaccgcatagaaaatggctccccgtgtggggagccatgagctagttactaactagcgatgcgtcacttctcgttctggccgtggcacatcttgtacttgcggccggaaccgcacgggcacggggcgttcttgccagtgccagggaaggtgcggccgtcggcccacggcgtcttgagctcttcgctcttcggacgcttggaaaccgggaccttgctttcggcgtggctgatcggagccggtccggcaacaggcagcgtggactcgccggccccggaggcggctgcggattcggcgatcgcctgcttggcgtccgtatcctcgtcctcttcctcgacttcgccctcagcggcctcgaccacggattcgccgttctcgtcggggccggaggccacggcgatggtgtcggcgctttcggcggtctcctcgacctcgtcaacggcctcgtcggtggtggcgacctgcttgatgtcgatgtggaacagcagctggacggtctcctccttaatggcctcgatcatggagttgtacatctggtagccttcgcgctggtattcgaccagcgggtcgcgctggcccatgccacgcaggccgatgccgtccttgaggtaatccatctcgtaaaggtgctcgcgccacttgcggtcgagcacggcgagcaccacgcggcgttcgagatcgcgcaagccggtctcgccgatggtctcctccatttcgccgtactgctgcctggcgtcctcgacgatcaggtcgcgcacggcctcgacggccttcgcacccttgaggccgccgacgatcttcctgacctcgtcttcgtcgaccttggtgggaatcacggtgttgagcgccttgaacaggccctcccaatcccagtccttcggtttctcggatcccttgttggcacccttgatgtaggactcgacggtgtcggaaatgaaacgcaggatgtccttgtggatgtcttcgcccttgagcacggcctgacgctcggagtagatgacggtgcgctgcttgttcatcacgtcatcgtacttcaacacgttcttgcgaatctcatagttacgggattcgacggccttctgcgcggtgcgcacgcccttggtgacggacttggcctcgatcggctggccttcctccatgcccttggccatgacctgggccaccagctgggtgttgaacagacgcatcagatcgtcttccagcgacagatagaagcgggactcgcccggatctccctggcggccggaacgaccgcgcagctggttgtcgattcgacgggactcgtggcgttcggtgccgagcacatacaggccgcccagctccttgacttcctcgtgctcgtccttgacctgggccttgatctcgttcagggtgcccggccaacgcttctcgtactcttccggggtgtcttccggagagtagccttcggacttgagcttggcgtcggcaaggaactcgacgttgccgccgagcatgatgtcggtaccacggccggccatgttggtggccacggtgacggcgcccttgcggccggcgacggcgaccacggcggcttccttctcgtgctgcttggcgttcaggacctggtgtgggatcttcgccacgtcgagcagggcggagaccacttcggagctttccacggaggcggtaccgagcagcaccggctggcccttggcgtgacgcttggccacgtccttgacgatggcggccagcttctccttcttggtgcggtagatgaggtcgtcctggtccttgcggatcatcggcttgttggtcttgatcggcagcacgcccagcttgtaggtgttcatgaactcggcggcctcggtttcggccgtaccggtcatgcccgcgagcttgtcgtacatacggaagtagttctgcagggtgatggtggcgaaggtctggttctcggccttgacctccacgccttccttggcttcgatggcctggtgcaggccctcgttgtagcggcggcccggcaggatacggccggtgtgctcgtcgacgatgagcacctcgccttgggtgacgacgtagtccttgtcgcgcaggaacaattccttggccttgatggcgttgttgaggtagccgatcagggcggtgttggccggctcgtacaggttgtcgatgccgaggaagtcctcgaccttggtgatgcccgggtccaggatgccgacgaccttcttcttctcgtcgacgtcgtagtcctcgtcgcgggtgagcttcagcaccagcttggcgaactgacggtaccagcgggtcacgtcgccttcggccgggccggagatgataagcggggtacgggcctcatcgatgaggatggagtcgacctcatcgacgatggcgtagtggtggccgcgttgcacgaggtcggccttctcccaggccatgttgtcacgcaggtagtcgaagccgaactcgttgttggtgccgtaggtgatgtcggcgttgtactgcttgcggcgctccggcggcttctgctcggtgatgatgcagccgacgttcatgccgaggaagcggtagatacggcccatcagctcgctctggtagctggcgaggtagtcgttgacggtgaccacgtgcacgcccttgccttcgagagcgttcaggtaggtaggcagggtggcgaccagggtcttgccttcaccggtcttcatttcggcgatgttgccccagtgcagggcggcaccgcccatgagctgcacgtcgaagtgacgctggccgagggtgcgcttggagacctcgcgcacggtggcgaacgcctcgggcataatctcgtccagactcttgccgttttcgatttcctgcttgaacttcggggtttgggccttcaggtcctcgtcggagagggcggaaatctcgtcctccagggcgttcacggccttggccacgttctccagcttcttgagctggtggccttcacccattcgcagggctttgtcaacaatatcgaccactgggttctcccttgactgataagtggtggtgtccgcgtaccagaatagcgcctcgcaccgtcagcaatcgaatttttcgacctttttacgaaaaaatggaccgcttccatattggaagcggtccatgcggtatcagctgatcgtgtcagcaggccttatcttcaggccttcttgacgttctccggagtatcgatttcgaacacgccgtagctccaaccgtgacggtggtagacgacggacgggcgtccggtctccttgttcacgaacaggaagaagtcgtgtccgatcagttccatctcgtacagcgcctcgtcgatgctcataggctcggcgatgtgcagcttgcgacggatgacaatcggcgtatccccaacctggacctccacggattcgccagggccaagatcggaggcgaccgcagcctgcgggctgttgttcggctcttcctccgacacctccggctcgggctccggggcgataacacccagatccaccgggaccgggttcgcgtaaccacgacggtgatccttgcgacggtcacgagtacgacgcagacgcagcgtcaacttatccagcgccatgtccagcgcactgaattcatcggtgctggaagcctccgcacgcaccacggtacgtccggcgataacggtgatttccacgcgcttggcggtatcggcctgacgcgggttgccctcatgggtcagcacgatctgcgcgcgctgagcatccggggcgatagcggtcacacgattcatcttggtctcgaccacatcacggaacctttgcttgacctgcgtgtggcgtccggtaacgacgatttccatgttgacctcctctaactcaagcggtgtaacccgctatatgtgttccgaacggcatcatcaccgaccgggtatgtttcattgtagacgaacaatgggtgaacggccggaaactcgcccagagaatatatgtttattcccgggcttttctctgcaatgaaacgatgtatatactggggttttggcagcagtctcctataagaagatttgataccggtttatcaggctggctcgtttgttcgtcatggtaaatactgcaatggataggcagcgttttcttgctctttctcgcacataccaagctcttacagatttgattcgtctccatacgacacgccacaacacgcccgacacgccccatccgatattcggcgcgtcgttcacgaatcgcccaactatgcccaactatggagaaaacaggataactgggcaacgtcatggcctcaccgcagggcgggatgccgccttttccgcaccttatgtataattgcaggcttgagacctcttgatggccgcggccgtgatcttcattgggatcggctgaggaacttccgggctccatagagcacgatggcggataacgtccgcccagggtgacctgagagatagcgcaacagagaacagaccgcccgtcctcgacgggtaagggtgaaacggcggtgtaagagaccaccgggcctctggtaacagtaggtcgcatggcaagcctcatcgggagcaaggccaagcagatggcggtaagggctgctcgcccgtgtcatcgggtaggctgctagagcctggcggcaacgtcaggtcgagatggatggccatccgtgccgtgcgttcgtgcacggcacgacagaacccggggtataagaggtctcatttttttcttggctacaccaacaattcggcggcgactcggcggagggtttcggggctgtgtcctttgcggccgcctgcggaccaaaaccgacgctgacggacctgacgatcgaggccatgggttttgcgggctatttggcggcccaattcccatgcggcatcttcaaagatgccattttgctcagcttcgccacacacctgttcagccagtttgcggtccacgcctttgcgagcaagttccaggaccgcaccacgacgacccatcatgcgaccggcacaatagcgtacggccgattcggcataagcgcggtcgtcaatcagttgcacgcgaatcagccgttcgatgacctcgtccacaatcgcctcgccatagcctttgctgagcaatcgttcgcgcaacgcgccggatgcacgtggggccgcgtccagcaaacgcaatgcagcctcgcggcaagcgtccaaatcattgggatcttcgacaacggcagcgtctctcccccgtcgagaaaaacgtcccggcggtttcgactgaacacgctgctcggcaatgggcatgtcttgcgacgcaacaggattgcgccgcaagaatgcttcggcactaatcatgttcaggccttagctgcgccggccttggcacgggtcgttttggcagcaggcgccgctgcggccttgctgtccttggccacgtcggcagcggcggcctcgctgacagcggccgctgctgcggcttcgccatcttccgcgaactggtcggcggaaccgatcagaccgaactcggccttgaccttattctcaatctcctcggtgatggccgggttgtccttaaggaactgacgaaccttctcgcgtccctgaccgagctgatcaccctcataggtgaaccacgaaccggacttcttgaccacgccaacctgctgagccatgtcgattaccgagccctcacgggaaatgccttcaccgtagagcatgtcgaattcggcggacttgaaaggcggggccatcttgttcttgaccaccttgacgcgcgtgcggttgcccaccgcttcgtcgccattcttcagggtttgaatacgacgaatgtcgagacgcacggaggcatagaacttcagggccttgccgccggtggtggtttcgggattgccgaagaacacgccgatcttttcacgcagctggttgatgaagatggcggtggtgccggcctgagccaacgcgccggtcatcttgcgcagcgcctgactcatgagtcgggcctgcaaaccaacatggctgtctcccatttcgccttcgatttcggccttcggcactagggcggcgaccgagtcgatgacgatgacgtcaagtgcaccggagcgaatcagcatgtcggcgatttcgagggcctgctcgccgttatccggctgggagacgatgagtgagtcggtgtccacgccgagcttgcgggcgtaggccgggtcgagtgcgtgttcggcatcgatgtaggccgccacgccgcccttcttctgggcattggccaccacatgcaatgcgagcgtggtcttaccggatgattcggggccgtagatctccacgatgcggcccttgggcaggccgccgatgccgagcgccatatcgagggccaacgaaccggtgggaatcacctcgacgttctgctcgggctggtcgcccagtcgcattgcggaacctttgccgaagctcttctcaacctgcgccagcgcggtgtccagcgccgccttgcgcttgggatcgagctcgtgcttgtcctcggctgccgggtccttggccggcttggtctcaagtgccatgatcttctccttgtcgaagtcgtgtgcgaatcggatgcctccaccgtatgacggacatgccatgtgaggcaatccaaaccaaccattgtggttccagcttgcccgagctcggccatctgacctccctaagacctactgcggtaaggcttatggcggatgacaagcaccctgtgcacacgtatgcggcttcttgtcactgtgaataactataaccacacacacgaacatttgttcgaatttggcgtgcaacacgccgaaatcgccaatttcacgattcagcgactccgtaatcccgcagtgtcagacggcgggcatgggcggcgcgttatgatcgtggccccaacgcttggagtccggaacctccatttggtcacagagcacattccagaccacgcgtggctcctcccccgcgtccagcgcctcgaccacggtcatattcgccagtttgggcatccgttgatcacgcgacagcgaacgaccgtaggtccgaccgaacacctcttcaagtaattcccagaattcccgttcacgcatacacgccagtgtgccaccacccgcaggacagcaaaaacccgcatcgccacaagcgatacgggttcacagctagacatagattacgggatgcggcttcacaccgccaaccgatcagccctcgactgtgtcgagataatcggccaccatgcgcagcatgcgcgaagtggagactccgagcgcatcggcgatggagctcagcagttcggagctggcttccttctgcccacgttcgacttcggaaagatagcccagcgaaacgcccgccttctcggagacctcacgcaacgtgcggcgatcgcgcgtacgcagttcgcgcagcacgtagccgatagcaccacgcagcgaaacctcgcgaggctcctcctcaaccaccacgggctcggcggcggcagtcggcttgtacgacggcgaatcctcatcccacatacgttcacgaacggcttgacgctgatccttggccttcttggc

SEQ ID NO: 2656 - DNA, 9351 bp, Unknown
  R36_18m  MAG No. k141_2626
ccagtcgaacggctccgatagctccgacggctccgattccagctcgtcgcacaacgacccgtccaccaccacgtccgacaagaaggacaccggcaactacaaggacggcaactactcgatcaacggccagtacggcccggtaggcgaggattccatcgacgtccatctgaccatcaaggacggcaacgtcgagaccgtcaatatcattgggcacccgttcaccacgatttccaagaaccatcaggacgacttcgccaaagccatcaacggcgtagtggacggcaagcccctgaagggactcaaagtggacaaggtcgccggtgccagctggacctccgacgccttcaacaaagccctcgaagtcgcccgccaggaggcttcgattcaggagtaagaccgctacttcagcaatgctggccacagcagatcggccatgcgcgaggcccaggcggtgtcgtcgtccatcgctttgccctcgatggcctcatacgccaccaaagacccgataatcgtggacaacagcaacttctcgtcaacgtcctcgcgaaacacgccctgcgcgactccctgcttgaggaacgcccccacatgctccagccacggggtcaccacctggtcgacgatgtgctggaagaactcggcctcgctggacaatacaatgcccacgcgcttgacgtcgatgtcgttgtcgcgcacccaatcgaccaatcgctgcaatagttgcgtgaaatgctcacgcgtggggctgggcactgggtcggaatccgggatggccagatacatcgcgctgatctcgcgcagcagctcgtcggcattatggtatcgacggtaaatcgtggttttggccacgccggagcgccgggccacctcctcgatggtcacgccgctgatgccgcggtccaccgcaatctgcagcgtggctcgcatgagcttgcgatccgtcgcctcgcgcgtgcgctcaccgcgcggtgtcgccgtcgtacctgtcatctccgtcatctcttctcttcgaaatatgctcccgtacgctcccgttggcgggagctgactggcaaagccagactgagggtggtaagtccatgccgtttgtaggcaacccccggataatacctactagctcagcactttagtgctctcgactttggccacataccactggttgaaccgcaccagtggcttcctgagcaacagcccaagcaacagcagcggcggcacgaacgccagcagcattccggcggcccgccagtaatccatgtcgtagatgccggcgatggccgcacgcatcatcgtcaccgcatgggtgagcggcaagaacggactgactttggcgatgaagtcgggcaacatctgcaccgggtaggcagcgttcgcacccgaaatctgcacgatgagcataagcacgccgattgccttacccacattgccgaaactcaccaccatcgtataggtgaagaacgagaacaccagcgaggccagccatccggacaacataaacagcagcggatgcgcggcctgcacgcgcaggaacagcagatcgccaccgagcgacaccgtggattgcagcagcgcaatcagcgcgaacaccccgtaatgcccaaggaagagccgatgcggccgcggctcgcccaatgctttgcgtgtccggcgagacacggtggttttcagcgtcaccaccatcagcagcgcgcccacccacaacggcagcagcgtgtagaacggcgccatcgacgaaccgaaattcgccaccgggaatacggccttgcgcctgagctgcaccggcgcggccaacgtactggccagcgtttcgggatcattgcccagcacctctttgaccatgctcatatcgccactgtttagtgcgtcgctcagtgtgctgttgaacgaagccagttcggcaccggcggaacgcagtttgccggacaccttgcccaaggtggtgcgagcgtcgctgagcatatcgctggcgtcgtcggaagtccttttcaggtcgccgagcgtggagtccaactgggtggcgccggaactcagtatgccggaggcgtcagagacggtggacgacagggagtcgatttgcggtttcaccgtggccgtgaaatccgacttgatattggcgatactgttctgcgcttgatcggccagatccttgacctgcgcatgctgatcctgcgcgttctgattaccttggcgaatattggtcgccgccgtattcagcgcttgccgcagcctgttctgccgtgcgattgaacggtcaatcgccgtgatgatggatgagtcgttgcccagtatgccggccaacgtgttgcgaatttcagtgtatttctccgtctgcttgccaatggccgtggcttgacggtccaattcgtcggcggccgtggtggcaccatcattcgcgtcggaatacagcttgtctatggaatcggacaccgcgccgaaactggaggcgctcgcgtccagtgagctgctcatcgcgtcagcggtggtgcccagggctccgaccacgtcggtgactccctgcttggcgctggcgagatccttgcctccttgtttggcggcagaggaaacctgcgtgatcagcgagttcgaggtgtcaagcaaggcgccggccgtatcggtcaatgcgctgtatgtgccaagcaaatccgccgtatcgtcaagccgtgtggcgaaatcggcgatattggcgttgaaggtattcagttgctctttggcttcgggcttggacagctgatcggccagcgaagacgcgatttccagccctgccgaagtgatggtcttggcgaacgtggtgttgatttccgccgccacctcgtccgtgccctcgttgagcagattcggtgccagcgcgttcttcttctcgttgcggtaataggtcagttcggcatgctgcacatcgtcggagaagaaggtcatcatgtctttgctgaacgacttcggaattacgatggccgcgtagtatttgccggatcgtgcgccctcgacggcatcggctttggacgtgatcgtccaatcgagctgactgttggcgcgcagcgcgttcaccacctgatcaccgaccgtgactttcaccgggatcaggtcggaacgatacccctcatccacattcgccaccgcgaatttcaggttcttcatattcgagaacgggtcccagcatgcggccacgttgaaccaggtgaacaggccgggaatcatcaccaagccgatcacgatgatgatggagaccacgttgctggtcaggcgtttgatgtcgccggtaaacagtttccacatggtgttcatcgtgcgtgcctgccttccttggtcggcggaatagtggggatgattgcggtaacggcggcgctcgggtccgcttcttcgtggcgttcggcggaggtgtcgcgacgcttggccttatgcccgtacagcatggcgcggatcgactcgtcggagaggttgccgagctcggtttggcggcggatggaatcgcgcatgaattccacgaccatcaggaagcccatgatgatgagcacccatgccagccatgtgcccatgaccacgattttctcgctggtggtcagcacaaacacgataatgagcgcggccggcaccacgaatccggcgataagcgcacccagcagcagccggggataacggtaggcgaatttggcggcccgacgttcgatggcatgacggtattcgtcgcggtcggccagtgccgcaatggcctgagtgacacggtattcgctgccaggcaggtgcaccggctcgccgataatcatgtcgctttccttgatttcccgcgcgaacaggcggttgagattggccagtttcggccgggcgccgaggccaagcgcaaaggccagaaccacgaaaaccagcaatttgccgatataggcgaaccagaggccgtcgtagaagccgccgatggtttcacgcattgcgtcaatcgaataggtgaacggcagcagcggatagatggcgcggaagaacgcgggcatcatttcaatcgggtacaggccggaggcgcccggcacctgcagaatgaccagcgccacgcacacgcctttgcccacgtgcatgaacgtggtggagagggcgaaaatcaccgacatatacaccagtgaggtgatgacgcaggtgagcagaaacaccggggcgctcgcgcattgaatgccgatgacaagatcgccgatggccgtgaccaggccttggacggcggccagcgtggccagcaacaggaaacggccgagatagccttgagttggcgtgagatcgtcgatgccctcgtcgtcggtttcgagtttgggaatgaccacgagcacgaacgcgcccacccacaaagacagggtggtgaacagcggtgccatgccggaaccataggaggcgaccggatagacggcctgttcgctgataacagtgggggagagcatgaagtcggcgattgtggcggcatccagtttgccgtcggtgccgatcagggaactgagtgaactggagatgctcagggctttgatgtcggtggtcagcgtttcgagcttggtttgcatgccggccagcgccttatcggtgtcgtgcagggcggtcaccgtggtggaggcggctttgtcgagttgatcgagggtgctcttcgactgatcgatgagtgagccttgcgacgtgatgccggtcgacagagtgttggcggtcgagctgagggtgttgaggccggtgttgagctgaggaatggcgccggagatgatggtgccgcgagcggtattggcctcgcgcaccgtggtttgggtggcggtattgagatgctgcgccaatccggcggtgtctgtggaggcgttgccgatagtggtgttcaggctatcgaggttgcccagtgcgccggcaagctcgctattgtggctttccagtgtggcaatggcggattgcagcggttctcgatcggcgttcggcagccctttgagttggtcgatgatgtcggcgttcgcttggttgatgtcttccgccgtattgatcagtccgcctacctgctgattggcggcgctgatggttccggctaccgtgcccacgctttggttggcctgtgctgcggcctggctcagcaggcttgagccttggtcaagcgcttcggacgtggaggtgacgaagccgttcaggttggtctgggtagtgccgatcagggtggagacgccggccaggccttccgcggtgtcgatgccaagtgcgcgcgcgtcgtccagcgcctgacgtgcggtgcgtgtctgctccggggtatcggtgagtttggtggtgagcttggcgatggtgctgcgtgtgtgctgcacgtcgccggaggcctcggcaagggccgtgagggccttggctttggtggtgtcttcggtgctgatggctttgccgccaaccgtattgatgacttcggtaagtacttcggatacggtggagacgaatgtggaattgaccgtgcggtccacagtggacgcgcctacgtcggtgactttgggggcgatggcgctggctttttcgttgacgtaatactccagagtgggccgactcttgccgccggtcaccacgccggcgagatcgtcggaaaagtctttggggatgatgatggctgcgtatgccttgccggattccacctggtccatggcctcggcttcggtgacgaaggtccagccgagctggtcgttgcttttcagctgcttgacgatttgatcgccgaggttttgcttgccgatgagcgcgttgtcggtgccgtcgtcattgttggcgatggcgacggtgatgcctttggtattgccgtacgggtcccagaagccgacgatgttgtaccacgaatacagtggcgggataaacaccatgccgaacaggatcacccatgcggccggcaccttgaacaggcgcaggaagtcgcgtttgaggaccttgaagatattgcccactgatacctccggagcttggtgttgcttggttgctacgttttccgtagcgatacgttaatcgtagcgctacggttgtagtagcgtaatacggctgccggagattaatggggtgattgatgatgtttttggcggaataacgccgctgcccagcggcttatcgtgtgtctctgggcagtgtgcctaattttttgtggctggggtgctgtgtggccgggtgtgctgtgtgtgttggtgtgaggctgccctccatggggcggtaaaaccttcattgggtggtaagtggcccatggggcggtaaaattcccatggggcggtggcttaaaatggctttattccgcggaatgcggttttgggctaaccgccccatggggtaattaccgcctcatgagagagctaccgccccatgggtaaaccgttgtatcagctttcgatggtgccggattgaccatcaatggccgactgctcgttctggctggatgactggtcggagttggagttaccggaagtatcagaacctgtgccggagctgctgccggtgccggactggccatcagtgccttggctggagcgaaaggcgttctggaacttattgacaagatttctggatggtttttggatgtttcctgaaagcgagcgggctcggtgtccggcaatgtagacagacatgtaccggctatccatcaagttcggcaaaactgcaatcgggtgatagtgtaaggggacgctatgtggggaggaaaccatggttgaattcaaggacgatggcacggccactacccctggcaagccgcgggagaaccgtgacgccgagtccgcagtcgtggctgatctggtggccgtcgaactggacgacgccggcttgaacccgaacgccaagcgattaccgattctggcgcgcatctatggcgcggtcgtgctgctggacggactcgccacattgccgattatggtgatttccatcctctatgccgtgcgcgagattctggatggtcatgtgcacgtcgatgcgatgagcctgactttcatcctgtccgcgattcatgcggtggtgctggtagtcagtgccgcatgcctgattgtgttcggcgtgatgctgctgcgcaatcatcgccggtatgccgcgcgctggacctacgtgctgatgccgttgacgttggccgacggcatgctgtcgctggccctgaccggccttggcttcaacctgctgctgccgctgattcagatgattattctcgtcgtgatttcggtgaccgccgatccctccctgagcgaggaacgccgtttgcagcgcgcgctcaaacgcatggacgatcgcgatgattatgaatcggcggtggcggccggcatgctgggccgcgaccaatccggcaagggctatattgcactggacttcttcaatatcttctggctgtttaccatcgcttcggtgggtggcctgattatggagacgatctaccatatggcgctgtataacggtgaacttcaggaccgcgcgggtttgctgtggggcccgttctcgccgatttacggctgtggtgcggtattggtaaccgtgtgcctgaatcgcctgtggaaggcgaatccgttcttgatcttctgcgcttcggcggtgatcggcggcgcgttcgaatactgcaccagctggttcatggaagtggcgttcggtattaccgcgtgggattacaccggccgttggctgtccatcgacggacgtacttcgggccaattcatgttcttctggggactgattggtgtggtgtgggtcaagtggctgttgccgcgactgctggctctgattaatcgcattccatggaaagtacggtattcgctgactgcggtatgcacggtgctgatggtgatcgacattgccttcacgctgatggccttggattgctggtatgggcgcatggccggccagccgcaggattcaccggtcgcgatgtggttcagcgaacgctacagcgacgcttacatggccaatcgcttccagaccatgcatatcgacccttccaaggccgggcgtatgtgaatggctggcaagtaattacgcttcgcgggcagaaggtgcgtagaacctaagacagccttcgcgtgtgggtggtaagtgggatacactttcgagcgttgaaggaatgattccctccgctgatgcgctgttttgtgacgcgcgtgatgacgatgggacaatcaaacgaaaggcaaggcacatggccgaagctacagcaaacattggtgtgattggactggccacgatgggctccaatctggcgcgtaatctggcgcaccatggcaacacggtggcgttgttcaaccgtcactactcgcgtaccgagaagctcatgaacgagcatggcgccgaaggcaacttcgtgccggccgaaacgctcgaggaattcgccgcgtccctgaagcgtccgcgtaccgccatcatcatggtcaaggccggtgctccgaccgacgcgaccatcgcgcagctggaagaggtgttcgaaccgggcgacatcatcgtcgacggtggcaactccttcttcaaggacaccatcaagcgtgagaaggaagtacgtgccaagggcttccacttcgtgggttgcggcgtgtccggtggtgaggaaggcgcgctcaacggcccgtctctgatgcctggtggcactgcggaatcctggaagaccttgggcccgattcttcagtccatcgccgccaaggtgaacggcgaaccgtgcgtgacccacatcggcaccgatggtgccggtcactttgtcaagatggtgcacaacggcatcgagtatgccgatatgcaggtgattggtgaggcgtatgacattctgcgccgtggactcggcatggatgccgaggagattggcgacgtgttcgctgaatggaacaagggcgaccttgactcctacctgatcgagatcaccgctgagattctgcaccacaaggatgccgagaccggcaagccgttcgtggacgtggtcgtggatcatgccggcatgaagggtactggtacttggaccgtgcaggctggtctggaatttggttctcctgtggctgctatcggtgaagccgtgttcactcgtgcactgtcttcgcacggtgagctgcgtgaagacgctcagaaagaaggtctggctggcccgaacaagaccatcgatctggccggagaagacaaggccgcgttcgtcgaggacgtgcgcaaggccctgttcgcttccaaggtcgtggcctatgctcagggcctgaacgagattcaggacggtgctaaggaatacggctgggatatcaacctgtccgaagtggcccgcatttggcgtggcggctgcattattcgcgcccagttcctgctcgaccgcatcaccgaggccttcaagggcgataatttgccggcttccctgttgtttgatccgtacttcgagaagatcatcggcgaatcgcaggatgcatggcgtcg

SEQ ID NO: 2657 - DNA, 3871 bp, Unknown
  R36_18m  MAG No. k141_2916
catgcgcagctcatcatcattacgcaccagcaacgcaccatgtcgattgccgacgcgctttacggcgtaaccatgagagccgatggcgtaacagccgtggtgagtcaaaaactcgaacgataaacgaatggttcccgctggtaggaactggtgccacaggtgacagagggcggtccatatcgaaagaccgccctctgtctcgcttcgttcgacagctcccaccagcgggagcggggagaggtattagcgcaatgccttgcgcacgccttggatggtttgcagcgtcttgtagaagaccttcttgatgggtacgtcgcgggcgggggccaccggggtgatttcctcggtgaacttgcacttgaactcgttaaggcccttgagagacggcgcgaagtcggagccaatgcccatgagatcgtattcagtaataccctgcgagcccaggatgcagcattcggaatacagcagcttgtcggtcacatgcagacgcataacctcgttgcgcatgccggcatagtagcgcaccgcatgtgtgccgttcacggtgacaatcgaccatgccaccacacggtcttcaatacgtgcggcgaacacacggcaatgatcggcacccaacgcgccgatcatatcggagtagtcgctcatcggagcaggcgtgaatccatcgcgctggccggtctcgaccatcacatcgtaatattcggagaaatcggccagcgccttatccgtctcatcggcaacctcggccgggcactcgcgcagagacttgcgcacgtcacggcgtccacgacgcttcatccgagccagaatctcatcatcgccaccggtgacgtcgatgaccacggtctggtcgtacggcactgtggacagcaccttctccgtaccatcggcgaaccaggtgtcgatacgcaggaacgcgatgttcttgtcggccttcttgacggtgtccacgatggcgtcgacgacctcgcgctcctcagcctcggtgggcttggcgacccacgccggcccatgcatcgagcgcagataatgataaccgtgcgtctcaaaatcgataaaggagatcacggcgaccaattcaccatcacgcttgatcagataatcgccccatggtgtgcgtccgtcgatatccgcctgaaaaccagaccaaaccttggtctgttcgatgggcaacgtgatgccggccttctcggcttcggcttccagtgtggctccgtcaactttctccaacgtgatcattacgattcagctatcctttttcgttcgtatccgtatgtcgtgtttctggtttggtcgtattgcgcgtgatctgatgtgggccaatcgggatccgatcaggatctgattggccggaatcccgtcacaagccaaacatgcgttcgaccacgtgatcgtcgccgtcgaacggcacatgcttgtgatggtccttgatccaacgctcgttgcccttgccgatgatcagcaggatgttgaatcggtcggcgtgcgcacgggcatcgtaaatggcgttggtgatggccgtcggacggtcggaaatcaccgtggaggccacatccttgttcgtgatgtagccttgcatttccatgcagatgtcgatgaacggctcggtgtccgtatcttcggcggtgaaaatgaagttcgcgatacggttctcggcagcctcgacgatttccttacgacgatcgtaggccttgttgccggccgatccggtcaccagcgtgatacgcgggttttcctcgccccaacgctcgtagacgaagtcaagcagcgcggtgacggatgcgtagttgtgcgcataatcgacgatggcgagcgtgttcgactgcggatcgcggaactgttccatacggccggcgatacgtacggattcgatggcgtgcagtgcgccggcgtcatcgagcgatacgccagccgcatgggcgatggcgatggccgccgccgcgttgaggtagttgaagtcgccatcgatggacagatggtagtcgccaagggtctgatctccgtcggcgatgtggaaggaggcgtgcgccgtgtcggcgggccaggcgacgacgtccgcactggtgccggcattatccgcgtcatgcagggcgaaggtggtcacgccgatgccggctgccgccgcgtcctcccgcaacagatcggcgtgcagactgtccgcgccgagtaccagcgacttcgcgttggcgatgatctggcgcttgcaatacaggtaatcctcgaacgtggggtgttcgatcgggctgatgtggtcgggggagatgttgaggaacgcggccacatcgaaagtcagtccgtagacgcggtccaccttgtacgcctgggaggagacctccatcaccagatactccatgccgttatcggccgcctcgcgcatcatgcggaaggcgtccatcgattcgggcgtggtcagatcggattcgacgtaggtgtggccgtcaaggcaattatcgaccgaggagaacaatgcggccttgccgccggagacggcgttgataagcgcctgcgtgaagtacgaggtggtcgtcttgcccttggtgccggtgacgccgatgaccgtgagctcgttctgcggatatccgtagaacgcggcggacagcaggctcatcgccttgcgtgcgtcgttgacgatcaggccgggggcggcggttgcggctgagtactcggtttcggccacgtatgcggccaggccggcttcgtcgatgccgttcagatactcggccttgaatcggcccttgcagcacagcagggtgcccggcgtgaccttgcgggtgtcgtaggtgatgccggcgaacggttcatccgccgaagcgatacgggccgggtcgtcggtccagacatccccttggatgatttcacgcagcagatggtgttccttgagcaggtcagcggccgaagccaaagtcaaagccataattgtttctccctattatctagccgatacgccattctacaggtggggtgtagcgtgttgtggctcacacgtcatcgaccacgatatgggcacatgatttgattagaatggtgaaccgtgacgacaagcgaagcaactacgcaatccgggcagtcagccggatcgggcgagtccatggcagccaagcgcgccagattcgagcagctcgccatgcccgccgtcaatgcactgtaccggcaggcgatgaggctgaccaacaatcccgatgacgcgcaggatctggtccaggacaccttcgaacgcgggttcaaggccttcgactcatttcagccgggctccaacttcgaggcgtggatgaccaccatcgagcgcaatgcctacttcaaccagtatgccaaggccaagcggcgcccgcagcgtgccaacgactccactggcgaatacgacgattgggacatttacgatgccgccgaacatacgtcggacgggctcaagtccgctgaagaggaatatttggacgccttcgcgcccgaggaaatcatggccgcgctcgccaaactctcgccggaacgccggcaggtgttcatcgacgccgccatcgacggcaagtcctaccaacaggtggccgatgagcagggcgtgaaaatcggcacggtgatgagccgcctgaatcgcgcccgcacgcaactcaagcgtgagctcgcctcgtatgcgaaagagcgcgggtacgcgactggttcgtcggctggttcaccatccgcgaagttgagcgaaaacgttggtcgaatcgccgattccggccataatgaaagtagtgaacgaactgttggcagcaatggcgacacgcaagccgtagtgagacatagtcatgcgactcacgcccacacgccacaacagtcaagcaagctttcgggaaaggagatctgatgaacgatcagccggtagagcgtactcgcc

SEQ ID NO: 2658 - DNA, 3495 bp, Unknown
  R36_18m  MAG No. k141_2922
accacaaacgacgcacaaagtcatgagccattcgaattgcgctggcccaatcgctacgaatcatatttgccgtagcccttaagtgaatcccactgcatcgagatatcgcgcccgctatcccttccgataacgccgaccacgcgtgttgccttcagcaatcagctttccttgcgcaactaaaccgtttaggaatttgcggactgttctgttatcgagctctgttatcttggcgagttcaggtacagtcacatagtcaacctctgtcaagcgtcgattcatcgccgacagcatcgctgcccgcgaatcaatttcacccgatgcggttgcatctgctttcttaccatccacacgttccccgccaatgagcctcgcaccctcttcggcatctttctcaactacagatctcacgctagcaaaaccagaaccatccacggtcttcagcgcaggaacaataggaatcgtcgcctcgaatatgtcaccatcgcggaactcaggctctcgctcagtatattgccgggacgctcttatcagattccgcagtccgctacccagctgctcggctatgccggtctgcacaaacacattagcgataatcggattctttggcattggcgtgaactcgcccagcttcattcgaccttcaaagaatgagcgcgaagcattaaccgtccggatggattcattatcaatggtgacacgcgccaccaccggactggaatactcccgatgcatgaggctgtttgccaccaattcacgggcgatcatcgtacgcgggctcactcgcttatcgccctttaacacaaagcggtcaggcagattccgctcagtaaattcacggagttgctcgtacgaatcgaacaagttggtccgcaccataagtcggtcatcgtatcggtcaatattgtctcgccgaaccacggcatcagtaatatacgctgggcaaaccgaggaaatgacttcatccttgcccaagagcagcactgcagcaagattaaagccctcttcgccggtcgtgtaatcacgatcgtatagcttggcgctgcggaacagttcttcgtcagacatagttccccaagggtgcccagctcgctgagcgaccgccagctgccgcattcgcgcaatcagctcaggacgcaaatcaaacggagtcacgtaacggaaaattcgccgttcggaatagtagttctgcttgcgaatatacatttgactaatctggatatcgctttcgatgtgtgtatccacatcagcaatgcgatcaaacactgcgcccttgaaccgcacaaccgaagaactcggagctacccaaatacgaacaataatccgttcgtcgtactcgatatgttccgtttccaccattggagccggttcgaacatcttacgattagacactacgttgacaacgttgcgctctatctcactaacgcgcttagaatcgacgccgagcacttgaccgtcatcgtcaacgccaagataaatgctgccaccagaacgattggcgaatgagcatacagtctcaaaagtatccgtatgaggcaattcgctgcagcgcttgaactcgaccatagatgattcaccggcctgcagcacttgcataagttcatcctgcgtcatcgcattccgcccttcatagcgataattcatacattaggacatggcacttatcgtattttagcatctaattagtacattaggacattgttttatgtcctaatgtactaattaggcggctaattgtactaataattgcacactgatgtactaatccgatgatcgaatgcactaattgtccgcgcaaatgcactaatcggatgaccgaatgtatcaatgagacctataggcagccgattggctgacgatcagcccagtcattggctatcggccgctagccagtcagccgccaacagccaacagccacccaactaatagccgccagccaatcagcccgtccaatcactccttgtgttccagtgcggccttcaaatcgcggctacggtagcgttcgcgcagcatagagaatccaccgaagcccacaagccacaccaggccggcaatcgcggaattgcgcgtatcgtccgcaaggaacaacgtcaggtagatgaacacgaagaacacgattgccaccgtattgagcaccttccacgcgggcatgacgaacccgtccgcgatgaaatcggcggaacggcgatacctgcgatgcgccagcagcgtcaggatgtagatgaacaggaacaccgcggagctggcggacgagaacagcacgaacgcccccgagatgccggggatggcgttgacgatcggcgacagcagtatcagcgccgcggacaccaggatggcgcgggccggcaccttgcgatcggacaccttgccgagcttgttcagcatcgggttcggcgacacctcggacagctgatacaggtggcggccggcggaatacaacagcgaattgagcgacgaggacgcggcggtgatcaccacgaagaacaccagggcggacgcccagttcaaaccggcatactggaacaccatgatgaacggggaggcgaaggagccgtcctcgttcggcttgaacgaggtccacggcacgatgcacatgatggccacgagcgcgcccacgtagaagatgagcacgcgcacgatgatctcgttgacggctttgggcagcacctcacgaggattcttggtctcggagacggtgacgcccacgaactcgagcagctcataggcgaagaacaccatctggaagctcatgaggaaggccatccagccgttcggggcgaacgagaagccggcgaacaggttgtcgagtccggcgtggcccgccgggctcacatgatccacgccatgaatccgcgcggccgggtaatggtagccgatcacgatcatgaccacggcggtgacgatcatcgcgcaaatcagcgtgatcttgatcatcgagaaccagaattccacctcgccgaacaccttgacggcgatcaggttgacggacaccagcgacaccaggaagcacagttcaatcagccatttccaatgggtcaggtcgatgccgaacgtgtcgaagaaggtgatgaagtacgtggagacggccgtgatctcggtcatgcccagcagcacgagcgcggcccaatacgtccagccggcgaaatgcccccacccgttgccaaggtaacgggtgatgaaattgatgaaggtgtgctggctggggtcgcggtacatcatctcgccgatggcgcgcatcaggaagaacatgatgacgccgaccaggatatacacgaagacgatcgaggggccggtcagtgccagcgacttgccggaccccaggaacaatccggtgccgatggtgccgccgatggcgatgaactgcacgtggcggttgttcaggccacgctccatctcgttggtccggtccaggctttcgacagacttgagtttgcccgtagcctgccgtgtaccaccattcacattcgtatcggccatactgatttcatttctcttctc

SEQ ID NO: 2659 - DNA, 15552 bp, Unknown
  R36_18m  MAG No. k141_2981
tagtgggtgtgccggctcactgccgtacacggaaatgatattggaatctgaagcattgctggaattggaggtaccggtcgatccgcagccgctgagcagcatgacgattgccgcaccggccgcgaccagtgaagtgacatgacgtgtgttcatgaatctctcccaaatattctggcgtcgtctttttggcgacgaaagacaccataggagcttcatgttaaccatgtatgcaatattctcgaaatataaacattactgaagactcaaggcagtaattaatcccagaaacgcaaaaatcccctcatgaagaagggattttcatgtttctgtttggaacagtattcagcgaggcagcatcatcggacgctggctggccttgatcggggccggcagctcgctcttttccttggagaggtactcgtccacggctgcggcgcaggagcggccttcggcgatggcccagaccacgaggctctggccacggccggcatcgccgcacacgaacacgccatcctgggaggtggcgaacttgtcattgcgagcgatgttgccacgcttgtcgagttcgacgggcagctggtcgaggatggtctcggtgtccggatgcaggaagcccacggagatgaggaccagatcggcgggcagcacgcgctcggtgccaggctgacgagtgaacggaccattttcgccgggagccacggagacgaccttcaagccggtgacatgaccacgctcatcggccacgaagccttcggcggtggtcgagttgtcgatggtgaccttggccttctcctcttcggtgccctcgaagttcacggagtcggtggagtagatgtactcgccgccctcttccatggaggaggtcttctggtaggtgcgggcgaaggtcggccacgggctgttgtccggacggcttgacggctctttcggcatgatctgtagcacggtgacgtcctccgcaccctgacggatcgaggtgccgaggcagtcggaaccggtgtcgccaccgccgatgacgatgacgtgctggtccttggcggtgctgtcgggcaccggcttgacgccgaagctacggcgcgtggcgtcggtctggaagtcgtgggcgaagtggatgccgtcgagctcgcggcccggaatcttcatatcgcgcggcacgcgggagccgatggccactacgacggcgtcgtaacggtcacgcaggtcatcccacgtgatgtccttgccgatttccacgttggtgcggaagcgggtgccttcggcctccatctgcttgacacggcggtcaagcagacccttctcaagcttgaagttcgggatgccgtaacgcatcagaccaccgatggcgtcgtccttctcgtagacgacgacggtgtggccggcgcgggtgagctgctgtgcggcggcgaggccggcagggccggagccgacgacggcgaccgtctggtcggtcagacgctgcggcggcagcggcttgacgtagtccaaatcccatgcctggtcgatgatggtctgctcgtcaagcttgatcatggtcggcggctggtggatgccgagcacgcaggcctgctcgcacagggccgggcagatgcggccggtgacttcggggaagttgttggtcatggacagacggttgtaggcgtcttcccacttgccctgacggaccaagtcgttccactcgggaatcaggttacccagcgggcatccggtcatgcagaacggggtgccacaatccatgcagcgggccgcctgcgtttgggtccacggttgcaggccagtttcggcgtgaacgtcgaaccagtccttgatacgctcctcaacggggcgttcagtcaactctcggcgggtacggaccttcaggaatcctctcgggtcgcccatgtcagcgcgctccttccataacctgctcgtacaccttttcccaggcgccgggcgcattgaaatctacattgttggccttggcttcttccatggccttcgtcatggccacgaactgcttcggcaccacgtgagtgaaccgcttgacggtttcgttccagtcctccagcagggccgcggcgaactgggaaccggtctcttcggcatgctgcttgaccagtgcgtacaccagcttggaggtttcggcatcaagcgacttgaagagcagtgcaccggacttgatggcacccgggttgaccttcttcatatcgaggtcaagcacataagtgttaccaccggagaagcctgcaccgaaattgcgtccggtggggccgagcaccacaacagtgccgccggtcatgtactcgcagccgtggtcgcccacgccttcgaccacgaacgtggcaccgccgttacgaacgccgaaacgttcgccggcgcgaccggctacgaacatctggccggaagtggcgccgaaaccggtgacattgccggcgatgacattgctgtgcttgtcgaaggtgacggtgtcttccgggcgcacgatcatgcgaccgccggacaggcccttgccggcgtagtcattgacttcaccgtagatgcgcatggtctcgccgcgcgggatgaacgcaccgatggactggcctccggaaccgtgcagggtcatgtcgatggtgtcgtccggcagaccttcctcgccgtaacggcgggtgatctcgtagccgaccatggtgccgaccgtacggttgacgttgcgaatcgggatttcgatgcgcacgggttccttgtgttcgagggccggctgggcaagttcgatgagcttgttgtccagtgccttctccagctcgtggttctgctcgatggtctggtgcaggatcgtgccgggtaccgggccggcctgcttgagcacgttggtcaggtcgatgccgccggacttccagcgcttgatggcctcgtcctgatccaaacactcaacgtggccgatggcctcctcaagagtcctgaagccgagctgggcgaggatctcgcgcacctcctcagcgatgaacatgaagaagttgaccacgtactcgggcttgcccttaaagcgggcgcgcagctcaggatcctgggtggcaatgccctgcgggcaggtgttcttctggcaggcgcgcatcatgacgcagccttccacgatcagggccgcagtagcgaagccgaattcctcggcaccaagcagggcggcgatgaccacgtcacgaccggtcttgagctcgccgtcgcactgtacgacgatgcgggagcgcaggccgttcaggatcagcgtctgctgggtttcggacaggccgatctcccacggggtgccggcgtgcttgatggcgttgagcggggctgcacccgtaccgccgtcatagccggagataagcaccacgtcggcatggcacttggccacaccggccgcgatggtgccgacgccgaactcggaaacgagcttgacgtggatacgtgccttcgggttggccatcttcgcatcgttgatcagctgcttcagatcctcgatggagtagatgtcgtggtgcggcggcggggagataagctccacgcccggggtggcgtgacggaccttggcgatccacggcgggaccttggcaccgggcaggtggccaccctcaccgggcttggcgccctgggcgagcttgatctgcaggtcggtggcgtgcacgaggtaatcggaggtcacgccgaagcgagcggacgcgatctgcttgatgcggctgtagcgctgcgggtcgttgatacgatcgtcggattcgccgccctcaccggagttggagcgtgcgccaatcgaattcatggcgatggcaagcgtctcgtgcgcttcctgtgagatggaaccgtagctcatggcaccggtggagaagcgcttgacaatctcggaggccggctcgacttcggagatgtcgattggcttgcggttgttgttgaacttcatcaggccacgcagggtcatgagtcggttcgacgtgtcgttgatgtggtgcgaatacttcttgaacatctggtagtcgccacggtgggtcgactgctggagcaggaagatggcctcgggatcgttgaggtggtcctcgccggtacgacgccacttgtagtcgccgcccgtgcgcaggttgcggtgcggggatgcgctccactggttcgggtaggccacgcggtgacggatggccacttcttcggcgatctcgtcaaggcccacgccacccacacgggaggtggtgccggtgaagtattcgtcgatgacttcctggctcaggcccacagcctcgaacagctgtgcgccacggtagctcatgatggtggagacgcccatcttggacatgatcttgagcacaccggtggaaagcgccttggtgaggttcttcacggcggtgtccgcgtcgaccttgaggtagccgttacgggccaaatcctcaacggattcgaaggccaggtacgggttcacgcaggcggcaccataagcgatcagcagtgcgacgtggtgaatctcgcgcacgtcgccggcctcgacggccatggagatctgcgtacgggtgtggcggcgcagcaggtggtgctgcacggcggaggtcagcagcagggacgggatcgggccccacgtgtggttggattcacggtcggagagcacgatgaagttcttgccgtcggcgatggcctcgtcgatttcggcaaagatctcgtcaagtcgctcttcgagggccttgccgccgccggcgacctggtagaggcccttgaccacgtacgggcgatagtagccgccgaggatgcgggccttgtcaaggcgcttgagctgggccatctcatcagagttgaccacgggcagcgggatgaggatcttcttggcgtgcagctcggaatcggccagtaggttaggctcggggccgatggcggattcgagcgaggtgacgatctcctcacgctcccagtccagcggcgggttggtgacctgcgcgaacttctgggtgaagtagtcgaacagcatgcggctgcggctggagagtgcgggcataggcgcatcgttacccatggatcccagcggttccttaccggtgttggccatcggagtgagcaacagcttcagatcctcttcggtgtagccgaaggcgcgctgacggcgctggacggactgtccggagtggctcacgtgctcgcggcggggcagatcgctcatctcgaccgagttgccttccacccacttgcggtacgggtgctgggaggcgagggtcttcttgatctcttcatcggggatgatgcggccttcggcggtgtcgaccaggaacatcttgccgggctcaagacggcccttggacacgatgtgctcctgcgcgatctccggcagaacgccggcctcggaggccagcacgatgtagccgtcgtcggtgagctgccagcggccggggcggaagccgttgcggtcgagcagggcgccgacctgggtgccgtcggtgaagacgatgtcggccgggccatcccacggctcgataagcgtgttgttgtactcgtagaaggcgcgcacgtccggatcgagatccgggttcttctcccaagccggcggcagcatcatgcagatggcgtgcggcagggaacggccggcgaggtgcagtagttcgaggcactcgtcgaaggtgccagaatcggagtagcccggagtggtgatgggcagcagcggctcgaactcgccgagcagttcgctgctcagacgaccttcacgggcggagagccagttgcggttgccctgaatggtgttgatctcgccattgtgggccagcagacggaacggctgggccagcggccagctcgggaaggtgttggtggagaagcgggagtggacgatggcgatggtggccttcatgcgctcgtcgttcagatcctcgaagaagtgggtgagctgcatggtggtgagcatgcccttgtacgtgatggtacgggcggacagggaagcgaagtagacgcctacctcatgctcgacgcgcttgcggatgcggaaggtcttgcgatccaagtccacgccggccagagcaccgtccggagaggcgaccacgagagtcttgaatcccggcatggcggcaagggcctgcaggccgaggccgtccgggttggtgggcaccacgcgccatgcgagaacttcaaggccctcctcgcgcacgatcttggcaatggcctgttcctgctgaccggaggtttcgatgtcgcggtcgaggaaggcgatgcctgcggcgtagtggccggcttcgggcagttcggcgggcacggtggcacgcatgaactcatccggcatgctcatcagaatgccggcgccgtcacctgtgttctcctcggcacccacggcaccgcggtggtcgagattgaccagtacctcaatggcgtcagtgacgattttgcgttcaggacgcttgttcaaagtggtgaccatacccacaccacaggcgtcatgctcgttggcgggatcatacataccgtccggagcgtggaccgtgagatcgagcggggctttgaatgtcaccggaatcacctcaattgcttgtgggcacgtaagggaatcgtgcctcttcgttcattgctgttgacacagtaccgttgctccatgtcattttcgtttcgcgtgtccatataccgagtcgccataaaagtcaatagtgattctcaagcaattgtttttatggccagttatgggggtatttcgaactttttcgcccgaaatgtctatttgaccacacgaaaatacgatacggaaacgtccgtatcgtgaaatgctgcgttgggtgatgttacggattggcggctgtggaccaccctcagtcatgcttcgcatgacagctcccgccagcgggagcgataaatgcgaactgccagtcaacggtaaggttgactggcagttcgcatttatacaaggcgcaatagtctataagcgtttgttgccccgtctggagggtttctcgcctcttgatgctggtgccggactggccggtgaccggagcgatgccggcgtgggcggccaggtgggccgcgcttttgaagttggcgatgtcgccgccgatgccgagcaggatgctgcttgcggtcctgacgcctgtcccgggcgattgtggcatcctgtgcatgtctgacaccatagcgatcggcgcgctccgcgaactcaccgaacatggcatccgcgtgcccgacgacgtacggctcatgggattcgacggcatccccttctccgactgcgccaacccacccattagcactgtggcgatagacgtccccgcaatggctcgtacggttatcgatcgcatggtgacgctgatcgagtcgaacctacggcatgaacggcccgatgacatcacccatgaccatatccagttccaggtgatgccacgcacgtcgactctggccgcctgataccggccggcacccttatgagtgccggccttcatccctgaaaatatgggtctatgccacgtacagcgcggcgggatacgtgagatatgaaatttcatcgagctgatcgaccgtcacatatccggctggcgcgttgagcacgtccggaatgcggttgacgattgtggcgcacgtatgttcgacggtcgccggcttgaccacgtggaactccacgtccggttcaccctcgatcttccaatcgcacatatcgccatcatccggcccgtacaccttgccgatacaggcagtttccaacgtgatgccctgattcgtttcggtggttaccacggcggacatgccgatgcatttgccgaccggaatcgtctcgtccatcgtctcggaatacacgtcgacatcgctgaaatacggcacactggcctgggtctgcgatgcgatggtaagcccaagcttctgggccagcgcttcattggaattccatacatacgagggcaccacggtttcgggatgcgcaagctcggcctcgaactcctcggcggtcagaccgcagccgtgcgctttggccaaagccaggccgtaatcctcgacgttgtagctcaccgcaccggtgatcttcttgatgctgtggcatccggcggcgacggtggagaccatgttcacccagtagatgtcctgcatgccggagccgaccatggtggcaccggcttccttggcgatgatgtcgagacggttcgtggtggccggatcggtggtccacgggtagatgcattcctcgcaggtggtgatcacgctgatgccgcgggccaagcactgctcgcacatggtggcgatttcgttctcgaagctgaatagcgtgactaccgcgatatccgcgtcgcactcgttgagtacagcctcggcatcggcgcgaatcggcacattgatggggccgatgcctgcaaacacaccggcatccatgcccacgacttccggattcacgtcgatggcaccgacgatttgaatgcctttctcgtgcatatagcgaatcgtgtacttcgccattttgccgcagccgtattgaatggctttgattggttgcataccgcatactcctttgcaacagtgcatattggccattggagaagtctcaccgtcgagaccaagccaatagccttaactctaccgacatcaggctgggcattcactgatatcggcggcactggagcgtcgggaagagtcggcgtagcggtaccgctaccgagcagaaggactgggccagtacaggccctcccgccgaatcacggcatctcggcatccgccagttcctgttccgccgtatgggagaggccgatgactatcgtaaaaaacacggcatatcagcaacttacaactacccttcctgtatccttaatgtacaagccccgtgttgaccgccgtttttcatgtcaccggggcattgcaatacgaggtaagggggcctcgtgattcatgcgttacaatcatccgttattaccaatccgcagtggattgaggagtggctttccgccccgcgattccgtacataccttgacgcttgccaccaagatgcgcttacagccttactttatacgagtggaatgttgaccttggtcaaatcctcgtgaaggatgtcgcctttttcgagatcgctctccgaaatgcttatgataggaacctcgctaaccattggcagaagggtcagcattggctgtttgaccaacaatcaccggtgaatcggcccattccacgccgaacgagctccggcaaacctttcgacgcgaatgctctcagcggccgcgccaacgcctgtcgaacgattcctagccaaaactccatgcccagccattgcgcggtagcatggtgccactcgacttaccatctacttccggttacgcagggcgtggagcatggcgacgaacacgataacgataacgatgaccacagccatgatcgcgtagtcaatctatgcgccggtcacggtggcggcggcatagccggcggaacccaccttgcccgagccggactggaacacggagatcacggtagcccaccacagtggtgccggccgcacccgtgaactgctgcagcgtggagaacatcgcgttgccgccaggaagatgctgcgctggcggaagcgacggcgcagccatgcgctgagcggcacagtaatcgacacgaccagcagatagccggtggtgagccattggatggtggcctcgctgatgtggagcacgcccatcagctgcgggaacagcacattcatcacggtttcggtcaggatgccgaagaatgagagtgagccgacggccacgatcgcgcagatgagtttgccggggatgcgttcgtcgcgggccgattgcatcgcggcgtctgccgctgagatagtgcccgaggtctggggctgagtcttcagagttaccgattgttcaaaagtcacactgtaacaataacactacggaaagcgattaccataaagcgtgctcacagtcgcccatcatgcggacttttcgaaaactgttgataaatagccattttccacaaggaatccttgcataacactatgatttagaacatctattagtatgacgtaaatcacattacgaactatttaaggtaagcgcttacagttcggcatgggagactcctcgtcacgatatgaatgcgctacagtcactatcgattgatacgcacgccccatcgactacgcgatttcgccgtcgccgtacgcgcgttcggaggcacgcagacacggcttgccttgcaccacttcgacctgcgagggcggcgcgtcatcgccggcgcgcttggcctggatctgttcgaacagcattcggaaggatcgctcccccatgtccaggaagttctgggtgtaactggtcagcgccggattccacatggcaccgaagttgcggtcgtcaaagcctacgacgctcacgtcagcaggcacgcggcgaccaacctcccttagacctcggatcacagcgatggcggtctcgtcgttgtcggcgaaaatcgcagtcacatcaccacgacggcccaaggtgcgcccagccttgaccgactcctccaaatcatcgtcgggcacgatgattgggtcaggtgccgtgacgccgcgctccttgagcgcgtcacgccacccattggtgcgggtgttatcggtcggaccttccggacgccccacatggaacacggtgcgatggccgagatccagcagatgcatggtcatccaacggccgccatccctttcggcgttgatgacctggtattcgccgtcgccgaagctgccacccaccacgaccatcggcatatctttgggaatgtattccagtgcggcgatgccggcccggtcgtactcgtagacgatcacgcccgccggcctgatcgacaaacccatgcgcacgcgagccttgacggagtccatgtcggactcgtccaaagaaacaatattgagcaggaaccgacgtttacgggcggcggcctccaccccatggttcgtttcggacgtggagaaggcggaaggattggccgcgaacaccaccacggagtccatctcccggttcgacagagcgcgcgccacaatgctcggctcgtagcccagctccttgatggccttggcgatgcgttcacgcttgtcttcggtgacattgacggtgccgttgagataccgggagacggtcggtgccgagactccggccagtctggccacgtccttgatcaccggtcgggtgcggcccgcacttctcgccatccttgtctcccctgttgttgtcagttgttgttgttgcgtacgtcaaggagaaccggcatcaccatggcagtcatccagtcacacccatatccgttcagccgcgctccgacttcggttccccgtttttcgccgcgattcattgtagttcatgacggggaacctatatccaaatcaataacttcgcgaaaaccgtacgctgagttgcggtgagtgtacggtttccgcgaaatcatccctaatttcgtgaagaacgtacactgaatcgtcgtcaacgtacggttttcacgaaatggggcctcatctcgtgaagaacgtacactgagtcattctgagcgtacggttttcacgaaatggcagctgatttcgtgaagaacatacgctgaagatgccctcggtgtcactgatgactgttctcggtatggaaggcggcgcagcaaggtgtcctaggctaatatcgcctccgacaagaccgtcggcaaagccgtcgacgtcgattcaagttatccacagcaacaattcgcgtgacatagtatccacatttgccggttgagcttgtgcaacgatcaaaatcacccttagcgtcgagatatgaaagaacacaaggaagtttctgcactgctgcagcaggcgaagcaggagcgtcgctgctgctatggcaccagtgatgcgcaacggcgcgccctgaaacgtcgcctgcatgccggggagctggtgtcaccgtataagaacctgtacgccgaccgaatactttggaacaccatgaccagagagcaacagtcattgcaggtcatacgtgcgctgtccgcaatccaccctcagtgggtatttgcggggttgagtgcggcgtgcgtatacggactgcagcacaactattccctgcacgacggcacagtgcacatcgcctcgaagtccggcatcggcggcggagacgaggcgcgtctcaaccgcatctatatcaatcggattccgacgcggaagcataatggcattctcttgacgactccggcgcgaacgctgctcgactgcgcggcattcccattcccacaggcgctgcccatatacgattcggctctgagaaagtccctgacgaccatcgaagaggtgcagtcgctgatgattcaaagcgtctgcgacgaggtctccgtgaccaagctgctgaagtacgcggatcccctgagcgaaaacggcggcgaatcattgatgcgtggccagatcaccgaattgtctttcggcattcccctgctgcaggtgcagttcatgaatcccgacaatcccgcaatgccatatcgcgtcgatttctgttggaagctcgcagacggccgcatcatcgtggcagaatacgacggcatggccaaatacgccgacaccagcaacaagaatcgcgcaagcctccaggcgaaaatggagtacgaccgcagacgtgatcggcatctccgggaacagggcgtcaccgaaatcgtccatgtgttctatgaggatctgctacgccccatcaatcttgagaccaagctgctcaaggccggtgtgcccaaaatccggtgaagataggccccatttcgtgaaaaccgtacgcccagaacgactcagtgtacgttcttcacgagatgagaccccatttcgtgaagaccgtacgcttacgacgactcagcgtacgatttccgcgacatgaggccatttcgtgaaaaccatgcgcccagaacaagaccgtcagaaagtcgactagacagcctcttaactaccgaacggtatctatagaacggcgatattccgccagaaacgccgagagcggaatagtccccttgcgtttgtcatcggactgcgttattctgaaaccggtttcagaaagaaaccgataaacaaaactcaaagccacaaggttttgaccaacgaaaggaaacatgatgtctctcaaggattccatgattcgcggtctggctatgtacggtgccacttccctggcccagtccggtcacgccaactcccagatgattctcgacatcatcaacgacaccgataagaacgctcgctgagcctcttccctgactcgccgctcacacacggcccgtctcataacgtaaacaacaacacatcgcaaagcccacggctttgcaagtcaagacaaggaacacattatgtcattcatggattccatgattcgcggtttcaccctctccggtatggacgccatcgcccgcgccggctacgccgactccaagatgttcgccgacatcatcaacgccgccaacaaggacgctcgctgaatctagcgaacgatcccattcatgagattgcacgacacatacgaaggcaatcccccgcaggccgcaatcggccggcacaccacaataattgaataacgcaataattcaacacagtaataactgaacaataaccgggacaacggggtccatatattctttcttttcccatcgtgtgtacgccgtgccagcacaggttcacatacgatgcacacggccaccaatacacgatgcgtcatcatcaacgccctcaccgcatcatgagatactccccccgcccgttgtccacactgttgcctctgcaatgcctgtgatgcacgccgaacggcatcccgcgcagtgactgaagaacgaaaacaccaagggacggaaatggataacgaactcttcgaaaaggcgccgattccgaaggcgtatttctcgctggcgatgcccgtggtgctcagcatgctggtcaccttggtgtacagcatggtgcgcatatcttcctttccgaattgtgtggctccctctgacgagggagctgtcagcgcagctgactgagggagagaagcagacgaatgactgtatcggctgaaagccgatgccattttttgcggctgcgccacaagtctcccccctcagtcacggctttgccgcggcagctcgtcccgcaattatggagccttcggctgggttgactgtcgtcaagccctcgcctggaaacgcctccggcgtttccttcacggctcggcccatcagagggagcttgtgaagctgcttcagttgtagggttcgtacgacttgttcggtggtgcgggtcacgttggcggccgcgtcggccagcagttcgctgaggctggcggcaccgggggcgatgccgaataccgcgtcgatgccgacctcatgcagttcgtcgatgcccgtgccgatgtgtccggcgacggcgatcacgggcttgccgtggcgcttggcggtttcggccacgccggccggggttttgccgaacttggtctggaagtcgatggagccttcgccggtgaacaccacgtcagcccattgcgcggccgcatcaagtccggattgttcgatgacgatggcgatgcccggacggaattcggcgtcaaggaagcctttcagcgcggcgccgataccgccggcggcgcccgcgcccggcacgtcgttcacagcgacgccgagccggctttcgatgacctgcgcgaagtgcgccaacgcggcgtccagtgtggcgacgtcggcctgggaggcacctttctgcggtccgaacacggcgctggcgccggtgggaccggtcagcgggttggtcacgtcgcaggcggcggtgatggagacgttcttgagagccgggtccatcgtgctgatgtcgatggtggccagatcagcgagggccgctcccccgtgcttaaggtcgttgccgttcccgtccagaagacgaacgccgagggcctgcagaagtccggcaccggagtcgttggtggcgctgccgccgagcccgacgatgatgcgcttggctccggaacggacggcggcgagtatgagttcgccggtgccgtaggaggaggcaatcaacgggttgcgttttttggcttcaagcagtgcgaggccgctggcttcggctgtctcgaccacggcggtcgtgccgtcggcgagcaggccgaagtggccttcgacaggtcggccgagcgggtcgtggaccggcacggcgtgcatcgatccgccagtggcgtcgacaagcgcacgtgcggtgccttcaccgccgtcggccatggggaggcaacggacctcggcatcgtggtcggcattctcaatcccctgagccatcgcccgggccgcctccatggcggtcaggctctctttgaaggagtcaggggcacataagtatcgcgtcatgcttcgagcataccgcacgatacgcggaacggtaatcgctttccgtaattcgcgtgattatttttgttcaaaattcaggctttccaatccacaatgctactattgcaagcaaaactgcgatatcattgcggtaagcgtttagacatgttttccgtttcagggaagaaaaggactgattcgatcgtggccgtacagaacgataaggcgcaatcgccagcgacattgatggacgtcgccaaagaagcccaggtctccatcgccaccgcatcccgtgtgctcaacggcagcacccgcaaggtacgcaaccaatcgtatgtcaaggtgatggaa

SEQ ID NO: 2660 - DNA, 21619 bp, Unknown
  R36_18m  MAG No. k141_3067
gaacgaactgttggcagcaatggcgacacgcaagccgtagtgagacatagtcatgcgactcacgcccacacgccacaacagtcaagcaagctttcgggaaaggagatctgatgaacgatcagccggtagagcgtactcgccctatctccataacccgtacggcggccgatggcacggtaagccagaccgaagtgcatatcacggcggtgcatcatcgttcagtagataccggctcggccgctgcgtcggtccagacagacgtgcatatcgttacggagggcgactgttttgacccccgtacctgctgcgacgagcgtgaacaggcgttgattgccgcgttgcgtgcctacttgcgcccggatgtggcacccgaatgtctgatggcccggctcaaggccacgcttgatcactgctgcggcgaagataagtaacgacatatacaacaaggcccgtctgatgtatcatcagacgggccttgagcgttctataagaaacgcgaagaatcaggcgttaggacgcttgccgtggttggcggccttcttacgacgatccttgcgcttacgtccgcgcatgcccatgatggactcctttgctgcagtaaaaaaataagccttcggaattatgccacataagtacgacgtgatgcaacacgggtgtccatgtggcgatgatcgtcaggcttggttattcggtttttcagatttgttcggcgtggaaggtgaccacggtggtgtagtcatcgcccggctcgagcacaaccagatccttgccggtgcggaaggcgtcggcgtaggcggtcatcggttcgacggccacgccggcctgacgaaccttctcgccgatttcgttgccggtgcacacctgccaggagttgatggtcttgtcgccggtcagcgtgaccttgatgccgtcggggcgggtgaacacggcggaagtgctgccgtcttcgccgcggttggtgatatcggtccaggcatcgtcgaagccacgtccctccagcgtggggttatcgcgcaggtcgaagatgccggaaaccggctcttcaccggtgggcagcaggtgttcgtctacggtcacgtgggtatcgcagtgcagctcaagacggcaggactcgttgtcggcggtaatggcctgaccggtggcgtgcttgccgtttgccagccacgggtggatgccaaatgcccatggggccttcacgctgtcgttgttgtgcacggtgaaggtttccgtgagaccgttctcgtcaagtgcataagtggcggtgatggtgatatcaaacgggtagccggcgatgtcgggggagcgccaggagagcgtcacatgtgattcctgcaaatcaacgagctcccacatgtagcggtaggcgtagccgtgcagggaggattggcggtcgaactcgtcgatcggcatctggtagtcttcgccatcgaaagaatactgaccattggtcacgcggttcgggtacggtgccagcacccagccgttgcagcaggggatgaccttgttcgggtcgaaggggacgatgaggtcttcgccgcgccacttcagctcgcgcaggctggcacccagttcggtgacgacggcactccattcgccggacgagatgacatattggttaccagtgcgaggcttcaaagccatagtgcacactcctttgtgaaacagattgttaccgctcacaatcgtatcgcataagtcccaagacgcggcggcacataaggataaaaaattggctcccctctggaggggagccagcgtaacggaactacttctggactacttcgtagcggaccacagtggtgtagtcgccattgggggcgagcgtcaccaagtggtcaccagtgcggaaggcattggccggggcggtcatcggttcgacggcgataccatacggatgctcggcgaacggcgcgccagtggcggtgtagcactgccaagcattgatcgtctcatcgccaatgagcttcacttcaataccgtccgggcgggtgaatgtggtggtggtcgtaccatcggcggcacgctccacgtcgacccaggcatcatcaaaggcgcggccttcgagcgtcgggccatcgttcaggtcgtagatgccggtaaccggttcggtgccggtgggaatcagcgcctcgttcaccgtcacatgactggcggccttgatctgcaggtggcaggcggcggagtcggcgtcacgctcggcggaagtcgcgccctgcttgccgttggccagccacggatgcaggccgagagcccacggtgccggctcgtcgccatcattgcgggcattgacggtcacggtcatgccgttgttgccgagttcgtatgtgacggtcacggtcacatcgaacgggtatccgtccaggttggggaagcgcagtgaaagcgtcacggcgctatcggtcaacgattcaagcttccacatgtagtggtaggcgtatccgtggttcgcgttgttgcgcggtgcgggatgatattcgttgaccggcgcgcagtaatgcttgccattgaaatcgtattcgccgttttcgatgcggtttggccacggggccagcacataaccgttacaggtgggggtcaggtcgttgactccgaacgggcagaaaatttccttgccttgataatcgaatcggcgaatcttggcgccgagttcgcagatgacggcggaataatcgccatagtgaatcgaatactgatttccggtgcgtggtgttttactcgtcatggaatcactcccgtagtgaggttggtgggccggtagctcctgctatcgctggccccagtctagcgcgtctcctctatcgaggcggggattggcgatagccggcatataataaacaattcgtacagacacggtagcaatccgtggagtgacgagtctcacaccatcatgcgagaagcacgtggattccttggaaaccggtgattcgtgggagacgcggaaaagttgtgacggcagattcctgtaatccctgccttacactggaaaacactattgacgttcaggaggttccgatgaccaaaagcgttgtgctcgctgatccgcgaggcttctgcgcgggtgtggaccgtgcgattcttaccgtacagaccattctcaaagccgcggaggcttccggaaagcgaacgcgcgaggatgggctgcccccggtatatgtgcgccggcagatcgtgcacaacaagcatgtggtcgaggatttggccgggcaaggcgcggtgttcgtccaggaattggcggagattccggatgctgctgcccaagcgggtattccggtggtgttttccgcccatggcgtatctccggtagtgaaggcggaagccgaacgtcgtggcatgcatgtggtggatgccacctgccctctggtgggtaaggtgcaccgtgaggtgctgcgtttcgtgcgcgaggggtatgaaatcgtctatatcgggcacaagggccacgatgaagcagtcggcgtggtgggggagaaccccgaacatgtgcacttgatcgagcatgaatcggatgtcgattcgctggattttgcgcccgacaccaagctggtgctgctctcgcagaccacgttgagcgtggacgagaccgccgataccattgccgcgctgaaggccaaattcccttggattcaagagccgccgagttcggatatctgctatgccacatcgaatcgtcaggctgcggtcaaactggtggcccagcagtccgattgcgtggtgattgtcggatcggccaactcctcgaattccgtgcgactgatggaggtggcgcaggagggcttggggaagcgcggcaaagcgtatcgcgtggatgatgccagcgagcttgatccggcgtggttcgtcggactggagtccgtgggggtctcctcaggtgcctccgtgccggacgaactggtgtccggtgtgattgacgctctgcaaaacttgggtttcaccggtatgaagtccgtcgaaaccatcaaggaaaacatgcacttcgtgctgccgtcggagttgcgcaggaagaagtagtcatccttggctcccctcaccgagggaagccaagaacggtcaccacgtgccgattggtgcggcaacggcgttcaagaccttgagcaggtcctgcgggttcacgcctacggacagtccgcgtttgccgccggagaccagaatctggtcgaattgcagggcgctttcatccaacacagtcttatgacgtgtcttctggcccaacggcgagatgccacctaccacatagccggattcacgcattgccaccttgggatcggccatagaggccttcttggcacctacagccgcagccagggccttcaaatccatatgtccgctgaccggtaccacgcccaccacacgctccgaaccggtgtccgccatcaacgtcttgaacacctgatgctcgtcgaagccgagcttggtggccgcctccacgccgtagccgtcatccatatggtcgttggagtgctcgtattcgtatacgtggaattccacgcccgccttctccagttggactgtcgccggggtggaacccgcgcccttatcatgcttgcttttctttgccatgattaccgttctactacgaagagacccccgcacaaggcgggggtctcacagcttagttctcaaacgaaccgtagcggcctagaccgcagtggttcactcggagatctcagcgaagtacagcagggtacgaatcatgttggaggtgaagccgtactcgttgtcgtagaaggacacggtgcgagccagggtcacgccatcaatggtgttgacgtcggtctgggtcgggtcgaacacgccaccgtgggtgtcgccgaggatgtcggaggagacgatgccctcatcgttgtagccgtagtaatcggtgtcggagaaggcagccttgaaggcttcgttgatctcgtcggcggtggtctcggtgttcagaacggtggtcagctcggtgacggagccgtccggaacctggacgcgctgggcgtggccctgcagcttgccgttcacggacggaacgaccttgccgatggccttggcagcgccggtggagtgggcgatggtgttgatggcggcggcgcgcaggttgcggccggtcttggtgccacgcgggccatcgagcagcatctgggtgccggtgtaggcgtggatggtggtcatgaagccggccttgatgccgaacttctcgtccagcagcttgaccatggcggccatggagttggtggtgcaggaaccggcggagacgatcacgtcggaagccttgaggatgtcgtggttcacgccgaacacaacggtcggggtggtgtcatccttggccggggcggagatcaggaccttcttggcgccagcgttgatgtgagcctgggacttctcggcggaggtgtagaagccggtgcactcgagcacgtactcaacaccgtcgttcttgacccacggaatgttgttggcgtccttctcggcgtagaccttgtattccttgccgtcgacgatgatggagtcttcggtggccttgacgtcaaccggagtgccatcgtcatgacggaaggtgccgtgggtgctgtcgtacttcagcaggtaagccagggtagccggggtggtcagatcgttgatggcggcaacttcgatgtcgccggcctggccgccgcgagcctggagctcgaagatgcgacggaaggcgagacgaccgatgcgaccgaagccgttgataccaatcttaactgtcatgtaattctcccttgtagggtggccttggcgcgctttggcacaccgggccattgtttaccaacagttgctactgtaatgccgactctgtacacatggcaacgtttcagcgtgcgttttgggcaaaaatgccgtattttctgtgagcgctcacaattcggattgcccgcaaccgacatgtgatttttcctctcctttggaggaatgtctcgaatcatcacgagcaagcgcgcggcatgcaagtcagcgaaccagcagcttggacacttcggtgtccagctcgccgatatcgccgccgaattcatggaatctgctcacctgtggcaacgccacttcgatggggaaggtgacgatcagtgtgccgcgtttcacgctgatggccgcgtccacgccgtcgcggaactcgttgctgaccccctgcaccaccgtattggtcagcgtgccgttctagagctcatatttcagccccggttcgttcacgccaagcgaaacatcggagtgggagaacgccgacaccatgcggccgtcctcgggcaccggatgcgcggggaacgaaagcctaccatcggtgatggccgtgacgatgagcccgtcgccatacagatacccgcttgccccgtgtcgggccagcagcgccatcagttgaatgccggaaatcgtatggtcaatacggccgccaagcccgccgtacacgtgaaactcgcggcaacccgccgaccagccgaccttcagcgcggaaagcatgtccgggtcgtccttcaacgcgggcagcgcgatggtgcgcacatcggtgcggggcggccggccctccagcgaatcgaagtcgcccaccaccacatcgggcacgatgcccaactcgcgcgtatggtcgagtccgccatcggccgcaatcacatacgcaccggtgggaaccacgggcgtgcccgcatagtattcgcccgcaccaaaaatcacgcatacctgagtcattatgcctactgtagccggtatccacccatcgacacacggtccgcgaatgtccgggcatgtggtaagattcctatttggcttgagaaatcaagaaagcggggcaaccccacctggaagcctttcaaggcctcgggttcaaggcaaacagcctagcgattgcgatatacaacgcgcaatcaggaatgacgcaaagaactgatatgcgtctgcagaagctgagcgcatattggcgctggttttggcttgccatgaacccaaagcattgaacaggactccagcaaaggccccgccacggaattgaagtagaggattggagtcatcatcagcgacgaaccacgtattaacgacgagattcgcgtcccgcaggtacgcctgatcggcccgaagggcgagcaggtgggcgtcatcgcgacttccgtcgcgctgaacctggccaaggaggcaaacctcgatctcgtcgaggtggccccgaacgcgaagcctccggtcgccaagctcattgattacggcaagttcaagtacaacgagaagatcaaggctcgtgaagctcgccgcaaccagagcaccgcggaaatcaaggagattcgtttccgcctgaagatcgacgaccacgatttcgacgtgaagaagggccatgtgacccgcttccttaacggaggcgacaaggtcaaggtcaccatcatgttgcgcggtcgtgagatctcccgcccgattggtggcgtggaactgctgcagcgtctggccgacgatgtcgaggaatacggcaccgtcgagtccaagccgaagcaggagggccgcaacatcatcatgacccttgcgccgaagggcaagaaggtccacacccagtccgagcagcgtcgtcgtggcgccgagtcccgcgccgagcgtcaggctcgccaggcggctcgtctcgcggccaagcaggagtctcaggctcaggccgcggccgacgcgcagtccgcgatttctcagaagacttccgacaagaagcaaaccagcaaggagggcagcaatgccgaagatgaaaactaattccgccgcttccaagcgcgccaagatcaccggcaccggcaaggtgaagcatgtcggttccgccatgcgtcacaacctcgagcacaagtccgctcgcaagcgtcgtgaactgtccgccgacgatgtgctgcgcggcggccaggccaagaagctgcaccagcttctgcagaagtgagcatagggcttacccggaaataacaagactttagaaagctgaggaatagattatggcacgtgtcaagcgcgcagtgaacgcccacaagaagcgtcgcgttgttctcgagagggcttccggctaccgtggccagcgctcccgcctgtaccgcaaggccaaggaacagctgctgcactcctttaactacaacttccgcgaccgcaaggctcgcaagggtgatttccgtaagctgtggatccagcgcatcaacgctgccgtccgcgctgagggcatcacctacaaccgcttcatccagggcctgcgtctcgccggcatcgagctggatcgtcgcgctctggctgagatcgccgtctccgacccgaacaccttcaagaccatcgtggacgccgccaaggccgccctgcctgaggacgtcaacgctccggttgaggcctgattgcttgaagtcgtgacttcacactagaaaccccgcttccgagcggggtttcctattattagcccccctctgacgaggggggctcccgcgcagcgggtggggaagagaacaaacacatgaccaacggattcaccaaactcacagagcagttcctcgtccacatcggcgtggagcgaggactcgccacggccaccgtcaccgcctacgaatccgatatcgccaaatacattgattggctcgaaacccgcggcatccccgaaccggacgccataaccaaacaagacgtcgaagactacatcgccgcccttgaccaggcgggggagtccgcccgctccaaagcccgaagactggcctcgatccatgaattccatcgcttcgcgctcggccagcacgcggtgactgccgacgtttctgccgcagtcaaggcacccaaaggtgccagcaccctgcctgacgtactcaccgtggacgaggtaacccgtctgctcgacgcggcggcagccggcggctcaaccgatccggtggtattgcgggacaaggccctgctcgaattcatgtacgccaccggctgccgcgtctcggaagccaccggtgtgaatctggacgacatcgacctggacgagcacatcgcgcgactcatgggcaagggctccaagcagcggcttgtgccattgggcagctacgcatgccgggccatcaccgcatacctcaatgcggggcgtggcgagctggaacggcgctccagcgccaagattcccgagagacgcgcactgtttctcaacaaacgcggcaagcgcatctcgcggcaatcggtatgggaaatcgtcaaagcaaccggggagcgggccggcatcaccaaaccactccatccgcacaccttgcgccattccttcgccacgcacctgatccaaggcggcgcggacgtgcgcaccgtgcaggaactgcttgggcacgccagcgtgaccaccacgcagatctacacgcacgtaagccccgaaaccctgatcgaaacgtatctgacctcacaccccagagcgcggtgagacacaccattttgcgacgcgtccgcccatagcggaatcgcggcgggggagcaccaaagtcggccggaaattcaaggcgtgacaatacagtacataacagcgaaccgtcagccaggaagaggtattcatgctgcagatcaaatcgatctcgaagcgctataaaaccggtgatttcgttcaacaggcgcttgacaaagtcagcctgaacctacgcgacagcgaattcgtcgcgattctgggtccctcgggttccggcaagaccaccttgctcaacatcatcggcggcctcgaccggtatgacgacggcgatttggtgatcaacggcatctcgacgcgccaatacaaggatcgcgattgggattcgtaccgcaaccacaccatcggcttcgtgttccagagctacaatctgattcctcatcagacgattctgtcgaacgtcgaactcgcgctgacgatttccggcatcggcaaggccgaccgtcgcgaacgtgcgcgcaaggcgctggagaaggtcggactcggcgaacacatcaataaaaagccgaaccagctgtccggcggccagatgcagcgcgtggcgatcgcccgcgcactggtcaacgacccggacatcgtcctggccgacgagccgaccggcgcgctcgattcggacacgtccgtgcagatcatgaacctgctcaaggacgtggccaaggaccgcctcgtggtcatggtcacccacaaccccgaacttgcggaacaatatgccacgcgcatcgtcaacctgcgcgacggcgtgatccgctccgactccgacccgtttgtcgtggatgagacggccgaacagccggccgtgcacaagacgatgggccgcgcgtcgatgtcgttcgtcacgtcgctggcgttgagcttcaacaatctgaaaaccaagaaggcgcgtaccctgctgacctcgttcgccggctcaatcggcatcatcggcattgcgctgattctatcggtgtcgactggcgtgaacgcatacatcagcgacatccagcgtgacacgatgaccgcctacccgatcaccatcgactcccagaccttcgacctgagcagcatgatgggcggccagatgggcggcgatgacggatacggcggcaagacgcacagaaccgacggcatctacccggacgaccgcagcgtcaagcaggcatccagcctgaccagttcgattaccgaaaacaacctgacccgcttcaagaaatacctggataattccaagagcgagattcaccagtatgtgggttccgccggtatccagtacacgtatgacgtgaaattctccgtgttcgaccacgaccccgatggcacgctggtcaatgcggacggcgtgacgatcggtgccagcgactccacttcaatggcctcgcagatggcgtccacaagctcgtccggcatgtccggcacctcgtcgatcacctcgcagcagatgtcgatgctgaccggcaaaaccgatgagaacgccgcgcccgactcgttcaatgagatcatgcctggagcggacgacagcaagctcgtaggcaaggtcatcaccgacaactaccaagtggtcaacggttcatggccgaagtccaaggacgaggtggtgctggtgctcgacgacaacaacagcgtgccgctgaccacgctgtacgagctcggcctgctgcccgcctccgattaccacgagatgatgtccaagcttaacgccggcgacaaggtcagcactccacaagacaagatcgactatgctaaggccctcgatcagacgctgtacatgattccggcatccgaccagtacgtcaagggcgatgacggccactaccgtttcatcggcaacgacaaggacgaaatcgaacagcgcctcgaaacggccaccaaactcaaggtggtgggcgtcgtcaaggcgaagaaggatgcttcggccacaccgttggccgctggcgtgggatacacgcgcgctctgaccaatgatctgatcgaccgtgcggcctccagcgccatcgtcaccgatcagaaggccaacccgaacacgaacgtgctcaacggcatgacgttctcgccctcggacgacgccaccaaggcggccgacgcgcgcacctacgtggtttcgctgggcgtgacgcagaaggcgaacatggccaagtcgatgatgagtgccgggcagcggtccggtacgggcgcatcggatgccgctggtgctggtgctggtgctggtgctggtgctggcgctggcgctggcgcggcgggtgccggcgatcaggccgacgcgatggccgcgatgagcgaacagcagctcgccgacagtttcgactcgtatatcgccacggcttcgaacgacgtgcttgtcgcgatctacgaccagtacgtgtcgaccggcacctacgacgacaacctcgccgcattcggtgtggtgagtcgtgacgcgcccagctcgatcaacgtctacgccgacagcttcgaagacaaggaccacatcgccgacgcgattaccgactacaacaacaccgtctcgaagaaagacaagatcacctacacggattatgtggggctcatgatgagctcggtgaccaccatcgtcaacgtgatttcctacgtgcttatcgcgttcgtgtccgtctcgttgattgtttcctcgatcatgatcggcatcatcacctacatttcggtgctggagcgcaccaaggaaatcggcatcctacgcgcaatgggtgcctcgaagcacaacgtgtcccaggtgttcaatgcggagaccggcatcatcggcctatgctccggcctgttgggcgtgggcttgaccgtgctgctcaatattccgatcaacgccgtgctacaccacttcatcggcaatgcggacgtcaatgccgccctgccggtgaccggcggcgtggtgctggtgatcctaagcgtggtgctcacgctgatcggcggcctgattccctcgcgcaaggcagccaagcaagacccggccaccgcactgcgcaccgagtaagcgcatcgacatagtacgagacgagatccataaacctcggaacactggaatgcccgctgcaaaacggtgttccgaggcgagcccggcgagtacattaggataggcgagcaggtattcccggcaaagggggcgagggcaacgatggacgactggcgagacacccgcgataaagacagcgcattccgtcaaggaacgctgcctatgacaggaacgtatgtcgttgcacccccagcgaacccggatgttgataaggtagacagtatgcctaccgatttgcttggacgtgaatacgaaaccttccccgcacccgaaccgctgcaacagcacggtccggcgcgtgtcattgccatgtgcaaccagaagggcggcgtaggtaagaccaccagctccatcaatatcgccggtgcgttggcccagtatggccgccgcgtgcttatcgtcgatttcgatccgcagggcgccgccactgtgggactgggcgtcaacgcgaataccgtggagaacacgatttacaccgcgctgttcgatatttccgtggacccacatgatgtggtgcagcacaccgcattcgagaacatcgatgtgattccggcgaacatcgatttgtccgccgccgaggtccaactggtcacagaagtgggccgggagcagatcctgaacagtgtgctgcgcaagctcaagtcggaatacgatctcatcatcgtcgactgccagccatcgctcggcctgctcaccgtgaacgcgcttgccgcagctgatggcgtgatcattcccgtggccgccgaattcttcgccttgcgtggcgtggccctacttatgcagtccatcgaaaaagtgcagtcccgcatcaatcccgcattggaagtggatggcgtgctcatcaccatgtacaccaagacactgcactgcgaagaggtctgccagcgcatttacgaggcgttcagcgaaaaggtgttccacacgttcatctcccgctccatcaaactgcccgattccacggttgccgccgcgcccgtggtggtttatgcccctgagcacaagacatcaaaggaataccgtgaggtggcacgtgagctcattgctcacggcatcgtggcgtaacgattgtttcgataaacgatgaatgagacttccctttctcggctcccctctctgagggaagctggctcgcgtagcgagactgaggggagctccgcggaagccgaaatcagcacggaggaatccgccacttccggcttccgggtcaacctcgaggtctattccggtccgttcgatgccttgctcggcatgatcgccaacaacaaactcgagctgaccgaagtttccctctcctcgatcaccgaggaattcctgacatacgtgcgcgggctcgacttcacgaaaaacatggatgaggccagcgcctttctcgacatcgcctctattttggtcgaggccaaaagcgtggcgattctgcccggcggcgaagacagccagcacgacgagcaaagccttgaagcactgcgcgaacgcgatttgctgttcgcccgactcctccaataccgcgcctacaagcaggtcgccggtgatttccgggcgcgtatcgccgccaatgccggccgattcccgcatccggcggccatggacgagggcattgccgccatgttgcctgagctggtatggacgctgaccccgctcgaactcgcccaactggccgcccaggtcatcgccaacgcgcccgcctccgaagtatcgatccaccagctgcacgtgccgctggtcgatctgcgggcccaatcgctggtggtgcgcgaccggctgatcgcagcactggaatccaagggcgaccagtcgatgtcgttcagcgaattgacccgggactgcacttctcgtattgaggtggtggctcggttcatggccgtgctcgtgttcttcaaacaaggtgtgctgcagtatcagcaagatggtccgtttgccgaactgcacctgaggtgggtatccggcgtagacgaaacgatgaacgacgtgaacatttccgaaggcgattttgcgtaaggacggcgattggtgactgaacggattgacgcaacgaatgcaaccgaacacatggcggatgccgaatcgacggctgaatccgcaaaggccgaggtgaggggagtggaggagacgcgccccgaatacgtggatttcacggtagacgattttcccggcgggctgcccgcatgtctggaagcgattctgatggtcgccgaccagccgcagaccgccaccgagctggcccgcattttggcattggaccgcaacacagtcgaagaggcattgcaagccctgcacgatgactatgagggcgatgaatcccgtggcatccgcccgcgcggcttcgaactgcgccgcaccgctcgtggctggcagttcgccagtcgcgccgcgttcgagccggtcgtctcatcattcgtcaccgacggccagactgcgagactcagtcaggccgcactggaggcgcttgccatcgtggcctatcgccagcccgtcacccgagcccaagtggccgcgatccgcggtgtcaactccgatggcgtgattcgctcgctcacggtacgcggccttatcaaggaagacggcgtggaccccgaatcccgcgcggcccttttggtcacctccgaatccttcctcgaccaaatgggcctgaagagtctcgacgaactaccctccctagcgccgttcctcccgtccgtcgccgaaatgacacagtcgaaatcggaagatacggacgtgatttcgtagcgattggggcccgctacctgaccaatattcgtgcgctagaccatccaatatgtgatttatggtcattgtgactataagtagtgctatgctctcaatgcggggagaacaaccggtatggaaagaggcatggcatgggattcggcaatgtgtccgagcgccgcagcgcaccgccacaggtcggcgtgtcagtggtgattctggcactcggcccgaaaggcgataccggcaacagtgccgccgattccggcaacgccgcgaactcggcccattcccgtctctggctgcccctggtcaagcgcgtccgtcagccgttcctgggctgctgggcattgcccggcggcgacctgcgctccgaccggtcgttggaacagtctgcctacgcggccctcgaatcgaccacagacctgcacccgcgatacctcgaacagctgtacacctttggaggcccgacccggtcccatggcggattgcccatggtatccgtcgtgtattgggcgctcgtcggccagaccgaggccgcgggcttcgaggacggtgacaacgtacgatggttccccgaagacgaactgcccgagctggcgttcgaccatcgccagatcatcgactacgcgctgctccgcctgcgctccaaaatcgaatactccgacgtggccacccgactgctcggccccacgttcaccctgcgccaactgcacggcgtctatgaggcgattggcggcgaaaccctcgacttggcgaacttccgccgcaaaatgcttgcctcgggcgatcttgaagacaccggggagaaggtgcgcgaaggccgccaacgaccggccaccgtctaccgctacatccccaaacgacttgtcgagaatggcatgccccacgaatccgatggcgacgacatcgtggaactgtccagacaaggcgagcgtgaagacgctctcgacgcgctgatcccatccgcgcgcatctgatttttcccgccgacccgcttcgggccggcatcacagacgtatatagggaaaggaaccactatgaccgcactatccactgcgccgtccgttgacgagatcatcgccaagctgggcgcgcaaagcacctgcgatgcaggactgacccaggacccatggcacttcgacaccaccacacccagctacggtcccggtgcctcgatgctcgaccgtctgccagccaacgcgccgcgccagcaggtgctgccagacgaataccgcaaggcctccgacgaggaactgcagcagcgcatctccgacgccaagcagcgtcttggctccaaactgttgattctgggccacttctaccagcgtgacgagatcatcaagcacgccgatttcgtgggcgactccttccagctggccaagaacgccaccgagcgcccggacgccgatcacatcgtgttctgcggcgtgcacttcatggccgaaaccgccgacatcctctccacccccgaacagagcgtgaccctgcccaacctgtccgcaggatgctcgatggccgacatggccaacatcgaccaggtccaggaatgctgggaccagctcggcgagatctgcggcacccagccggacgccgatggcttgcagcagatcatcccggtcacctacatgaactcatccgccgcgctgaaggcgttttgcggacgcaacggcggcatcgtatgcacctcgtccaatgcgcacgccgtgctggaatgggcgttcgcccgcggcaagcgcgtgctgttcttcccggaccagcatctgggccgcaacaccgcccgcgcgatgggcattccgctgagcgagatgccgctgtgggacccgttcaaggcacagggcggcgccgccgatccggccgactacgcccgcgccaggatgattctgtggaagggcttctgctccgtgcaccagcgcttcaccgtcgaacaggtcgaacgtgcccgtaaggcatacccgggcgtcaaggtgatcgtgcaccccgagtgctcgatgcaggtggtcgacgccgccgacggtactggctccaccgcgtacatcgtcaaggagatcgccaacgcacccgccggatccgccattgccgtgggcaccgaaatcaacctggtgaaccgtctggccgcgcagtacccggacaagaccgtgttctgcctggacccggtggtctgcccgtgctccacgatgtaccgcatccacccggcttacctggcttgggctttggagaacctcgaagccggcaacgtggtcaatcgcatcaccgtggacgaagacaccgcccgcgaagccaaggtggcactggagcgcatgctgcgcgttcacccgtgatccatccctgacgcccctcgtacatgaggggagctgtccgcgtagcggactgaggggagcagatgacgcaaaaacagaggaaagcaacacaatgagcaacactgaaatcgtcgtcgtgggcgcaggcgtcgccggactgtccgcggcactggccgtggccggcaccggacacgacgtgaccttggtaaccaaggccgaactggtggaatcgaacacctatcatgcgcagggcggcatcgctgcggccatcttctccgacgacgacccgaagctgcacgccgccgacaccatggccgcgggccacggcctgtgcgacccgaaggccgtggacatcctcacccgtgagggtgcggagcgcgtccgcgagttcgccgcggccggcgtccacttcgaccgcgacgcgcatggacacatgctgcgcggcctggaagcggctcattcgcgcgcccgcgtggtgcatgccgggggagacgccaccggcaaagtgctcgaactggacgtctccgccatggtgtgcaagaacccgcgcatccacatcatcgagaacgccttcctcaaagatctcatcgtgcgggacggccacatcgccggcgtccacctgctgatcgacgggcaggacaaggatctggccgccgaccgggtgatcttggccgccggtggagcaggccgtatgtacccgtacaccaccaatccgccggtcgccaccgcggacggcctcgccgccgcatggcgtgccggtgcccaggtcgccgatctggagttctaccagttccatcccaccgccatggccgtgggcgagcacttcctcgtctccgaagccgtgcgcggcgaaggtgcggtgctgctggatgagcatggccacaggtatatgaaggacatcgatccgcgcgccgaactcgcgccgcgtgacgtcgtggcccgcgagaacttccgcgtgatgcaggcgcaaggcggcaagcccgtgatgctcgacgtctcgccgatgacccgcgagaaccccgacctggccagcttcctggcccaccgattcccgaccatcgacgcctatacgcgttcgcttggcttcgactggagcaaggagccgattccggcggcgcccgccgcgcactactacatgggaggcattcgcaccgatctgaacgcccggacctccattcccggcctgtatgcggccggcgaatgcgctcgtaccggtgtcatgggctccaaccgtcttgcctccaactcgctgctcgaggggctcgtctacggacgccgcgccggtctggccgccgtcgcggacggtgacgacgcggtctgggcacccgaaccgttcctgaactccgccaccggtgccgtgttcgaccatgcgccgatcgcgctggccgctcctgccactacggctgctgctgacgataccgccgccgacaaggtctgggaccgtacccgcatccagaacaccatgtggcatggcgtcggcgtgctgcgcgacgaggccggactgaaaaccgccatcgccgaactcggccaaggcctcgccgccgcaaacgcccaggctgatgtaaacgccgatggtgctgcaagcagcgttgaggctttggagaaccgcaacatgctcaccgtaggctatgtggccgccatcgccgcgctcgcccgcaccgagtcgagaggcgcccacgcccgcaccgactacagcgagccagtcgacaactgggcccactccgtcgcctacatcaaggactgacccatgctcacatcacacatcatccgcaccgccgtcgaagcggcgctcgccgaagacgcgccctacggcgacatcacctgcgagaccaccatccccgcggacgaaaccggctcggcccacctcaccgcgcgcgaaaacggcgtgatgagcggcatcgacgtgttcgccgcagccttcgccgcgcagaacccggccgtcaccgtcaccgccgccatcaaggacggcgaacgattccagcgtggccaggtactcgccaccgtggaaggtccggtacgcgacctgctcaccgccgagcgcatcgccctcaacttcacccagcgcatgagcggcatcgccaccatgaccgccgctttcgtggacgcggtgaacgccatctacggcgatgattatgacggacccgtcacccggccgcgccgctacgagcgcacccgcatcgtcgatacgcgcaaaaccacgcccggcctgcgcccgttcgaaaaatacgccgtggtctgcggcggcggccacaaccatcgctacggactgtccgacgcggtcatgatgaaggacaaccatctggcggcgctcgccgcgcgcggcatcgacctggccggcgcgatccgccacgtgcgcgaacaggtgggccacaccacgcatatcgaagtggaagtcgaccgccttgaccagattcccgccgtgctcgccggcggagcggacaccatcatgctggacaatttctcgctcgacgacacccgtcgcggcgtggagctcatcgacggcaaggccatcgtggaagccagcggcaacatgagcctggagcgagtgccagccgtggccgccaccggcgtggacgtgatctccgtgggcgcgctcacccactcggtgcgcagcatcgaccttggattggattggaactagtcatggccgatacccccaacgcatccggtgaacccggtgaactgtacctggacgccgccgccaccgaaccagtgagcccggcagtcatcgaggccatgaccccgttcctgactgaggcctacgccaatccggccagtgtgcaccagcccggtaaaaccgcggcccgcgcgctggacgcggcccgcgcatcattcgccgcggcattgggcggccggccggatgacgtgatcttcacctcaggcggcaccgaatcggacaatctggccatcaaaggcatcgccatggcgcgcatgcgcaaactgggcctgcggccggtctacggactcgacgaaaccgatggcaaacaactggcaagcagccgcccgcgcatcatcatttccgctatcgagcacccggccgtggcccaatcggcggcatggctgcacgaatggttcggtttcgaagtcgtgcgcattcccgtggatgcgcaagcacatctcgatctcgacgcacttgaacgcgagctcgacggcgaggccagcgaacgtaccacgatggtctccaccatacttgccaacaacgaggtcggcaccgtggaacccgtggaggaactggtccgcatcgcccacgcgcacggcgtgcccatccatgtggacgccgtacaggccgccggccagattccgattcgttttcgtgactgggatgtggacgccctgtccgtatccggacacaaattcggcacccccaaaggtctgggagcgctgctggtacgcggccgcacacccatcgaaccggtgctgtccggcggagggcaggaacgcggcctgcgctccggcacacagaacgtggccggcgccgtggcgctcgccatcggactcaacgaatcgaatgcgcgcatgcaggcgcagtgccgtgaattggtcgcgtcccgagacacgctcatcgacgcggttcgccgggtcgcgcctcgcgccgacctgaccggcgaccccgaacgccgtctgcccggtcacgcctccttcatcttccccggcgtcaccggggaagcgctgctcgtcgacctggacgcgcgtggcatcgctgcctcatccggctcggcctgcgccatcgggcgccacgagattcctgccacgttgctggcgatgggcctcgaaccgtccatcgccaaatcggcattacgcatgaccttccgcaagccgctgacccgcgaacaagtcgaacgcatcagcttggccatcgaagagtcctacaccgacctgacccgacactaaatctgacgccacttaccagaaaggaaacgacgtgagcaccaccacttcagcgcaacccgcgcagctcacccgcaacgagcgcctcgaccggctgcccttcaacaaggcgcaccgtaaactcctcgtcgcctccggcatcggctgggcattcgacgccatggacgtcggcctcgtttccttcgtggtcgccgccatcgcagccgacccgcacttcaacctcaccccgaccgaaaagtcgtgggtgctgtccatcggcttcgtcggcatggccatcggcgcggcggtgggcggcttcatcgccgaccgcgtgggccgcaaaaccgtgttcaccgccac

SEQ ID NO: 2661 - DNA, 9687 bp, Unknown
  R36_18m  MAG No. k141_3113
ctgacgcagggtcaggctgatcttggagttgcggtcctcgccgttttcggggcgcggggcctcctcatagccatagccgccggcattgccgtacggcgattggccgtagccgccatacgactggccgccctgacctgcagcaccgccgaacatcgagaagatgtcgttgatgttgttggggccgccgcccgaagtggagaagcggatacgcgaaccgttgccaccggcaccctggccaaacatggagccgaagatatcagagaaaccggaagcatcgaagccgccggcgccggaaccgcctgcgaagcgggcgccgcccatgccgaactggcgaatcgcgtcgtacttttggcgatcttccttcttgctcagcacgtcgtaggcttcggagatgtccttgaacttctcctcggcttccttggtcttgttgacgtcagggtggtacttgcgggcgagcttgcggtacgcctttttgatgtcgtcgtccgaagcgtccctggagacaccaaggactttgtagaagtctttactgagccattcgttttcagccattcatgtctcctttcttgaaaagtctttatggttggctcccgttggcgggagctgtcgaacgaagcgagactgagggtggtttatattcagtgtttgaccaccctcagtcagccttcggctgccagctcccgccagcgggagccaaggtaatgtcagctcgttaacgagctggccgttatcagttttgcggggaggctactactactcgggcggcgcggattacgcggtcgccgatacggtagccggcttccaccacggtgtcgacggtttccttgtcggcatcggcatccggcttgtgcagaattgcctcatgcttggtggggtcgaagtcctcgcccttttcgccgaacttctcgacgccgaacttctcgaaagccttgtcgatcttggcggcaacggccttgaacgagtcgtccatctcgctgtgttcgcgaatgcggtcgatgtcgtcgagggcgggcagcagcgcggtcagcacgtcgatgatgccgtgctgacggaagcgctcctgctccttctgcgtgcgattgcggtagttgatgaactccgcacgttcgcgttgcagggcttcgaggtagtctgcggcttccttcttggccttgccgaggggggtgagggtgtcttcggaatcggactggccttcgccagtcttctctccggcatccgacttctctccctcagctgcggcaggagccgcgtcggctccttcattggaaggagcctgggcagccgaatcctgcgcagagtcggactcggcggaggcgtcagcccctgaagaggcctgagcggcctggccggcagcctcagcatctgagggatccggcaggtcgttcaggtagtcgtccttgttgaactcggacatcacttgttgtccttgtcgtcatcgtcgtccacgacctcggcctcgacggtgtcgtcgtcggaaccggaggcggagccagcggaagcgccggcaccgtcagcgccagccgcaccggcggcagcaccctcggcaccctgctgggcgtagaggacctggccgatcttctgggcggcggtcatcagctcagtctgagcagtcttgaccttctcggtgtcgtcacccttcagggcttccttcagagcgttgaccttgtcggtgacttccttgacgatgtcgtcggagagcttgtccttgttgtcgttgacgagcttctcggtggagtaggcgaaggcctcagcctggttgcgggtctcggcgtcttccttgcgctgcttatcctcagcctcgtgagcctcggcttccttgaccatgcggtcgatctcgtccttcggcaggccggaaccaccggtgatggtcatggactgctccttgccggtgcccttgtccttagcggacacgtgcacgatgccgttggcgtcgatgtcgaaggtgacctcaatctgcgggacgccacgcggagccggagcgatgccggtcagctcgaaggtgcccagcggcttgttgtcgcgagcgaactcacgttcaccctggtagacctgaatcagcacggacggctggttgtcttcagcggtggagaagacctcggagcgcttggtcgggatggcggtgttgcgatcgatgagcttggtcatgatgccacccttggtctcgataccgagggacagaggggtcacgtcgataagcaggacgtccttacggtcgcccttgatgacgccggactgcacggcggcaccgacagccacaacctcatccgggttcacggactggttcgcttccttaccgccggtgagttccttgaccaggtccttgacggcgggcatacgagtggaaccaccgacgagcaccacgtggtcgatgtcgctcaccgagatgccggcatcgtgcagcacgttgttgaacggcgtgcggcagcggcccagcaggtcggaggtcatttcctcgaagtgcgcgcgggtcagggtctcgtccaggtgcaccggggtgccgtcgggggtcatggccaggtactgcatggagatgctggtggaggtggaggaggagagctccttcttcgcctgctcggcggcttccttcaggcgctgcagcgcgatcttgtccttggacaggtcgacgccgtacttgttcttgacttcggagaccagccaatcgatgatcttctgatcccagtcatcgccaccgaggtggttgtcgccgttggtggcctggacctggatggtggagaagccgtcgtcatccttgccgatctccagcagggaaacgtcgaaggtgccgccgccgaggtcgaagaccaagatgcgctcgtcttccttgcctttctcaaggccgtaggccagagcggctgcggtcggctcgttgatgatacgcaggacgttcaggccggcgatcttgccggcgtccttggtggcctgacgctgggcatcgttgaagtatgccgggcaggtgatgacggcgtcggtgacgggctcgccgaggtatgcctcggcgtccctcttcagcttcatcaggatctgcgcggaaatctcctgcggggtccacttcttgccgtcgatgtcgacggtccaatcggtgcccatgtggcgcttgacggaggagatggtgcggtcaacgttggtcacggcctgacgcttggccacttcgccgacaaggatctcgccggacttggagaaagccaccacggacggcgtggtacgggcgccttcggcgttgacgataacggtgggctcgccaccttcaagagttgcgatgcaggaattggtcgtaccaagatcgatgccaactgcgcgtgccataatgtgtgctcctttgtgggacttgcgattgcccggccggcgccgccgttcgccacgacctgttcgggttgtgacgcgcggtgtgcgcgagccgtctcgcacgtgttcattctttcgtttttcgcccgggtttcggtcggttccttgtgcggttcctctcggttgtggggtttgcgttcgcaaccgcccattcccgtgcttccgaaacttgagcctacaccactcaactttaaaccgcaagtgcatattcccggattcggcaaaaaacttgagcgattctcactcaggtttctgcgaagcgcggcacacggcacgtatcgcatcacagccaaaagccgccggaaaaccatcgcccgccgggcatcggctcggcgggcgatcgttttccggcggctggacgactcgggattaccggtcggccaaggccgaatcaattgttcctggcgttacgcgcggccttgatgagcatcgcgatcgcaaccagcatcacagccgcgatggcgatggccatgacggcggtaccggtggcgcccagggcgccgaacggaccggagaccgcggaatcgttcggcaccttgcccgaagcgatcacgccgttcttgtcggcgcccggcttcttgtcggcggagccggcggccggcgcctggatggcgacggtcgcgaccttaccggactggcgaccggtgacggtgagcgtgtactcggcgccttccgacatcttgtcgagcgcgatcgaagtggtctgcgcgggcttgacgcgcacgccggacagcggggtgctggaatcggacttggacaccacggcgccgtccttgtccttcagctcgtagctgagcagcgcgtcgccgttgaaaccgtcgacattggcgacgtacttgccggcctgcgtgcgggcgaccttcacggtgccgtccttggagagcgcgttctgctcgtcgggggaggtggccaggcccagggcgccggcgatggtgtagaagttatcggtctgatcggtcaggccgatgacgcgctgggcgccggggccggaagcggcgatgcgcagctgggtgccggtgtgctccatgtcgccgccgttgtagccgccttcggcgtcggtggaggcttcctgggcggtgccgtaggagacgaccatgttgttgccgtcggcggacttgagcacggtggacagcgcgtaagccggctgggcgttgaggacctgggaggtgtgcgcatgatcggcggtgacgatcaccagcgtgttcgtgaggtccacgttcttgatggcgtaggcgatggcctggtcgaagtcgtcggtctcgccgatctggccgcaggcgttggcggcgtggtcctgcttatcgatcgaagcgccttcgacctgcaggaggaagccgttcttctggccgttcgggttggcgttgagcagatcgagcgccttcttggtcatgtccttgagcgaggcgccacggttgccgagccaggcgtcattcggggtgcacacggtcgggttggcgtccttggccggatccttggcggtggccttggacgggttgaacttggtcggcatgttgccgtcgctcatcagggcgagcaccggctggccatccttgtactgcagggcgttcatcgcggccgggtcgttctcaacggtctggaagcccatgtccttggcctgttcccacacggtcttgcccttgtattcgccgccctgcacggtctggcggaagtacttggaaccaccgccgatggtcacatcggcgcgggtgtcgagcagctgctcggagatggagccgatgccgccgttctccttgagctggttggcgaggcactgcttggaggcgttgttggaagtgccgtcggtcttgccctgcgggccgtagcaggcacgctcggtggagtgcgattccagcacggccggggtggcgtcctggatttccgcggtggacacgttgccggtggccttgccggcggccttggcaagctcgaagagattcagctgcgggttgccgtagatgtcgacatccacggcgttgttgtaggtcttggtaccggtcgcccatgcggaaccggacgcggaggaatcggtgacgggggtgagcttgcccgggttggggttggcgaccagcttgccggtgccatccttgccgacggcgctgtccttgctgccgtcgccgagcgagaaggtcgtgtactggccggtgcccgcctgcacgtcgtcaagcgcgccgggctgaccgaccgcgtccagaccatcgaagtggccgttggcgcccttcagatagtcgcgggcgatggtgatttccgaatcgcccatgccgtcgccgatgaacagcacgacgttcttcgcgctcttgttgccgatggcggcgatgcgctgcgcggcgccgtgcttggcgagctcggcgaccgacttgccgttggggctgtaggtgccgtttgcggcatcgacagcaaacgccggagcggcgagcgcgccgagcgtcgcgatggaggcgaccgccgcgacggcgctcttcaaagccttgtgattgcccattgttcttccttcttccatgcagtgtcatctgcgccgtccggcccgcacttctccggccgcacccgtttggccacgtccgtcgtcgtcatgccttccagcttcgcggaaccgttccgcacctgcattgcttggatctttcgattccggatttcacggtaggcctcacaagccaacgtccggataccgccggaagaacgccgggtgaacattcttcgtcgaatcggccgaggcatcatcgccgcatgaaccggcaagccatacacgatccgcacctggcagtacatgttctcgaaaatccgccccgaattccccgaggcggcgttcgtcgccgaatgtgggccgaccgaacgaatcgatgcaggccggattcgacatggacttctacctcgactggcgctgggacggccacccgacgctctccccgcagtcgttcgtcgtgctcggataacccgctaattgcccaactcaccgaatgtattgcaatcgttgtcaatatgagttacggtaaagatagaacagctcgaacattggtctgtcagattgccggaacctcaacgcagagcggccctcgaacagcaatgcaaacgactagcagtacccgatctgtaagcaaggagtcatcatgactgacgcgtacggcaacgacgcagcgaccagcaccggcaccatcgcagacaccaccaacgacgccgcttccggtgccccgcagcgcgcggaaagcgcggaacgactcgcccgtccgctggtcaagctggccaaagcatgcgggctttccacctcgttcatcgaccagctcggcacctacaccgaaatcagcgacgcggccttggtcgccgtactcaatgccctcgacgtggacgcatccagcgacgaggccatcgcacgctccatgacccaacttgaggtggaaaacagcaaacgtttgctcccctccaccatcgtcgccaccaccggcaaaccgaccggcatcaccctgaactgttcgtcggacgcggacatcaccgtctccatcgagctggaggacggcaccgcgtttggccactttgccctgctgccgcacctcaattccggcaagccggacttgaccatcgctcccgatctgccgatgggctaccacacactgaccgtcacggtggacgggcgcgagggcaaggcggccatcatcgccgcccccgcgcgcattcccgtgccggaggcggtcgccgagcaccagcggtggggctggatgacgcagatgtattccgtgcggtcccgcgaatcgtggggcatcggcgattacggcgatctgaagctgctgctggcggacgcggccgacaagtccaaggccgacttcatgctcatcaacccgattcacgccggcgcgccgattccgccgcttgagccatcgccgtatctaccggaatcgcgccgattcctcaacgtgacgtacatccgcccgcaggacatccccgaatacggcacgctgccggccgatatccgagcgcaggtggatgcgctgcatgattcagtggccgcacgcaacgacgaatcgaacccgatggacatcaacgcggcgtgggcggccaaacgcccggcgctgcgtctgatcttcgacgcgggccgcaacaacaagcgcgagctcgaattcgagcatttcaagaccaccgccggcccagacctcgattccttcgccacctggtgcctgtgcttcgaggtatggggcgcgccgtggggcgagaaccgttggttcttcgagaagaccatcgacgacccggccgtgtgccagctcgtcgaggagcaccacgacctgttcgagttcaaccgctggctgcagtggattgccgccgagcaggtgaacgccgcgcagcaggaggcgctggaccacggcatgacactgggtctgatgcaagacatggccgtgggcgtgcacgggctcggcgcggatgcctgggccaatccggaacgcttcgcctccggcggcgtcacggtcggctgcccgccggacttctataaccagcagggccaggattggggccagccgccgttcagcccacgctatctggaggccaccggctaccaggtgtaccgcgagatggtgcattcgatgtacgagcacgcgggcgcggtgcgcatcgaccatgtgctgggcctgttccgcctgtggtggattccgcaggggctcggtgcccgcaacggcgcatacgtgacgtacaaccacgaggcgatgctgggagtactggccatcgaggccacgcgcgccggaggcatggtggttggcgaggatctgggcaccgtaccggattacgtgcgccgcattctgtccgatcacggcgtgctcggcactgacgtggaatggttcaaccgcgtggacgattcgccgaacgccggcgacccgtaccgtgcacccaaggactatcgcaaacaggcattggcctcggtgaccacgcacgatctgccacccaccgccggctacctgaacttcgaacacgtcaagctgcgcgaggagctgcatctcctgagcgagccggtggaggcgttcgccgcctcggcgatggccgaacgcacggccatgatgaaccgtctggtggagaacggctatatctcgcagaccgtggcggatgatgtggaaggccatgtgcaggagatcgtggaggcgatgcacgccatgctcaccgatacgccgtcgctgctgctgcaggcagcgctggtggacggcgtgggcgaatgccgttcccagaatcagccgggcacttccagcgagtattcgaactggcgcgtgccgctggcggacagctcaggccacgtggtgcataccgacgaggtcttcgacctgccacgcgtgcagtccctagccgccgtgatgcgccgagagaagcggtgatcgattccgcaatgggaaattggtctaaatcggcttcgaggggctgatttggcctttcccggacatccacttccgcttcaaggggctggcgcccaagtagacccagcgcgagaacggcggaatgacgttggcacaaagtcgtttgcacttgtggtttcaccggcaaggagccccttgaaacggaagtagatgtccggaatgccctaaatcagcccctcgtaatcgagatagccgaagacgacgacttgttatgggcatgttatcgttgtcatgacaatgattgttcgcgacggtaaaggagcgacggcatatgaccaaggcaagcattcaggcagtggcccgcgaggccggcgtttccgtatccacggtgtcccggaccttcgccaagccggatctggtgcttcccgagactcgagaccgagtgatggccgcggccgaaaagctcgactactcagtctcacgctcggccgccgccctaaaatccggccaatcgttccgtatcgcactacttgccagcgagaccatcgccagttggttcaattcgaacatcttcgccggtcttgactcggcgctgcgcccctccggctacgacactgtgccctaccccatgcgcaacgccgccgagcgccacgacttctttgcggatttgcccgtgcggcgcaatgcggatgcggtgattgtcagctccttcgacatcgaaccggctgaagtggagcgactgaagcatatgcacgtgccgattgtcggcatcaacatcccctccaccgatgggttcgacgcaggcgtgagcattgatgattacgccgccacacgttcggctatcgagcacctgattgcactcggccaccggcatatcgcgttcgtcggcagcgcaccgaccgaaaccaatatgcgctacagtaccgaggctcgtttgcagggcgtcattgatgccgctgccgcccatccggggatcgagctaacgcccctgagcattcaacgcggtcttggcgaaagcaacgcggca

SEQ ID NO: 2662 - DNA, 3562 bp, Unknown
  R36_18m  MAG No. k141_3131
cgcggatgtgtggttcctcgtcggcggcacgcagaccaaccaggtcgtcatcgacaccatcaccccggcgtatgcaggcgtggtcgcggtcgcctccggccatccgaacgtgcacgaggccggcgccatcgagttctccgggcacaaggtgctcacgattccccagcacaacggcaaaatggacccgaccgaactggacgagttctgcaagaccttctatgcggacggcaactacgagcacatggtgttcccgggctccgtgtacgtctcgcaaagcaccgaatatggcaccatctactccaaggccgagttgcaggccatcgccgatgtggcgcacaagtacgacatgccgctgttcgtggatggcgcgcgactcggctacgcgctgaccgccaccggttcagacatgacgctcgcggatctggcgaccatcgccgacgtgttctacatcggcggtaccaaggtgggtgccctgttcggcgaggccgtggtgtttaccaagcacaacacgccgaagcacttcttgaccctcatcaagcagcacggtgccttgctggccaagggctttgtgctgggcgcgcagtttgacgctttgttcaccgacaacctgtatttcaagatcgcccgcaacgccaatgaggcggccgatcgtattcgcgaggccctgcgcgccaagggctacatgctcactttcgaagcgcccaccaaccagattttcgtgacgatggatcagccgaccatcgaccgtctggagcgcgaggtcaagctcggctttaccgagaaggccgacgacacgcataccgtgatgcgcatctgcaccagctgggccaccacgcatgaagaagtcgatcagcttattgagttgttgtaaaacccttcgctaatccctccctccgtcatcgcttcgcgatgccacctccctcatcagagggaggttttttcgtagctcccgccgatgagggagctggccgccgcaggcggactgagggaaaacctctccgcaaacgagaaggctcctactcccctatcgccttgcgttccatatccacgaacttgtggaccgaggcttccacggaataatgcgccttggtgtattcggcgtatttctcgccccattcggcgcgctcggcctgatgtgcgatccaccaatcgatgcgtcgggccagcagggccgcgtcccgcacggggaacaacgactcgtcgatcagcgcgaactggccggccgccgacagttcggacgcggcgatcaccggcaccaatccgcacgccatcgcctcgatcacgctcaccgattcgatgtcggcaatcgaacaatgcacgaacaaatcgcccgaacgcaacaaatcgggcatatcggcgtgcttgtggaatccgatatcggccttgcgcgccagcaaacgtccggcgcggaacttgagatactgcttgagcggcccagtaccggcgatcaccagctgaatatcgccggcgtgccgggacatcgacaccgccttgatcagcgtaatctgatctttctcgctggccagtcggccggaagcgacgacacggaacggcacgggagccgaggcatccggatcggccggcttcttcggcgaatacaccggtgaataaccattggaaatcacgtgcaacttggctttatacccgtgcgcgcgcaacaggctcgcggtcatttcggtgggcacatggatgtggtcaatgtgcttgtacagccagtgcttgaacagccagtacaggaagctggaaataccgggaatgcgacgtagcgggccggccgaatacagcacgttctccggctgcaggtggaatccggcagtcacgggaatgcccagttggtgggcgactttagcggcacgacggccgaatttgaacggcatatagatatgcaccacatccacgccttggaaggcggtgcggaacaacgtgtcgctgggttcggcgaattgcatgagctgcttggcggccacccacgagacgagcggcaccttattcacgcgcgccggatattcgggcgcccctataccgacaagcctcacatgatggccttgccgctccaattccgcagcccattgcaaggccgaattggaggtgccgttgccctgattgcccaccgtatcgaccacaagagcgatagtcagcggacgatcaatgctctcttcaatcccgttttcgcgcattgcctcatcctaaaccaccgcgcggcaatagcgtcggccgcgctgcctgaacgcgtgtgaaatggtatgggctgccgcattttgcccaatattgaatcacgcgcttcgcagcgcacgatcggcgcgggccacggcctggaacaactcggcggtgtgcttgagcagactgatgcgcacccagccttcgcccgcctgaccgaagcagacccccggcatcagcgccacgccggccgtgttgagcagccaatccacgaatgcggcggaatcgccatgccaccgcgccagccggccaccatatacattttggacagcgagccaagttccagcgccacgtccagcgcgcccggagtctccagcaggctcagcgagcgtacgtcgccgaattcgagccccgcataggcggaatcgttaagtacttcgactattgccagcgtgccggcttgtagcctgaaatgccggaaccggcacgccgctattcgctatatgtcgcatcccaaaatgttggcccgaccgccccatacttcatcggccggtaattgctaaggtacgacggctctgttacacacgcaatggcgtgtctatacgcagtatttatggcgggttacgggcatctgaatcttcatggggcggtaacctgcccatggggcggtatttcccccatggggcggtgaaattcccatggggcggtaaggcaaaacggcttaattccaaggtttcacaaaaccaacaaaccgccccatggactcattgccgccccatggggaatttaccgccccatgaagccggatattccgcccgtaattttgccgcgtgaggcactccgctcacgcgacataccgaaatcatcgcgtcatggcagaatgtgggtatgactgagaacgccgtgaatactgccgtgacttccgcctcctctcccgcaattcccgccgagacttccgccgtctcccccgcaactcgcgcagccaaccacccgctgggcacaccgctgggcaagcaccccacccgtgtgctgtttttgggcgctggcgagctgggcaaggaggtcacacttgaactcatgcgactgggcgcatgggtgtgtgctgctgactcctatgccggcgctccggcccagcaggtggcgcatgaataccgcgcgttggatatggcgaatgccgccgaattgcaggcattgttcgatgaaatcaagccggacatcatcgtgcccgaggtagaggccatcgccaccgatgtgctggccggtgctgcggccgcgggcgcccaggtggtgccgagcgccgaaatcgccgcgatttgcatggaccgcgagcgcctgcgcgtactggcccacgaagaattgggcttgccgactacaccgtatcgttttgccggctcgctggaagagc

SEQ ID NO: 2663 - DNA, 7697 bp, Unknown
  R36_18m  MAG No. k141_3265
aatgcgaatggtcgcgtaatacagctttcgaggcagcacttcgtccaattcacgggtcatcgcatacattttgccgaaactgtcgcgcctgccgataatctgtccgcgcagcatacgacgatcatcaagcacatcgtggtacaggtcacgcaggaacgcaagtcgctctctcaacaagctgttttcgtcacgcatgaatcgcaggttttcgcgattgcgcagctgcacgtatccacatactgcgccggcaacgaaatacaccacaaacgtaagccagttcgacgtgtcgtaaaacagcggagcgaacgacgcgcccttcgacgcatacgacaacgccatgccggcacatgcgagcgcggccgcgaacacgcctgcgttcagtccgtacatcgtgccaacgatcaccacgaaaaacaggcgcaaatccacggttcccaactggctgtcgccttgtaccgcggtgcgaagcagttcttccaatatgaacgtgaggaagatttcgattgcgatccagggttttgaatggttgcgtagaaaatcccagatcgggtgctttccggactgttcccgcgcacgcgcctctttccagcgttgcagcaccaagggaagatcctgcttgagcgaatatcgcggcgaccaaccataacgcaagcgcagcgcatggtcgtctgccgggtaatgctgtgtcctgtcttcgccaaaagtcaccgataatccaggaaatgccgtgctaatcacatcagccaaatcaccgtatgtgaagtcaaacgcgttgggcacgtggaatacttcgctttcggcggtccaatcgtcgaacatgcggtagatcagttcggcaagatcgtcggcgcagagaaagcatgtctgctggttcttttgctcgcagaacgacaatgtgcccgattccgcctgttcaaatagatgattgaaatatgcggtgacgccgttgcgatccgacgcatacaggtacgggcttcgaatgattttcgcttccagacggtaggtgcgtgcgtagtacaggcagagttcttccgacgctcgagacatcagacttttgctggtatcacgtacgtcggcgttttccggataggtaaattcggattcggggccgctgaccatcagtatttgcgtttgcctgttgcgaatggcatgcagaagtcttcgcaatgctcccagatcgccgtctctatcgctgcgtggggtcagattttcggaaaagaatacgatgcgatcaaattcgtatgtggtgatggtgtcgacaagggtgttggcgtcagacatgttgacgattctgagacggtcattgccgtctacggtgccttctcgttccgctatcaccacatggtctcggggaaaagcatgctgaatccactgtttggtaatgaaatcggtattaccgaccaaaagcacttccatgctgccgccccagtgaatactcccttaaacggggttatggcatagttctgcccacaaaccctccattgttcctgccttacggtattccagtgtaatccgttaacagacaaaatcaccccctcaacgggggcaacggggggggtattagtcactgctaatactttttcatacagcacctttccgctacgctcaatctccgccctcagcgatgaagaaatcggctcatccagattgatgacatcaactttaagcagtgaccacagattgtcctgaaggttctgctccaagcgattgaaatcgggacaaccggccacggcaagatcgatatcgcttttaggccggttcacgccctttgcgcgagaaccgaacagcacgaccttgcgagcgccggcatcagcggcaaacgcgcgaatctggtcgtacacgtgctcgataggaaccatgacacctcccgccgcatccaacagtcccggaccaatcccggaccacccgcgcttccatcatacggccgcgtcccactcaccgcacggagcccgaaccacccgaacgcggcgacgtagttgcgggaggcgggctggcgctgtagggcgtgcgggaagttcctgacgtctacttttcaggaggtgaatcctcatgttcaccacgttttctctggccatcattctcgactgcaccgtacgcattgtgctcggcacggcattgggcgcgctgatagggctcgaacgccagttgcgcgcccgaagtgctcggcgtgcgctgggatgtggagcacatcaccacgtccgactgaaacgtccgactgacgctgaccagcaacatcgcaacagtacaacaagccaacaagtgggatggggcatcgagcctcatcccactttgttattatccggcgattgtcagactcactcacgccacggtgaacgtggtgcgcttcaggtcctcacggcgcgaggagtggccgatgagcagttcgaattcgccgggctcgacgatgcggttggcgtccgggtccacgatcgtgcagttcgccaccgggatctcgaaggtgacggtcttggtctcgccgggttccagtgcgacgcgctggaacgccttcaattcgcggtcggtccagctgtaggaggtcacgatgtcgccgatgtaggcctgcacgatctccacgccggcgcgctcgccggtgttggtgagggtgatttcggcacgtacggtgtcggtttcggcgaatgtgccgtcggcgttgcttgcgccgcccgtaatggtcggttcgccgtatgcgaacgtcgtgtagctcaggccttcgccgaacgcgaacgccggatcctgggtgaggtcggcgtaccggtcgccgtgctggccgcgaatctggttgtagtagactggcagctggcccgcgtggcgcgggaaggtgatcggcagtcggcccgacgggctggtcaggcccaggattatttcggcgatggcctgaccgccgcgcatgcccgggttcggcgcccacaggatggagccggtgccggtttcagggtcgctgacgcgcttggcgaacacgccgtactcccccacgatggaggcgggcaacacctgcggcttggagctgatgagcacggtgaccatcggcttgccggtttcgcgcgagacggcggagagctcgtcgagcagggcgttctggccaccgagcagttcgagcgtggcggtggagcaggtttcgccgaccagctggaccacgtcgccgaccacggccacgatcagatcggactggcgggcgttggccacggcttcgtcgatcattgctcgatcgacggcggcggaaacgccgattttcgggcgaggctggccgtccgggtagaactcgccggcagggtcaggcacgaggtcgatgacgttcgcgccgcgcgagtagaccacttcgcaatcgtcggaggtgagctgggtcaggccgtcgagcacggtggtaatcatgcctcgaggctggccatccggcatccaagagacctgaccggagttgccggtccagtcgccgagctggttctgggcgtcgtcggcaagcgggcctaccacagcgatgcgcttggccttgtttgcggcgaacggcagggcgccgtcgttgcgcagcagggcgacggattcgcgggcgagttccaggttggtctgctggtgttcggcggagccgatgaccgccttgatgcgttcggcatccggcaggcgcgggtcttcgaacaggccgaggcggaatttcagggccaggatgcgggctaccgcatcgtcaatcagggattcgtcgagcagaccggtttttacggcttcgatggctccctcatagaactgtggggtggtcatgaccaggtcgttgccggccttgaccgcatcggctgcggcgtgcacgtaatcgggcttgacatgctgttcccataccgagcggccgacgttgtcccagtcggtgatcagcgtgccattgtattgccatgcgccgcgcagcttgtcggtcagcagccatttgttgaacgtgaccggcacgccttcgatggactcgtagccgagcatgaacgtgccgcagccttccttggccacgcgttcgaacggcggcaggaaccaggattcgagcttgcggtgggagaggtcggcttcggaggcgtcacggccgccctgggtctcggagtaaccggcgaaatgcttggcgcaggccaggatcgcgttcttcggcagggcctcgccggccttggcgccgccctggtagcccttgaccatggcggaggcgagttcgccgatcagcatcgggtcctcgccaaaggtctcgtccacgcggccccaacgggtgtcgcgggcgatgcacagcaccggggagaacgtccagtgcacgccggtgcaggagacctcttcggcggtggcgcggccagcggcttcgactttggcggcgtcccagctgacggccatgccgagctgggaggggaagatcgtggcgcccggccagaaggagtatccatggatgcagtcatctccgataatcaacgggatgcccagacgcgtcttctcattgacggtcttggcggcacgagataaatcctcggggctggtatgcagaatggatccgacatgcttattcacgatgagatcctcaagatcgccgccgcgggcgtcaagctgcatcatctggccgaccttctcctcaagagtcatacgggagagcaagtcggcgattcgctcaccagcgggcaaatcaggattcttgtacggtaaggtttcagcagttgcggcaggcgtggtgttgtcggtcatacgaagtcgctttcctcagtgaaatcgaacagctttttaattaccaattggtagtttatctattgacagcatacaacacgcttatgccgcgcgcatcacatacaccaaaacgaccgtatgtatgcgaccccttcgttcgcccgcatacttactgccgccatcaagcacaagcctcagttcaaggcacacagcgaatcagcgatacccgtcccatatcggcgaaggaaatatcgccggctccagatcggcccattcatcgcataagtcaatggccggcccccgtaaccacctcagttgcacaccatccatgatctccagagcatggcgcaacgtgggccggacctcctcaaacgaggtgaattcggaaggcaggttccagttgtatgtcgaatagtatcgccatattgaatcccgacgattggcaaactcgtcatgtaacggatgcgcaggattgaacgattcgacctgcaatatcgagaacagctgaacaagcatggggcgcgtggaattgcaatgtaccaagaacctcagatacgcgggtaatctgaaatcatcgggcactgaaccaggcaggccggaggccatgaagtcttccacactgccaaacgtgttgtaattctcgtgatacatcgcggcaagcaggttatctttgctaggaaaatatcgcaaaactccctgcttggtaacaccgaccgcatcggccacatcctgcacagaagtaccgttgtagccacgctcggaaatcagtcgcacggcggcatcgagaatttcctgccggcgttcccccggcgacttgcgaacacgcttatgctgcaatgaattcccagatgtcatatccgccagtctatccgcattctccccactcccatgcgcaaccacatccaatatccttggccggatatgcaaaacggcgccaaaacaaaacattctgtcatgccttcgacaccgatatcgcgcaatagatttttctgtatatgcttcttcgcttactcctggaatacgtcggggtgcttcagatcgccgggaatgtcggacaaaaggccttcgagccccaggaattccttccagaaatcgagcggctggccgtatggcgaagcctcgcgaccgtgggcctggatgttggccttggcttcgaacacctcttcctcgctgatgccctcgaagtagctttccagacgttcacggtgctcaggcacgtagaacagagaggacacaatctccgtcagacgttcggcacgctcgataggcaaggaatcccagtggcgaagctcgatgaagttcttcagacgtacgtcattgaagtgcgtggagatgatgtggttgatctcgtacgggttgagttcgcggtccgggtacacctcccccgcgttctcacggaaggccgggcgatgcagttccttggggcttgctccagaagccacagcttcaggggtatgggtcaggtcagcgaacataagcggcgtggacaacacgtcgatggcgtaatcctcccaaccatagcgagcatcgaacagaccgggcagcacattggtgcgctggaagtccagataatcccacatacgctggcgcagcagcggccatgggttcgtctcgccctcgaaatacggggcgttacggaagaagtaggccagaatcgggccgataactgtgcccagacgcaacttttcgatggagtcgcgctcatccacataatcaatgctgacctgagtggaggcggagcaacgcatcatgcaggggccaaactgacccacacggccgaggtagtcggtcattgcatcgtagcgatccttggggttgaccggcacatccgcaaagctggatttgggctggtaaccatagttgaccaagcggaagtcgagatcgtcaagaatcgggtcgagctcgcgacggaacttggaatacaacgtattcaggtcggacggcttcttcagaatgccgattgaagtctccacctggccgccgggttcgagcgagacggcgacgccggggcgcgcgagccccaccagatggccgttctcccagtattccttctcctcgtcatagtagggtacgagacgtttgagcagcgtttcgatgccgttcggctcgtagtaggtcacggcggtgtcgtcgctgttgtgcacgggcaggtgctcgatctccacgccgaagccgccggcgccccgctgggagcgtccattctcaaagaacttgagcaggctttcgacgtgcttggggttcggcttggcgagcaggtgcgcgtaactgattcggggagtaaccatgctttgtatcgtattcgagccggccggtgcgcgtgcccgaaagcccgtaatacgctatacgaaaaaccgatagcaggctccggcccggtttctcgctctagagactcccctcagtcgctgcgcgacagctcccctcacagaggccgagccgtaaagcggacagcccagtggactgtccgtaggcgagggtgagccgataggcgaaccagcatgtcgcgagcgaagctcgtccttaattgcggacgagccagagcataaatcagtccgcggaggtgaagccctgcggctcgccggcctcggcgaacttggcgttgtgagccttcttggcggcggcgatcatcagcttgatacgattgagctggttcgcctcggaggcacccggatcgtaatcgatggagacgatgttggcttccggatgcaggcggcggatcttgccgaacatgccgcggccggtcacatggttgggcaggcaggcgaacggctgggcgcagatcacattcgggcagccggactcgatgagctccaggatctcggcggtcagcagccacccctcgccggcctgcacgcccaccgaggtcacctcggaggccttcttgaccagctcgggcatcggcaggtcctggctgaacttgccatgcgccagatcgatggccgcgcgcaccgggttgagataacggtcgagaccccagcgcatgagcgagtacagcttcttgttgccgcccatgccgaggttcttctcgtgccagtcgg

SEQ ID NO: 2664 - DNA, 7651 bp, Unknown
  R36_18m  MAG No. k141_3437
aaagacatataaaatcgccgttattcccggcgacggtattggcaaggaagtcactccgtgggctcagaaggctttggaaaaggccgctgaaggcgtagctgacttcgagtatgagaacttcgacttgggtgccgagcgttatctgcgcgatggtgcgatcctgcccgaggacgaagaggagcgcatcaaggccaacgacgcgattctgctcggcgccgtgggcgatccacgcatcaaggccggcattctggaacgcggcctgctgctgaagctgcgcttcgacctcgaccagtacgtgaacctgcgcccctccaagctgtacaagggcgtcacctcgccgctcgccaaccccggcgacatcgacttcgtggtggtgcgtgaaggcaccgaaggtctgtactgcggcgccggcggcgcggtgcgccgcaacaccccgcaggaggtggccaccgaggtgtccatcaacaccgcatacggtgtggagcgtgtggtgcgttacgccttcaagctcgctatgaagcgcaagaagcacgtcaccctggtgcacaagaagaacgtgctcgtcaacgccggtgatatgtggcaacgcatcgtcgacaaggtcggcgaggaataccctgaggtcacccacgactaccagcacatcgatgcggccaccatcttcctggtctccgacccgagccgtttcgatgtgattctcacagacaacctcttcggcgacattctgaccgatgaggccggctccgtggtgggcggcgtgggctactccgcctccggctgcatcaacgcctccgacgagttcccgtccatgttcgagccgattcacggttccgctccggacatcgccggtcagaacaaggccaacccgaccgccgccatcctctccgccgccatgctgctcgagcatctcggctttgatgatgcggccaagaagattcacaccgccgtcgaagcggacatcgaggagctcggctccaccgtgcgctccaccgaccaggtcggcaaggacattctggcccgcatgtgatgtcccacttggctcccctccagaggggagccaagtttatactgagttgcatgcaaatgcgacatggggaatgcaaaaccgttggcggcaaactagtcgccgtgaccgtatccgtcgatgatgacggcaccgcacagtcatgccatatcagcggtgatttctttattgaatcagtttcggatgccgaatctcatgctttgttgcgtgacttggaacaggctctaattagtgatgattcattgcggtccgtattggacgctcaccctagttgccaaattatcggcacagatgaagttgccatcaaaaccgcatatagccgagccgtaagcagcaacttgcccccgctggtgggggctcccgcgcagcgggtgggggcggtcggccccgatgcgccgaacaccccggcatccatcaatacacaaaccaagcagcccgacaaaagctctgaataccgggagcgctggaacgccctcagacctcaactcaccgtgatccacgaccatccgcgtactccggacgagcaaatggccattgacgagacctgggcgcgtgaagtcgcagcaggaacacgacagccgaccatccgattatgggagtgggcgggcccggctgtggtcatcggccgtttccaatcggcccaggacgaggtgaatctggacattgccgagcagctcggtttcgacgtggtgcgccgttgcacgggtggtggcgcgatgtttatcgaaccgggcaacaccattacctattctctgtatgcaccgctcgatttcgttcagggcgtaagcatcgaagaatcctaccggctctgtgactggtggctggtcgaagcgctgcgcgaacttggcttggatgtgcggttcgcgggcctcaatgatatcgcctcgcagtacggcaagatcgggggagcggcgcaacggcgcttccccgtaggctcaggcggcgcggtgctgcaccatgtgaccatggcatatgacatcgatgcggccaagatgagccgtgtgctcaacaccagtcgcgagaagatgtcagacaaagcggtgaaatcagcagtcaaacgcgtggacccgatgaaaagccagacgggtctcagccgcgaacacatcgtcgaacaccttattgactggtttgcggcgtgatttcaccgatggccgtatacgattttgccggtggccgtgcgtggttttgtcatgggcgagcgcggtaaccgcgacagtgccgtttttcgcggtaacacattcgtcagcatgtcgtacggctatcggatcgcgccacacatgaagtgacgaatgatggcatgcttctgacgaaacctgtggggcgcgttacaatatgacggatggccgacgacggtcgtaggacaataaggatggtgcgatgagcttggaaacgccaaacgcttttgctgacgaggaaaacatcctgttgcatacggcattgttcaagcaggtatcgccagccgaagccgaggagctgctgccgcatttgaagcgtgcgaccttcgataagggcgactatatcttctccgaaggcgataccgatcagcgcatgtatctactggagcaggggcgcgtcaagctgattcgcacttcttccgatgaccgtgtgcagctgctgtccatccacgcgccgggcgaagtgcttggcgagattccggtattcgaccctcatggtggcccgcgcactgcgtccgcggtgtccatgagccatggcacgcgcgtggtctggctggagcatgatgccctgttcgcatggcttgatgagcatccgcgtgtggccatcgacatgttgcaggtcatggccaaccgccagcgcggcaacaacgaacgcatctccgacttggtattcatggatgtgccggcgcgtctggccaagacattgctcaacttgggctcacgtttcggcgagccggtggaacagggcctcaaagtgccgcatgacctgactcaggaagagctggcccaactggtgggctccagtcgtgagaccgtgaacaaggcgttgatggacttttccaaccgcggatggatcgcacgtgacggtcgatcgatcatcatcttccagccaggcatgctgattcgacgctcgcggcgctgaccgttcggctgacttccagccaatgttacgctagtgcggttcttgtgatgatatgttcacggaagctgaccgcgagcccggttggtagggcaccccatttagaatggggcccatgcccaaaaagaagtccctcactctccaacgtgtgcttgttctcctcttggcctatatcatgcttgccgtctgcggtggcgtggcggccagcgtgttgtttgtaccgggtgtggtcggtgccaataaagccgccaaagcggtgattccgtcgctcaaggtagaaaacgtggacttcgacgtgaccggtctgccccagaagtcgacgatgtacgcgcgagacggttccaccgttatcgcgacgttctacaaccaaaaccgtatcgtcgtgccgctgaagaagatttccaaaaccatgcagcaggcagtggtggcgcgcgaggaccgtcgattctggactcacgccggcgtcgacgtgcaaggcgtgatgcgtgcgttcgtgcagacctacctcgtcaaaggctcccagcagggtggttcgtcgctgacccagcagtacgtcaagaacgtgctgctcatgcaggcgatcgaggacgacgacccgatcgcccagtaccatgccaccgaagacaccgtcgcccgtaagattcgcgagatgctgatctccgtgcagatggagaagaagtattccaaggccgagattctgcagggctatctgaacatcgcccagttcggcaacaacctgtatggcgtggaaaccgcagcccagcgctacttcagcgtgtccgccgccgatttgaacgtggtgcagtccgccaccatcgcggctatcaccaagaacccgagccagtacgatccgctggtcgaggagaaccagaaggaaagcgagaaccagcgcaacatcgtgctcaagctgatgctgcaggaggggtacatcacccagaagcagtacaccgaagccgtgaacacgccgctgaaggacacgctgaaggtgcaggccgtgaacgtcggctgccaggacaccggcgactacgcatacttctgtgatttcgtggtgcatcgcatccagaactccgaagaattcggcaagactcgtgcggagcgtaacaagttgctgcaggagggtggcctgaagatcgtcaccacgttggatgtggaagcgaattccacgatgatggagaccgcgcgtaataccattccaccggacgatcccagcggcatggaaatagccatggccgcagtcaaaccgggaaccggcgaggtgctgagctttggcctgaatcgttactatgacgccactccggcagccgcgaacgatccgaccaagtcgggccagaactatgccgtcgatctggtggacggcggcggctccggttggaccattggttcgtcttggaagccgatcaacctgattgcgtggatggaggcgggtcattcgatcaacgacaacctacagaccaccacgacgtaccccacgaccgacttcgcctgcaacaactacaagggcggtgccgattcgtggaacgtgtcgaacgccatgggcgccggcacggtgaacccggaaagcccgttcctcggtctggtgcgatcgcacaacaccacccaggcctccatgggcgccatcctcaaactgtgcaaggtggcggacaccgcgaccaaactgggataccatgacgccgccacgggtgagaccatcgacaaaacccaggtgtatacaccatccatgatgatcggctcggtgaatgtgtccccgctgaccatggcgagcatcttcgccgtatacgcctcgaatggtgtgcaatgcaacccgattgccatcagcaaggtgaccgataaggacggcaacgatctcaaggttccatccgcgaactgccatcaggcggtggataaggacatcatccaaacactcgcttataccctgaaccaaggtacggtgcggccggatggtgccggttggtcattcagattggctgacgggcgtaagtcgtttggtaagaccggtaccagtgaggatcttgcggtgtccggtggatcgttcattcctaatcagattgcggcgttcgctgtggtcggcgatgcacagaacccgtacaccaaccgtatttccaacattgccatcaacggccggtacaacagctattgggatggttcgacaatcgcagctccggccgttaccaacttcttcaatagctacatttccaagaagaaaataccgattgacaacgattacggccagcccgtctcgaagtacaccacgactggcaagtacctgggcattggcggacgaacgttcagcgtgccgcagaccactacgaatggcaacagccaatcgcagacgaccaccaatggtcaatcccagtcgcagtctcagtcgcagaacactgggcaaaacaacacccaaacccagggcaccaattcagagcggtcgaatgatggccagtgattggtgattggcgtttgacatttggtgattgcaggccggctgagtctacgtaacatagtcgactgcgatacccaaattacgtagtttgcgggcgttacctgtttcaggtgacgcccgttttacaatacttaatgacaacgccagcgcgttcatcgaatattcgccatgaacgcgcattggaaaggggaacgatgagcgacgacgatctgacgcatgagaattttgattttcgtggattcgacgtgccggatctcaaagcggtgacgctggcttcgtcttcggacggcgaacagtccaagcagccgaagaccaagcacgaggatgcatcgaggaaccgtaggcacggtaagaagaagtcaaaatccgacgcacggtccaagaagcgggccggcgcgggcaagacgagcgaatcgttcgatgattatgaggattatgaggaaagggaagctgtgagcaaggcagataagaaagtcagcaaggaccgtccggggctgtttgcgccaatgacgctgcgcgaggtgaccgtgcgtaatcgtatttggttgccgccgatgtgcacgtattcgtcgttcgcctgcgatggtaggcccacgccgttccactaccagcattacgtgtctcgtgcgttcggcggattcggcatggtgatcgtcgaatccaccgccgtggctcctgaagggcgtatcacgccgtgcgatctgggcctgtgggaagacgggcagattgatgcttggcgctggatcgtggacggtattcgcgaggcgggtgcggtgcctgccatccagctcaaccatgcggggcgtaaggcttcgaccggttgcttcgccgttggttacgacggtcagagtgtgccggaggaggcgggcggctggcccaccatggcaccgtctgaaatcgcgttcggcgggctgcgtacgccgcgcgcgctgtccgtggatgagattcatggtctggtcggtgcgttcgccgcggcggcgggccgtgcggtggccgccggcttccaggctattcagattcatgctgcgcatggctatctgatttctcagttccttgacccgctgagcaatgagcgtgatgacgaatatggtggcgatttgaccggtcgctctcgtttcctggtcgaggttgtggatgccgtgcgcggggccgtccccgagggcgtgccggttctggtgcgcatttcggccacggattgggccgctggcggttgggatttggatcagaccattgcactatccaaggtgctgaaggagcatggcgtcgatgtgatggacgtgtccactggcggcatcatgtcgggagtgtcgattccggtcaagccgaactatcaggtgccgttcgccgagcaggtcaagtccaaggccgatattccggtgaccgcggtgggtcttatcaccaagccgaagcaggcggccaagattctggcccatggcgaagccgatgccgtggaaattggccgcgccgcattgcgcgatccgtactggccgttgcgtgcggccaacaagctgggcataccgtccacagaggtcccctacgccccgcaatacgtggccggtgcgtactgaatcctcatggggcggtgactttcccatggggcggtaaaaccctcatggggcggtaacccaaaacggcggtattctgcggaatgtgaaatttggctaaccgccccatgggacaatcaccgccccatgagggttttaccgccccatgggtaatagggcaatatgtgagttcactccacgtccacgccgacggcgtcggagacgtgctcgaatccgtcgcggcgcagcagctgggccagaccgcgcttcaacacggtgatctgctgcgggcctcggtacatcagcgagctgatgaacatgaccaggctggagccggaacgaatcttcgcataggcttgctcgggggtaaagacgccaccgatgccggcgatagcgaaccggtcgccatactctttatacaccttgcgaatcagctcggtgctggcgttggtgcacgggccgccggacaggccgccctcccaatcgcgcggaatctcgaggccggtgcggtccttctgcagattggcgatggacagcccctgcacattgtgctcg

SEQ ID NO: 2665 - DNA, 11487 bp, Unknown
  R36_18m  MAG No. k141_3566
gcccgcctcgctcaaaacgaggcacaggagccgcaggggaacgcacccgaagcccatgagcgcggccaacccgttctcgatgggatgcgcgcaccccatgtgggtcagcatccagcagacgcagaaggcgaacacgagggcccagaaaaccagccggaacgcgaaaccacgagacaattcgtcgggcccgggcctcctgtagccgctggcgtgctggccgtaatccttggtgttcatttcgagtccttgagtgcttggttgatttccgctttcatggccttcaggccgctcttggtgaccctctggatcgtgtgtccgtcaagggtgacggagaagaggcacgggtatccacgggactccaactctggggtgcgcgccaccaggaactcacgacagtcgttactggaaaggacagacatcacgccacctccttgccgttggtgtcgagcgcggtatcgatggcctgtgcggggtctccgccggtctcgttgaatacggcgaggaacatgctcaggctcatgtcgttgcgtggcgcgccggtgcggaatgattggatggtcatgcggttgaccgaggccgcgcgggccacttgggtgtccggcacgttgccacggcgtagtcgggcgcgtgcctgtctggtgagtttgctggcgaccttatccatgccgggcttgaccggtagagccggttcgcgtccgatgcccgctgctgacgccttgcgtttgattggctcgctcatgtgcctgagtctcctttctgccttgggtcttctgtctgtcagaggttcttgagctggtcgaattcctcggcggtgagggtgaccaccgcgtcagtgattcccatgtccccgattcggacctcgacccggccatcggccagtcgcctgaccttcagcggcctgcccggctcctcatggttcacgattcggatttcctcgctcatcccgacctcctgatttcacttgctgtcaacaattaatatgatggcacttgctctcattttgcgcaagtcggcgtgtcacttgctatcattgattgcatgcctacgaagagttacaagtggtcgccggcagatttcgcagcggcaagaaccattgacaaaatgcttacgactgtcggcctcggcaaccgtgaatttgatcgcgcctccgacggtgctatcaactacgggcgagttcgggatctccgcaatggtcttaaggctcctgtcagactctccgaattcctcattgtctgcgacgtatgcggagccgacccggtgcaaaccgtccgggacatcatctcggaggcgaagcgtatcgaagaagagcaaaagcgcgagcgtcgcgtggaggagacgaagcgtattctggcggataacccgatggagcttgcggcctacactgacccggacaaggagaagtacatcgaatacgggaacggggatgatccagcatgagaccgttgccgttgaacctgagagacacctatggccatgtgcgcatggccgtctacagtgccggactcgacgtagagatacgcagcgccgaccacctgcccaacggcatgatgggctgctacagcgagcgcactcgcacgatactcatagaccgtcgtctcccatacgtggccaaacgatgcaccctcgtgcatgagctggtccactggtcccacggtgatgaccggtgtggcctgcatgagatgcgcacccgtgcggagacggctcggctattgatatcgccaaccgaatacgcgctggccgaacgaatgtacgacgggaacgtctggcgtatcgcagacgaactcgaagtcacatcaggcatcatcaatgattacaggacactgctgcacgaccgtgtagcagcttagagaaagaagaagaaatgggtaacaacaataaggctccgatgatgcaaccgattccgctagctcagcctcaggggccgcagccgccgcagaatgcgcagacaatgccgggccagacgtttggccagccaacaggaggcgtaccgggatacgcccagcccggacagccgaaacctaagaaaccgatctggaagcaatggtggttctgggtcatcattgtcgtggtggtcgtgctcgacatagccatcataggaggtgccggcaattcgcaaggcggcggttcggccgtggatagttcctccgcacaaagcgtggcaccgaaatcgacgcagaaggcaacgccaaaaaaggacgccaaactcaccggcatcaccgcatcgtacagcggcagcatcaaagacggcgaacaagtgaccgataaaacctccggcatcaccgtgaccgcgaaatacgatgatgggacgaccaagaacgtcaccggatggaagattcagaaccccggtgccgtcaacatcaacgcgcccaccgaattcaccatcgaatacgagggacagaccgcgaaggtcagcattcaggcgcagcctcctgtcgaataccagaacgcgctcaacaaggcgaaatcgtattccgacatgatgcacatgagcaagcagggcatctacgaccaattgaccagcgagtacggggagaagttccccgccgaagccgcgcaatacgccgtggaccacctgcaagccgactacaacgccaacgcgttggccaaggccaagtcctatcaggaaatgatgtccatgtcctcggctgcgatctacgaccagctcgtttcctcagccggggagaagttcaccccggaggaagcacagtacgccatcgacaatctcaacaaataagtaaaagtcccgttgacgttggcgcgtcagcgggacgtgtgaagaatcccaatcccaccagagaaatggaaaggaggacgcttcactccatatcctacacggggcgaagccatacccgaaatgttatttgcgcttacgtttaaccgaatctatgatttgcgggccagcggatataacaccaaccgcactaccgatgaaagtgccgacgttattgccgaaggccgcgcatattatggctgcaccgaacgcaacccatggcagaaacgagaatgccacggatgcaatcaccatgctcacattctcggctttgtgatccgcggcttcaatcgcacgtgccgctctcgtgtcctcgatttgagaatcgagggatttctccgccatcgtcacgatgcgatcagcggaacctggcaacactcgctcatacccctcatattcggccacggtcggcaatggggcggagcgcgagtatgttatggacgcgccggcgttgatgattccctgtccatcgccttcctcaggttgtctcccaccatcgtccaggctttcgattggagctccaccgccgtcaccggcgcgaacgatttccgctccaccttgcgcgtcgcggctatccgcatgccttttgttattcccctcaggactggattgctgctcattgcccatcgaccatacctttctgattacctgcatactatccgacaaaccttgagatgccaagtggtgcgtagggagatgatctgaatggcgaacgtcaccagatacaagaccagcaaaggcgagactcgctatcgtgtccgttaccgcaagccggacggcacccagaccgacaagcgcggctttaagaggaaaatcgacgccgaaaactgggcggccgaacacgtcaccatcgcaaaagcaaccgatatgttcgttgatccgcaggcggggaaccggctcataggggagttgcacgatgaatggctggccgaacgcaaaccgttttggaagccctcgcacataggccgggagcaatgcctgtggcgcactcattgcgttgatgtgtggagcgaccggagaatcaacggcatcacccatgccgcagtgcaacgctgggtcagcgaactcgcctcgcgtcgttccgcgaccgtggtcatcggcgcatacgggatactggccgccatctgccgtaacgccgtccgcgacaagctcatactccataatccgtgcgagggcatcgaactgccccggaagccgcagcgcaagcagaagcgcgtatacctgaccgccagccaggtcatcgaattcgccgacgaggcgcgcaacgcaaaacggttcggtgatgtgcgccgcgcgctcgtgctcactttgggcttctgcggactgaggtggggcgaggcttccggcctgcgcgtcgaggacgtggacttgcggcagggcgtgctgcatatcaggcacaacaccgtgcaggtcaacggcaagccggtcgatggcaccccgaagagcagcgagcagcgcatcgtgcccataccacgcatcgtcatcgacgcgctcgggccactgctcacggacaagaagccccttgaccgggtgttcaccgacccgaacggccggcccatccgccagcaggccgcgaccgacaatcccacgaaccactcatggtggccggaagcgctgcgtcgtctcggctgggacccgtcgatgtggccgtccccgcatgacatgcggcacacgttcgcctcactggccgtgcatgccggggcgaacgtcaaggccttgcaaagggttatgggacatgcttcggcgagcatgacactggacgtgtacgccgatctgttcgacggcgacctgatggatgtggctcgcatgatcgatgcgaccatacagattgagaccggtcgtgggggatgtgggcaaaatgtgggcaagaccgtttcggagacaccgaaggcaggtagaaaaacgttgaaatcattgggttctgcggtttcggttgggtagggtgcccgaattcgcgcacgtggagtacgtgacggcgtgaggggccatctgactgtcgcggatatgcgtccggcatatcgggaccgtgccggtggatgtcgattgtaatcgacacctcatcccgatgggatacgaagtgtccgggtatgcctgatacctcgtgcctcatcggaatgagacagaatgaggcaagtgacggattcgggatatccgtccgagttcattgtgaaccattggaataaactcgttttgagtccgtctgcatgtcctgtgttgacaacgtcttgggtcgtgtgtattctgaatacatcagaacataaacgtttaggacttcaatgatgaaacgacacgacgttactatcaccgatatcgcaaagcggatgggactgtccgtttatacggtttctcgcgctcttaacggtctcagcggtgtatccgagagcacccgtgcatcggtgcgcgaaacagccaacgaggtgggctacatccccaacgtcaatgcgcgtgacctgcgcacgggcacgcaccggttcatcaccctgctcaccgcgggaatgtcgaactcctattatctcgatctgatcgacggcatcgagagcgtcctgcaggacaagaaggagagcctgttcattgccgatatggccgtcaacggccggtacagcaaggagaacgaggcgtatctgttgcgtcaggtcgtggagaaccgtcctggcggcatcatctccaccttgggactcagcgaatacagcaggaaccagctgaagaactggaacattcccgtcgtattcgtcgattccactcccggatacggtgatgatgaggaaataaaagatggtttctcgtatgtagccaccgacaacgtggatgccgccgccaagcttgggcgtcatctgaaactccatcatttccatcgttggctgcttgccatctatccggacacctggaacagcaggttcgctcgcgagagcggcctgagggccgccgccgaggagtgtggggcggagattcgcgtgctggaatgcggtaacaacgatgtggaagcgtgcaccgaagtcatccgttttcttgaccagaacgattattatccggatgtgatcatcgccggcaacaatcccatcctgttgggcgtcatgtcggctcttaatcggaaatccgtcgacattcccggggatatggcgctggtcgcgttcgatgacttcgcctggtcggacctggtatcgccgaagataacacttgtcgccgaagacagccgattcatcggtgccaaggcggcgaactacctgcttggacagatggaaggaaaggaggaggtgaataaaaacccggatggggcgacgatgaggccgaatcccatccacgacatgatcgagacatccctgaagatcagggagtcatgcggatgcggtgggcaataggccgcatccgaacgcaagacagctatttccaatggagaaaacaaccatgaacatcaagaagatcgcttccgccgcttccaccctgctcgcagcgtcgctgctgctgtccggctgcagcgcggtgagtaatggcgacaacgatgccgccgaggtctccaagcccacggaaatcaagagcatcggcctgatggtgcaggatatgtccaacccgttcttcaccgccatggacaaagaagccaaggctcaagccaagaagatcggtgcaacgctcaatgtccaggacgcccagctcgatttggccacccaggacaaccagatctcctcgttcattcagcagaaggtcgatctgatcatcgtctccgccgtcgatgagagtggtttgaagcccgcaatcgagcgtgccaaggccgccggcatcatcgtggtcgccgtggacactcctgcgaagggcgctgatgcggtcgtaacgaccgatggcgtgcaggcgggtgaactgtcgtgctcttacctggccgagcagctcggcggcaagggcaacatccttatcgtggacggaaccccgatccagaccatcaccgaccgtatcaagggttgcaaggcggccctggagaaggactatcctgacatcaaggtcgtcggacagcaatcctccaagaacgatcgtgccaccggcctgtccgtgaccaccgacatgctcaccgccaataaggacgtgcagggcatcttcggtatgaacgatccgtccgctctgggcgccgcgctcgccgtcgagcaggccggcaggaccgatgaaatcatcgtgaccggcatcgacggaagtcccgaaggcgtcgacgagctgaagcgcgccggctccccgttcgtggggacctccacgcagaaccccggcgagatggtcaagcaggccgtcgcctacgcccagaaggtcgccaagggcgatacccccaagaagtccacgattctcattccgagtgtcatggtcactcgtgagaacgtcaacgattacaagggatggtgagcatgcctcagttgctgcccctattgcagctcgagaacattgtcaagagcttttccggagtggtcgtactcgacaacattaacctaaacctttatgaacatgaggtgcttgccctcatgggtgagaacggtgccggaaaatcgacgatgatgaacatcctttcgggcaatctgaaaagggactccggacgcattctcattgatggcaaagaggtagacgtctccacgccgaagcaggccgacgacctcggcatcgccatcatccatcaggaactcaatgtggtgcccaccatgacggtggcgcagaacctcgcactcggcaacgaaccgttgcagaagtcggggctgctggacaagaagcgcatgcgggaggacgccgtacgtaaactcgatgtcatcaaggcggacatcgacccggacacattcctcggtgatctgggcaccggtgagcagcagatggtcgaaatcgccaaggccatcgcgcaggacgcgaggatcctcatcctcgacgaacccacggcatcgctgtcccgagccgaatcggagcacctcttcacgctggtgaacatgctgcgggagaagggcacgggcctgatttacatctcccaccgcatggaggaggtgtggcggctcgccgacagaatcaccgtgctcagggacgggcatacggtgatgaccaccgacatcgagcatgccgaccagaatgacatcgtcgccaagatggtgggacgcaaagtcgagaaactttacgaccatggcaagcgtcatccgggggagggcgtgctcgagatcaagaatctcaggctttcgccggactctccgccggtatccttcaccgtgcatgcgggcgaggtgctgggcatgtccgggctggtgggcgccggcagaaccgaaatcgccagagcgatcatcggagcagacaagcatgattccggtgagatccggctccgtggcaaggcggtgtcgttcaaatccccgaaggccgccatcggtcatggggtcgcgtatcttcccgaaagcaggaaaacgcagagcatcttccctgtcagaagcgtcgaagacaacatctccgtctcttcgctgggcgaatacgagaggctgggtctgcttcagaagcaccgcatccgcaaggatgtgcaggaatcgatgaaactggtcaacatcgcgcaacgtctgttgaccacttccatcatcaacctgtccggcggcaaccaacagaaggccgtgttcgcccgatggatgatgaagaactccgacgtgctgattcttgacgagccgacccgtggcgtcgacgttggcgcgaagcaggagatctacgagctgatcagttcccaggcagcgcaaggcaaggcgattctcgtaatctcctccgatctgcccgaggtgctgggcatcagcgacagaatcctcgttgtcaggcaggggggcatcgctgcctgtatccccgaggatgaagctaccgaggagaaagtcatggggtacgcaacgggcgtgctgaaggcgcaatccgaggattccgaaacgcgcgacggagcgcaacgataaagaggagcttccaatgaaagaaaagaaaaagatgaacctggcggcgacctgggagaaggtcggcatgccgttcgtattgctggtgctggtcgtattcatgctgatcaaggccccgaacttcggcacggtgagcaacctgttcaacgtggcgaggtccatctccatcagcgcgattcttgccgcgggcatgacattcgtcatcattaccaccggcatcgatctgtccgttggttcgaccatcgccgtcagcggttgcatcgccgttctggccgcccagcaggggctcaaccccctgctcgccatccttctcggcatggtgatcggtgcgctcatcggcttgatcaacggattcctgatcgcctactgcaatctcgccgcgttcatcgtcaccctcggcaccatgaccttcatgcgaggattggcatacaccatcaccggcggtctgccgatcgtagacaacggtttgaacttccgcgccctcggcaacggatacctgttccatgtgccgattccgttcatcgtgatgataatcgtttatgtagtcatgtggatcgttctcgacaaaaccaagtatggctcgcatgtctacgccgtgggcggcaatgccgaagccgcaaggcttgccggcatcaatgtcaagggcgtactgctatccgtctatgtgattgcaggactgtgcgccggtctcgccggctgcatcttcgcggcgcgtgtggtctccgcgcagccgactgccggcgacggttatgagatggatgccatcgcagcggccgtcctgggcggtacctccctgatgggcggcaagggcaagatcccgggcactctgatcggtgccatcatcttcggcgtgctcaccaccggcctcgtgctcatgaatgtcccgttcttcacccagcagcttgtcaagggcatcgtcatcatcatcgccgtgctcatcgatggtctcaaggagaactcgttctcgttcgggttcctcaaaggcataggtgccacacaagccaaggctgcgaactgaaacaggagaacgacaatgacgcacgaatatccacgattcaccatcaccaatagccaccaccatcctacaaagccacagccggtcacggtgaccgtgccggaaaaagttgaggccgatctgattctcggtaccaccgatttgggacagtcttcgccgttccagaaggtgctgggggattccgacggttcctcgacgacgttcatcggcattctggtgccgcatgacggagaggtcctgtccctacatgacccggacccgggggagacgtttgaaggaggcatcgtcgccgacgacaacacgctcgaaagcgatgcggtctgccaccttgatacgggatatttcgacattgaactatgtcgtggcaccggcaagggcgagggcgcctccaaatggggcatccgccatttcctcaccaaggacgagggattcgatctgctcaagagcgggaacaacgccattggcgggttctacggccctttcttcactccggaaaacggtctgatcaacccgcccgaacatgccatcgccgatgtccgtcttatcgagttcggccccgtcatgcgccgttacctgcttgaggggcgcatccctgatggtcttcgacctgaactgcagggcaagaccttctccatcgagttcacgttctactggaacgtcgatttcttcgatcgtgtctaccatgtggattcgtttgtgacggaggtcgatggcagaagcgtcgtgaaccgtatcacggtcggtgacgagttcgaaagcggcgaaggaaaccttgtcttcaaccgattcgacacctaccagcctgttcctttccgcggaggggacccctacgccggcttcctcaaggatgaagtgcggaacgtgctatcggagcggacggaaacgacatcaaggttcgcctatttctccactctgcttgacagggatctggagaacgctcactgggatctctactggcgtttgttctcgcgatgggaaaatgcccttacccccaaggggctcgatgagaggctcgggcatgtgcgggcgcttgcccaccgcgcagctgatgagacctcccgtccttggcagttccccgagggggcggtcgatgtgtcggcacaggaggaggagaccatcttccccgggccgtctgcctgcagcgccgaatacgacaccaataccaaccggtgcatgatctggatcacctcggaggcgtcctcggcgttccagatcgtgcagaggcctcaatccggctgggtcaactggggtacgaacggcgaaaacgaatgcccggcattgcctgtcggagtcaacatcaggacgatttatggtccgtatgggaacgggtggcgtgatcgcgccgatgagtcccgattcggtgtcgtgaacgttgaacgataggctctgagcacccgtatgccggtggttccgacggttttcctcctctttcccgtcggggccaccggcatcgtcattattcggctcctgattcccgctcctcatcgaactgcaagatatccaatgtaccgacgacgattatgccaagcatgccgttgacatacttatcgaccgcatcgaaggatactcaggcccggcccgtacgtacaccaccgatttcacattggtggaacgtgcctcaactcgacttgcccactagcctccaacaagttcgcatcggcttcgtgaggagtgtgtgtctactcgaacaatgcggcgtcagtcgctgggtagccaagttggaacgcggtgtaggcgtgcttggcggccagtgcggcgaggatgagcagcgtatcgctctcggtgga

SEQ ID NO: 2666 - DNA, 4009 bp, Unknown
  R36_18m  MAG No. k141_3612
cttgaatcccatggagacgagcaggttccagaaacgcagcttgcgctcggaatccatcgggttgacgagggcctgattgccgtcgcgaagatcgacggagcaccagcgcggcgcgcgctgcagtcgcttgcccggccacgtgcgctccgggtaatcaaacgggatctgcttgtcgtaggcggcgtacttgttatacggcatacgactcggcttctgcggatcgccgatgaatcgtgccggaggcagcagcgggtcgttgttccccccattggacgccgcagccactgccgcgagatcaaaaacggatgattgaccctgacccattgttcctcctttactgtgcgaaccattcatacaatcgcttattggatattcgtttacgcattggtaacatgcgtaacttcctccatcctagcgacggcccattccaacaccccgttcatctcacaatatgccagcacacgtagcgcttcccggcgcagtactactagacttgcaactatgcgtggaggcgcatgggcttccacagcgagagaagaggtccattatgacaaatccaagtatgcctccgatgccgcaaatccctcaaccgaacggtcagcggcccgcagctccgcaatttacagcaccgcagccggtcttccagcagcctgcagcaccacgccccgcgcagcccgcagcgccgcagttcgcggcgccacaatatgctcagcctgccgcgccgcagttcccggcgcaggctccggctgccgtacagccgacattcccacagcagcccgcagcacagcaagccacctataacccgcgcccggtcaaccaactgcgcaccaagcgcagcctgctgaagtacatcctgctcggcattattactttcggcatttacgatatctggcaaatgagcgaagtgggcgagaccctgaacctcatcgcttcgcgccgtgacggcaagcgcacgatgcactactgcctgatgttcttcctgatcggtggcctgacgctgggcatcggctggctggtgtggtaccaccgcctcagcgcccgtattggcgatgagcagcaggcccgcggcatgactcccaccgttaccgcagccaccttctggctgtgggacgtcttgggaattttcatcatcgtgggaccgctggtctacttctacaagctgctgcatgcgatgaacgatctgtccgccgactacaacgcgcgcggctgaaacaatcccgtccttctacacttgccgacatatttgccggggcagtgtttttactgcgtttgccgatggccgcaccagtcagaccattattgttcggctccgcagtctcgttgattcataggagattccatttatgctttgccccaattgccataccgacaacgcggaaggtagcaagttctgcgaaacatgcggcacgccgctcaccgccaccgaagcgaatactgcagcgtcgagtgcttccatgacaccgcaggacgcgccggttgcgcccacgccagcgggagcgactcccgctccggctgccgcttcagtccccggccccggcggtgcggcagtgccgccgattcctatgccgcagggtgctgctggcatgtcggctccggcggtcgtctccgcaccggcggctacgcagcccactgcgaccgttgccacggccacgcagacggccccggcaacggcaaccacaaccgccgcgaccaagcccggcccaaacaaactcatcattatgctggtggcggtgctggcggccctgatcatcgcgggtgtcgctttgttcctgacatatcgttccgaggtgtggggcggcaagtcgctgcctgacccggcatccatcgcctccagcgtcaccgataagaacggcaagaaggcgtcggccgtcaaggccaaggatgtcacggccgcgctgaaggccaagggactcaacgcgaaaacggagaaggtgttctccggcaaggattcgggtgagttcatcggctataagaacgccgctccgggcgctcgtgtcaaggccggctccacggtcgtggtgcaggaatccgccggccccggcgtgccgaaagacactctgggcgcacaggtcaataaggtgactgagacgttcgccgatatgggcgttccggtccactataagaaggtgtttgtctctgacgccaagaagaaccccgaaggttcggttgtggccacctatcctgccgccggcactggggtcaaggacgacgagaaagacaagggcatctacattggcgtggccgccaagggtgacgacaccgctctgcccatcgacgtgatgggtcaggatgtggataccgtcaaatcccagctcgagtctgagggccacacagttaccgttgaacagcgtttctcttccaaggattacgtgggtaaggtttccggcgccagccccgctccgggatcgtccctgtcttccggcgaagacgtgaccctgtatcagggcatcgatgccagcgacaccaaagaagcctttacaggccatgatttggccgaaacaggcggtgacgcgctgctcggtaccacacgcgcagccgacggccagtggtgcactaatgatgggaagtgcatcaccatcgacaattacaaggtgactgaaggcggcagtgataatgctgactataccagcgattacgacggtactctgattgcctgcaacgccattcagcaggcgtactgcaacagtccgaaagccgactacctagtcacacaagattatggcgccttcgagctcatgccgcatatcagcctgaccaacttttgggccaacggcaaaatgtatgacggcaatggcgtgcatatgggtgattcttggcccacatccggcgaataccacatgcaggatctgttcctcgtagtgcctaccggctccgacttgcaggggttggaagataagggctacttcgacaaagacgcgcttgccgcagccaagaagcagaaggcggtggacaccaatcgaccgttcattctgtaccgcgatccgaagctctacgacactaccaccgctccatacaacggtgccgggaacggcgccaatccgttcctgccctacaacggatacaacggcagtaagtccgacatcgtcaagatgaagccggccccaagcgacgccgacgcctactatctggtcgaagcgtccgaacccgattgggattccctgccggacgcggacgtgaaggcgcccagcaccaaggacaagggcaactccaaggattccaaggattccaaggattccaacaagagcagtaagaaatccggcacaccggatgcggcctcactgaaggtgttttctgatttggccggtgcccaatacgcttacacgattgctggcgatggcagcgccttcaccaccatttcgttggatgatcggggcaacttctccggcactgtggacgaggcagatatgagcagtggcgattccgcagcgaatgcgccacgtatccagaccaagttcagcggtaagtttgcatccgccacatccaattcagatggcacggtaacgctgaagtgtgatgcgtcggctttcaaaattgacgacaagtccaaatccgacaagtcaggattcagcccgtgtggcaccttcaccggatatccatctggaacctccagcgatgcgttgccatctgaagcacaggccatgctcgtcaagcgtggaacgccggatggaccacccgattggatgctgattaacaccgaaggctctggtgtttttatccgcatccagaaataaataacagttaagcagggttcaggcggatccaacgcttaatactcagtgaggccagttcataccggcctcacgtgtttttagcgcttcttcaccaacgagcggatgacggccataaaaccgaggctcatggcaccggccagcactgcgaatacctgcgggcggcgcaattcgttacgcatgctgatggcaccggtcacgcagtggtcctcgaaccagacgcgcacctcgttgctggagtatcggcccaccagatcaccccaggtgagcatgcgggtcac

SEQ ID NO: 2667 - DNA, 6605 bp, Unknown
  R36_18m  MAG No. k141_4060
gccagcggtgggcgagagaatccaatcggggtggttacgggccacatcggaatcgtagttgaccatttccggctcgaaccacaagccgaattccatacccttggcgtgcacgtagtcggcgagcgccttcagggacttcgggccatcgggccagacgtcctgcgcaatctgccagtcgccaaggccggaggtgtcgtcgcggcgggaaccgaaccagccgtcgtccaccacgaatcgttccacgccggagtcggcggccttgtcggcgagcgccttcagcgtatcgaagttgtggtcgaagtacacggcttcccaggtgttgaggatcaccggacggccgtgcgagaacaggcgcggatgcagggagcgcacgtaggagtggaagcgggcggcgatctcattgaggccatcgccataggagccgaacagccacggggtgtcgtaggagttctggccttcgccggggccggcgagcgtcacttcgccgccgaacaggagttcgccgccgccgattacgccggtcgtgtagggcagacgttcggcggacagtacggagttgccgctccagcccacgtgcaccgaataggcgtcgccatgctcgaagccgaaaccgggcacgccggcggtcaggagcagggatgcgtcgaagtcagggcggccggcgagctgcggcttttcgaaacggccgacggtcagcggctggcgctgcgggctgcgttcacgtagatggtgaccggtggtggtgaggatttcgccggcggattcgggcagcgggaagccgagctcgatcttgccgatctcgagcggggctccggcgtctgcaccgaacaggttggttacggtggccttctgacgggccaggccgccggggagcagttcgaggtgccactcgacttccacgccctgctcctcatcgcgcgcggtgactatgacgccgggcacgcgggccggtccggtggcacgggcatggccggccacatcggtgtagctttcgccggacacggcatcgagggtggcttccagcacgccgccggtctcgatgttggtcacggtgaacttggggaagagctcgacgccggcgcggcgcagcaccacgcgctgctcgccgatccagctttcggcctgggtgggcaggatagacggccaggcggtgtcgtcgagcgcgccggacacgcgctgcggcttcagggcgtcataggcggccagcagggtgtcgggcttggccagcgggcggccccagtggacgatgtgcggcaggtcgctgccggcaaacaccagaccgatcgccacattggcggcgggctgggtcaggtagacggcggtgagtgcggtgccgtcagcggcggcgccggtgaaagtggaggtgttctcggccatattgtctccttcgacgtgtgtggatttgcattgcactactggtttcgatggtagaagaaatggaatatgttgccttggtgccgcgtgttggttgcgtgaggtaagtaatgcgtccgtgtctatcgccgctgggcgaagaaatcagtcaggatggactgacactcgccttccagcacgccgccgtgcacttcaggactatggccgatatgcggatcgcgcggaatatcccaaatcgaaccgcatgcaccgagcttgggatcccaggcaccgaacgcgatggtgccgatatgggtctggatgcaggcacccgcgcacatcgggcacggctcaagtgtgacggccagcgtgcaatcggcgagattccaagcgcccaaggcttgggccgcctgacgcatggcgatgatttcggcgtgggcaagcgggtcgccatcagcctcacgcgtgttgtatccgcgcccgacaatctggccggccgcatccagcaccaccgcaccaaccggtacgtcaccagcggctgcggcctgaccggccagttccagtgcacagcgcatcgcctcgtcatattccataccaacgagtgtatgcctttttctcatatcgtctcatgatgtgcataatcggccgcaatcttaacgttttcttcatggttcccatatacttttggtggagaaaaaatacgagaaggcggcaacatggcggtatttgagctcatcctatgcatcattgcggcggtggtggtgagctcgtttgccagtcgcttcgtaccgaaggtttccacaccgctggtccagattgtgctgggcgtgctggttacgtatctgccgtttttcccggatgcaaagctcgacccggaactgttcatggtgctgtttatcgcgccgctgctgtatctggaagcgcacgaaatcgataagtcggcgttgctgaaaacgctggatctgagcctatcgctggctatcggactggctatcgtcacgatggcggcggtcggattcactttgcatgccgtctggccgtccatcaccttagcctcagccttagcactcggcgcggcactcggcccgaccgatgcggtggccgtcagctccctaggtaaagaagcctcgctgacgcagcgtcagcgcagcgtgctgaaaggcgaatcactcttcaatgacgcttccggcatcgtcggcttccagttcgctctggccgccgccttcactggcgaattcgccgtggggcaggccgccggcgaattcgtgatctccttctttggcggcaccttatttggcctggtgatagcagcagcggccaactggctattcgagaccgtgcgatccctcggttgggaaaccaccaccacacgtattctgatggaactgttcctgcccttcctgctgtatttgggcgcggaggaattcaatgtgtccggcattctgtcggtggtggccgctggcctgttcatccgattcgaccgtaccggcgtggggccgaatgtggcacgtacgaatatcgtttccacttcagtatggggtgtgctgagtttctcgctcaacggtgcggtgttcattcttctgggcatgcagctgccgcgcgccatgagggccagctggtctgacccgtatatcagcaataccgtgctgatcggcattattctgctggtcactctggtggtaatcgcgcttcgattcttctggattgcggccatgctgcgcgttgcgcgagatacaatcaccggccagcgccgcaaaatgacacccgaacgctggcgctcggccgcagtgatgacctttggcggccccaagggaaccatcacgctgtcattgatgtttaccatcccgtattacattgccggcggtgcgccgttcccgatgcgtgacgagctgattttcattgcgtcaggcgtgattatcgtgaccttgctgctggccaacttcctgttaccgctattggccccgaaccgtggcaaggatcccagcgcggaaatgattccggtgaccatcgatgtgttacgcgccacggtggaggaattgaccggacgcatcacgccagagaatcgccgtgcgattctgatggtaatcgaccaatacaccaagcgcatcggacgattgcagcagcgcatcggcgataccgatcctcagggattcgagcaattgcagatcgaagcgctgcattgggaaaaggaattcgtgcgcgaccggcttgccgacaccaaagcacatccggcggcggatacggccacgcaagagctgaacgtcgaaacctgcgagcgcatgcttgaccagattatgaatacgttgcgtcacacttccactgatccgacttcggggcatgcggtatcgcagattcgcggtcgcttacgcatgttccagcggcagatgagcaattacgccaaacgcacggtgtccaagattcgccacaccacaccattggtgagcgaggaccagattttcgcgcgcacccgcgaactgcaggtcgaggcgattcatcatgttatcggccggcttattgacgagatgggccaggatacgtacaacaccgagcattgttcggcgctgttgctggattatcgtcgcgctgaggcttcattgcaggcacgtccgaatatgagcggcactacggaaaccatcacgcaggtcgaggacgtaaagcgcgagagctacggtatcgaactcggtgtgattcaggacatgtacgaagccggcgacatcaaccgagcccaagcccgctccctgaggcgcaacatctacgttatgcaggtcgatgccgattccggcatctagtttccttggctcccttctctgaggggagccaagttggggattgctatttccgtatgattctcttcagtatgtgcagtagtgcttgcagtgctcacttcgctcatgggagaacagtctatgaccgcgccggccacaagcgccctcgatgtccgattgctgtgacggccgcgccaattccagtgatggcggctgactacagcacgccagaggtaatgtcgttgtcgagcagccactggcgcaaatcggcgaactcctcaagactcacattgtgatccagaccgtggtagctcttggttttcagccacgtatgctcttccaaccaagcggcggtggcgaacagttcgtatttcgggattacgccatcgttcttgccgtacgtatagaacacggggatatcgtaatcggccaggcgagagtcggcgggggccgtgccgggcacctgaccgggtgtgttgaagccggacagggagacgacggcccggtaccgctcggggttgatgcgcaacaaatgcacggcgaccagtccaccttgcgaaaacccaagcggcaccacgtcacggtcggcgggaatgttgtcggccacccatcggtcgactgctgtggcggcggcatacgcgtcgtagtcacgatcatcgccgataggcagggcatcgtgaaaccacgcgtagttgccggggtcgggactgccttcacgggccggcgcgagtgtcagcggcccgcgcaatgccacgaagtcgttatatggagcgatgaggcgcatgatgtccgccatgtcttcttcgctggatccccatccatgcaggcacaggaacagcggatgcgtggcatgctggtcgaagccgccgcgcgaggtgacgctgtgttccacggtgagtggctcgccaaaacgtccaggcacagtggtggattcgcggccgatcagaggctggctggcattcgcttctttgctcataccaatccaatatagaggtcttgcgcgctgtgcggaaaacgatggaccatgatttcagtcacattgggtaatccgcgccgaatcgccttgggactttccaggggataccggcaatctgtcaggcattaccgttgtttgcggctgcggtgtctgtggctgcggtgattgtctcaagttcgccgccccactgctgctgcagtgcggtcatcttgctgccctcgccgaacaccatccagcgtttgccgttcagcaatcgccaatcgcctttcgtttgctcattatcagcgtattggctcagcagttcggaaatcttgctttcgataggtgcccggctgatggctgcggacgtttccgattcaaaggacacgaaggccactctcggatcagtgcacatctgtacggtggtgatgcctggcaaaccgcccgtatcaagcccctgccatccttctttgcacgcgccggcagcttgttctatgccttgctccatctgtgcggcatcttcgacgggtgccttgtcgttcgactgctgaatcagtccttccgggaacaatacgcccatggccacgccgataaccaagcaaactatggcgcacaccagtgcgatgatgccgcccgcgcccactcccccgtgagtggcgtaccgaggcatggtgactcgcgcagcgatgaccagcatcagggtgatgctgataagcaccgccgccgtcaacgcaatgtatcgtcctggcactgccgtcataaagaaaatggcgtaaggcgcgatttcatgaaccgccgaggtggccgataccacgacggctagcagtccgctgacaacggcaagtctgcggcacaatatcgacgttgggctgctgacttttgtagcggcgaatcgccggccggcattccgcctggatgggcgtcgattctgtgcacgacgtgagctgcgcgaatcgtcatactgaccatcgccgaagaaatcgtagtcctcatcgttgcgggccatcggtgccccccttcctgccgattacacagccagtgtaccgctatggcttgggaatggcggtcattcgggggaatgattcagggcaaaaaagaaccccggcggttgcccgccggggagagaaaggagagagaagaagaaagggggttcaattgtcgggaactgctgcggctcctgatcagctttccgctgacatcatttatataaccactgctttctgggtctacctctaagtttctctgagaaaaacctgagaatacttgcgattgatggaccgcggaagcgtgaggagcctctcacgtttccgcccaaggcgctagacttgaaggcagtatttatttgcccaaggagtttttcacatgctgctgtccgatcgcgatattctcgccgcacagtccgcaggtcatatctcacttgatccgtggacccccgaaatggtgcagcccgcttccatcgacgtgcgattggatcggtacttccgtttgttcaataaccacgcctacacctatgtcgatccggcggaaaacca

SEQ ID NO: 2668 - DNA, 11587 bp, Unknown
  R36_18m  MAG No. k141_4148
aacacctgctgctcggcctgatccgcgaaggtgagggcgtggccgccaaggcgctcgcctcgaagggcgtggagctggatgccactcgcaagcaggttgaagaaatgatcggcaagggcaacgcggctccgaacgggcacaacccctttaaaccgcaagccaagcaggtgttcgattactcgctgcgcgaagccctgcagctgggccacagctacatcggcaccgagcacatcctgctcggcctgattcgcgaaggcgaaggcgtgggcacccaggtgctcatcaagatggacgtcgacctgggtgagctcaggagcgcgaccatcgatatgattcgcggcaactccggcaccggcaccggtgacggcaagggcgacttggccaacgccggcggcgtgacggacaagcagaacaagtccggttccgccatcctcgatcagttcggccgcaacctgaccgccgaagccgctgaaggcaagctggacccggtcatcggccgcaccaacgagatcgagcgcgtcatggtcgtgctctcccgccgcaccaagaacaacccggtgctgatcggcgagcccggcgtgggtaagaccgccgtggtcgaaggcttggcccagaagattcaggccggcgacgtgccggaaaccctgaagggcaagcaggtctactcgctggacctcggttccatggtggccggctcccgctaccgtggtgatttcgaggagcgcctgaagaaggtgctgaaggaaatcaagacccgtggtgatatcgtgctgttcatcgatgagatccacaccatcgtgggcgccggctccgccgacggcgcgctgggtgcctccgacatgttgaagccgatgctggctcgtggcgagctccagaccatcggtgccaccactaccgacgagtaccgcaagtacatcgaaaaggatgcggctctggaacgccgtttccagccgattcaggtgcacgagccgaccatcgccgagaccatcgagatcctgaagggcctgcgttcccgttacgagaaccaccatcacgtgaccatcaccgatggcgcgctgcagtccgccgccgagctgtccagccggtacatccaggaccgcaacctgcccgacaaggccatcgacctgatcgatgaggccggtgcacgcctgcgcatcaagcgcctgaccgccccgcctgagctcaaggaactcgacgagaagatcgccaagatcgccgccgacaaggacgaggccatcaagggtcaggacttcgagaaggccgccgaactgcgcgacaagcaggagaagctggaagccgatcgcaagcagaaggaagactcctggcgcgaaggcgagtccgacgtcaagatggtcgtggacgaggacgtgatcgccgaggtcatcagctccaccaccggtatcccggtgttcaagctgactcaggccgagtccaagaaactgctcaacatggaagccgaactgcacaagcgcatcatcggccaggacgaggcggtttccgccctgtcccgctctatccgccgtactcgcgtgggtctgaaggacccgaagcgcccgtccggttcgttcatcttcgccggccccaccggcgtgggcaagaccgagctggccaagacgctcgccgaattcctgttcgacgatgaggacgcgctgattcgcgtggatatgtccgagttctccgagaagtacgcggcttcgcgactcttcggcgcgcctccgggatacgtcggctacgaggagggcggcgagcttaccgaaaaggtgcgccgcaagccgttctccgtggtgctgttcgacgagatcgaaaaggctcatccggacatcttcaacacgctgctgcaggtgctcgatgacggccacctgaccgacggtcagggccgcaaggtggacttcaagaacaccatcatcatcctgaccaccaacctcggtacgcgagacatcgccaaggccgccaacacgggcttcaacctgggtgctaacaacgagtccagctaccagcgcatgaaggaccaggtcagctccgaattgaagcagcagttccgcccggagttcctgaaccgtctggacgacatcatcgtcttcaagcagctcaccgagccgcaggtgcgccagatcgtggatctggacgtcaagcagctcaacgaccgcctgttcgaccgtcacatgtcgctcgaactcaccgacgccgccaaggacctgctcgcgcagaagggcttcgacccgctgctaggtgcccgtccgctgcgccgcgtgattcagcgcgacatcgaggacgccatctccgagaagattctgatgggcgatctcgaagacggtcagcgcgtgattgtggatgcggaaggcgagggtatcctcggcgaattcaccttcaagggggagaagttcgaggagccggccgccgccgataagcccgccgaagacggtgccgccaccgatgccgaaacttcgtccgaagccggtgcctccactgatggcgagactccagccgacgccactccggccactgaaccagccgaatccgctcccgccgattccggtgacgctccgcagaagtagtccgtttcgatagcgtagctagcgcataccagcaaagctccccttgacaggggagctgtcagcgaagctgactgaggggtagacctacgcacacataatgtgcacgtttttggtctacccctcagttgcctttggcgatagctcccctgtcaaggggaactactgtttgttgtcgggttattgcagcagggcgagtccggtgtcgatggtctcctcgcgggtaaacagcgtgcggccggcgcgcaccgaacgcaataccgagcagcgctcatacacggcgttgaacacactatcggcgtccagcacaatgaagtttgctggcttgcccgtttccaagccgtacatatcgcgcaggcccaacgtagtggcaccgttgatggtcaggaacttcaacgcatcgtcgatttcttcaaagctcatcatctgtgccaaatgcagcacataatcaagaatgagcatcatattgccattgcccagcgggtaccacgggtcctgcattgaatcctggcccaatgacacattgacacccgcctcagtgagctccttgactcgcgtgatgccacggcgcttggggaaggtatcctgacggccctgcaaatacaggttctcggtgggggcgcaggcgaagttgatatgcgccgccttaagcagcttggtcaggtggaagaagtaggcgttgtccgccgatcccagcgaacaggtgtggctggcggtgaccttcgggccaatgccagccttatatgccaacgccgaaagcagctccacgtaacgggaattcggatcatccgtctcatcgcaatgcacgtcgatgagcttgtcgtatttcgaagccaactcaactaccgtgtgcatggaatgctcgccaaactcacggcactgttcgaaatgggggatgccgcccacgcagtcggcacccatcttgagtccttcctccaccagctcggcccccgattcgccatgcgggccctcgtaggagtacatgccctcctgcgggaagctgacgatctggagagtgaccgtatccttcaattcctccttaagctccagcagcgcctttaatgaggtcaggttcgggtcggtcacatcggcatgggagcgaatgagctgcacgccatgcagcatttctttcttaatgccgattttcgcgcgctgcttgatctcgtcgaccgtcaagtcggacttggtctcactccatcgctggatgccctcaaacaaggttccgctttcattcaccgcaccgggcttgcgggccgtgaatacgtaatcaaggtgcagatgcgtatcgcagaacggtgggcagacaagtttgccgcccagatcgaccacctcaatggccgccagatcaccaccctgagcctcatattgttgcgcgagtccggggccgaatgcggtgaacacgccatccgtgacgagaatgtcctgcaatggcagggtgcttgcagccgtgctgccgggttctccggtggcgatatgtgcgttggtgaacagtgtggtagccatcgtcgctccttcaactggtgtgttgccgaacggttacgtgaaccgactgcccgcgtaaccaactgaggttattgtcaacagcacgctttgcggtgaggttaaccggaacgaccggtgttccgcgggggaatggacagattgtatgactgtatcgattcgcagtgcgcttcataacacgcagttcaaacgagccgatcctgtggtggaggtcgaaggcaaagacctcgatacgccagtgcgatgggtgtttaccaacgagcgagaggatgtctccagtttcctttcgggcggtgagatgctgattatcgagggtaacgctctgctcgccgccgattggcacggcacgttaggacaatatgtagcaagcctggcacaggctggtgtcgccgctctggtggtcgaactggtggagggtgtggtgcggatgccggacgaactggtgtctgcggccaggctgcatgggttgacgttgattggtctgaaatctcgcgtaccttttgtcgacatctgtcagagtgtcaataccgctatcgtgcacgaacagatgcacttgcaattggaggtggacacaatgtccacttcattacgtgagggattgtcccgtaccggcaatatcgaggctgtggccgaaaccattgcgtcgctgttcggcgaaagcgtcgccattttcgatggtgacggtctgttggccgctcgagcgggtcgtgcgttcgatgccggcaacgaatcgagcgccgtcatcgcccttgaaagtcgctcccggccggtgggagcattggagatcacgcaacgcaccatgactttcgacgccacgatgcgtcgggccatcgccaccatcgtgtctccggtggccgccctctatattgacggcggcgcgcgcatgggcatgatgcatcatctgagtatgggcccggccgacggcgtgcacgtcaatacatttgaggcgcaggaagcgcatgcgatgctcgacgcgctgggttttgccggatcatgcatctatatgccattcgcttttcggttcagatcggtggtggaaggcatcaaccatgtatcgacgatggtcgaacggttcgaagaacggtcgggatgcgccgtctcctgcatgctggaaggtgacttgatggtcggatggtgctccaccaccgattcctcagacggtgcggccgcattcggacgccattgcatggatgcgcttgccgtactggaaggcgacggtgtgtacgtggtgcatggccgagtggcattggacacggtgacgctggtcgacgggttcgcggtattgcgtgacatcgccaatcaggaaccggcatacgggcgaatcgtaagtaccatgtccgcactcgtcgaccgtttcgtcgcatcctctgatatggacaaggcgatgcgcatgctcgtggtgcagaccatcggattcgaggtcgccgcctctccgttgttgctggacacactgtgcgtctgcttcgacaacctcgatagcaaaaccggcgcgtgcgagcaattgggtatcagacggcaaaccctgtacaaccgactggacaaagtgacacaaatggtcggcgtcgactataacgacaaaccgaactggtcgatgctgctattcgccgccaaactcacgaaatcatggcaagaacagcatggtgaataatgcgccagcaccactgggcaacctgtccacttctacgccgaacgggttaatcgacgattcacgtttcagcaaatactcaagggcatagtcgaggctatcgcggcgctggtcgacctgctgcgaaacgaattcccacttgaatcccattcagtcacacgaacagcacatccttgaaaggacggtgacatcatgagttccgcaacgattactacatctgcacgactgatgaatttcacccctcaaactgaagaacaggccatggtcaggaaagtcgcggtatcttccttccttggcaacttcatcgagtggttcgactacgcctcctattcgtacttcgccaccaccatcgccctggtgttcttcccaaccgacaatcacaccgtcgccatgctgcagaccttcggcgtgttcgcgctatccttcatcctgcgtccaatcggcgcactgttctggggtagctacggagataagaaaggccgtaaagccgcattggcccactcgattatgttcatgtccggtgcgagcttcctgattggctgcctgccgtcttactcggtgatcggcgttggcgcgccgattctgcttctgctgctgcgcatggtgcaaggcttctccgcttccggtgaatatgccggtgcggccacattcctcggcgaatatgcacccacctcaaagcgtggcatctactgctcgctgattccggcgtccaccgccatcggtctgctcgctggctccacgctggccacgctgatgaccgccaacatgaactccagcgcgatggtcggttggggatggcgtgtgccgttcctgctggccggcccgctcggcctgattgtgctgtacatccgtaccaagctctccgattcccccgtgtaccagtcaatgaacgatgctcttgagtccaagagcgccgcctccgctgacggccaagtcgtttccaagagcggcatgttcgccccgctcgccgaactcttccacaaccatctcaaggccctgatcatcagcttcggagcctgcgtgctgaatgcggtcggcttctacaccgtgctcacctacctgccgacctatctgtctgacaccgtcggcatggacgccacccagtccggcaccatcaccaccatctgcttggtcgcctacgtgttcatggtgttcggcatgggccacatctccgacaaattcggccgcaagaaggtgctcatcggtgcttgcgtggcgttcatcgtcctcaccgttcctgccttcctcatcctcaacacctcccagttctggcccgtgctgctggttgagctggcaatgtgcgccaccctgaccgccaacgacggtaccctgtccagctacctgaccgagacgttccccacctccgtgcgcttcaccggattcgcgttcagcttcaatctggccaatgccatcttcggtggtacggcctcgttcatcgccactggcctgattgccctaaccggttcatccatcgccccggcctggtacatggtgggtgttgcggccatcgccttggtcgcgatgattctttcccatgaaaacaccgacaaggatctgaatcacatctgatctcctcagctccggctcctttcccgagggagccgggcgtattcattgaccatccaatccaccaccaacccaaaggagtactgcaatgggtagcaaccgccgtatggaccacatgacctggccggaattcaaggaggtgaagactcatcccgtcatcgtgccgatcggttcgaccgaacagcacggccagcatctgcccatcggtaccgacgcggtactcgccacgcgggtcgccgaagatctggcggaacgcatcgacggcaccgtgctgcccaccctgagctacggatacaagtccaagccgctctccggtggcgggccgctgttcccgggtactatcgacatgaacggcgtgacagtgatcacccaaatgcacgacgtgctgagcgaacttatcgccgatggcttcaccaagatcgtcgtcatgaacgcgcattttgaaaacgaggcgttcatcgtcgaggccatcgacctggtcacccgcgaaaccgggggagtggccaccatcgtggaaaccaattggtgggacccggttccgcagtcggttatcgacaaggtgttcgatggattggtgttccccggctgggcattggagcatgcggccgtcaccgaaacttcgttgatgctccactacgcgccggaactggtgcacatggaccgtatggtcgaggaagccggtgccacggcgaaatcctatgtacgctacccggtgcgccaaggtgacgttcccgctcacggcggactcgccaatccggccggctcaagcgccgaacgcggccgcctgattgccgaggcgtgcgtggatgcggtagctgagatctgcgtcgaggaatttgccgagtaatctccccttgccgacgcattcgtagtgacacgggttgcaaaggcctgaccctgatagtacggggtcaggcctttcccatcccaagacgccgctaagaattcacctgagagtcgccttcctaggcatggccgttcaatcgacgatcctagcgtgactggtgtgagcaggaatatgaagaaccggcggtgggccggcaagcgatcggggatcgcttttggtgcagtagcgcttatccttacggctctggtggttccttatgcttgtgcgggaaccacgggagccgttcctttttccggcgataatccatcttccggcacccgtacggtgaccatcgccgacatcactgattttcacgggcatatcgaacgtggtgcggacaacgccaccgccttcaccgtggccgacagccataatcccggcaatatgatcccggtatcgaccggcgatttggtgggaggttccccgtatgagtcggcggtggagaaggaccaacccacgctggacatggccaaagcgtggggattgacgatttcggcggtaggcaaccatgagttcgaccgcggtgtcgccgatttcaacaatcgcatcgctgatcccagcaatggcatcgactggctgtgcgccaacacgtctgccgccagtaagtcgcctgacggactgctgagccatgtacgtgactctacgattcgaacggtgaacggcaagcggatcggtttcgtgggcgcccttactgatgcgctcggctcggtagccactccgcagattacgcgtgatgccgatcttgacgaacgggcggtggacgcgatcaatcgcgtggcccgtgaactcaaacgctccggaaaggtggatgcggtggtggccttgctgcacgccgatgcctcagccgccgccgatattgggcgagatgttgatgtggtatacaccggccacaatcacgcgatcaagcgtggtacgaccgctggtggcgcgcctatttacgaggcgggcagcttcgggcggaatatggccgtgcaggatttgatcatcaccggtgccgggcgtcgcgccacggtgcgagtggccgatgtggacctcggcaatggcaccagccatacggcggttgacggcgtgctgggcgtggaagggcttaatgcgcatccggcgcaagccgcttggatgtctgccggtgctgaggcgaacgatgaggtatcgcgcgctcagcatatttaccaggcggcggcaacatattcgaatcatgccggcaacgcggtgattggcaccttggcctccggcgtgaatttcgacaaacaaggttcggataagcacgggaatacggtcggtgtgctggtggcggacgcgaaccgcgagtcaatcatgaagcatgtgtatgccggaaatcgtttgccggtaatcggattttcgaataatggcagtctgcggactccacggcttgatatgaatggcgatggcaaagtcaccgtgcgcgaggtggatagtctcatggccttgcagttcaaggccgcgcatgagacgctcaccgggcgcgatgtgaagagagtgctcgccgagcaattccaccgtgacgatgggcgactggagcggcgctggctcggcatctcctcgaacgtgacgtatcggtatgccgaatgcggtacgaccggtgggagcggcaatgccgatgccgccgctgatactgatgccgccgctgataccaacgctgacgctgacgagtgtgctgccgacgaacatgcggcggttcgtatcgcgaacctcgccgttgacggccgaccgattgcggacgatgacctggtgattatcgcgtccaattcatatctgcttcagggcggcgacagttaccccgccttccgtgccggaaccaattacggcgagctgaatatgccatacagccagccgttgcatgaatatctggccgcacatcaagggctcacggcaattgttgcagcaccggtagggactcaggcgtaagacaccaattgctgggtgactgaggaactatggggtggagttatgagtatagggcagaagaaaacggcataaatatgacgaagctcccctcgctgaggggagctgtcgccgtaggcgactgaggggagcttgcggtataaccgtaaactcccctcagtcagccttgctgccggcttccctcagaggggaacctggcacgagacccttacttgatggcgttcagccactgctccttggtggccttctcggcttcgagcttggccttcttcttcgggtcggattcggccgcgatcttggcgtcgagctcggcgagctgggcgttgagctgctcctcgaagctggacttgcgggcgtcggcctccggatcggtctgcttccaagcggcatcctcgatggccttgatctgcttgtcaacggcgtcgagacggttctcgatgcggcgcatatcgtcacgcggcacgtaaccgatctgatcccactcttcctgaatcttggccagctcctggcgggccttcttggcctcggcgtcggtcttcaccggcaccagagcctcggccttgaccagcagagcctccttggcagccagattctccttctcggaggagttgatctgatcgcgatcagcctgacgagcgttgaagaaggtgtcggcggcttcgcggaacttggcccacagctcgtcgtcctcgttacggccggcgcggccggccttcttccaacggtccatcagatcgttgaacttgcgggaagtctcaccccaagcggtggaatccttgagctcattggcctcggcgataatcgcttccttggcttccttggcggccgtgcgctcgttgtcgcgagcctgagcccacttgcggcgagcctggttgaaggtggtgcgggcggcggagaagcgcttccacagcgcctcggcctccggcttgtcgatgcgcacggtggtgcgctggtggttctgccactcgtcgaacaggttacggaacttgtcggcggtggagcgccagttggtgttgtcgcccagggaggccgccagtgcttcagccttctcgacgatggcggtgcgctcggcaacggccttggcctgagcggccttgcgtgcctcggcgatttcggtcttcttggcctcgccggcagccttcagctcctcgtactgggccttgagtgcggcaagatcgcccacgacggccggctcggaggtttcttcacccaagagcttcgcggattcgtcgatttcacgggccttgatgttcggggaagccagacgggtggccagcagatcgagcttggccttgagatccaggaaacgacgggcgtacagtgccaacgcctcttccttggagacatccgggaactggcctacctcgcgctcggcgtcgccatccttgacgaagacggtgccgttgtcatccacgcggccgaaggcctcggcggccttgacatcagcctcggaataggtggcggtggcggcggccggggcggcagcgcgcggcttggtcgccggagtcttcttgg

SEQ ID NO: 2669 - DNA, 4011 bp, Unknown
  R36_18m  MAG No. k141_4406
ccgaccatcagcatgatcagaaatccgactaactggccaatcatgacgccgaactgccccatgcacactcctctcgtttgctctcccgcgatttcctgtcactggttcatataggcagccatctggacaggctcggcggcacacgcatcagtatgttcgataccaccacatgccaatccacttctcgttcaaccgttccccgtgctaatgcgccgcctgccaccccgtgttgccggtgctgcgcgagcaccgctacgtgtattgcattccggtggccctcgggcgcaacgtgtgggtcggcgcgaacgtgtcgattctgtcgggagtgaccatcggcgacaattgcgtgattggcgccggtccggtcgtgacacattccatccccgccaactccgtcacctacggcgcgccctgcgaggtcgtgcgtgaaatcggcgacaaggaccgcgagtatttctacaaaaatcgcaagctcgacgtgtgggagtgagctttcgcgctactgctctttgagcttaaaacgctcactgaattggcggtcgcgccagtagtagacgtcgtcgcgttcgttgatttcgcgaattaccttgcacgggctgccataggcgaccgtgttggcggggatgtccttggtgaccagcgagttggcgccaatgaccgcgttgtccccgatggtgaccccgggcagcacggtgacattcgcgccgatccagacgttctcgccgatgtggactggcaacgaatactgggcaccctgatagcgcaggtccggacgcacgggatggccggtggctacaagcgtgacgttggggccgatcatggtgtgggatccgatgaagatctcaccatcgtccaccagcgtcaggttgaagttggcgtaacagcgctcgccccaataagtattgcagccccagttcgcatacaccgggcattcgaggtacagaccctcccccgccgcgccgaagaacgcctgcatgagttcggtacggcgcttcgggttggtcagcggcgtggcgttgagttcgagctggagatcacgctgggcggcctgcagatcaaaaaagccgtccacatcatccggcaggtagacctcgccagagaacataagcgccattttctcgcgcgtcgcatcatcgataatcggcttggcgatcggcttgtcttcggtcatcattggctcctgttcggcgttttggcgattgtgtcggtcgaactattctgtcacagactcgttttcgacacccagcatcgagcgcagccagtcaaggattcagatgtgcgattggcaccgtgcgggcctcacacttttcttattgagaacgattcgccgtgcagtcaagccctccatccacccaaaaaggactcgcttttggccgcgtcgtcgcggtaggccttgccgaactcgtcaatgagcccatggaattcctgcaaatccttgacactgaggttcgtatccagcaccacgggcgaataggccctgtggaatgccggatagccggccggcacgtcgaatccaaggaaggcgaacagccgccgcgcgtaggtatcggccacgaatgtgcggcgcgagaacacgtacagcatcagatcgtcggccgtctcgccgccaataccaaataatccaagcaactcggcccgtaattcggcatcggaaatagccgcggcaccctcgggcgcggccccgcaacgctccacataccaccaactcagcgactgtacggtcttggatttgttgacataaaagcctgacggtcgaatcagttcctgcaaacgctccggctccatggccaccagcttatggggttcgagcacaccctccgcgttcaacgccgcaagcgaacgattcacattgccccacgccgtattctgcgtcagcaccgcgcccaccataatctcgaacgtggtctccgccggccaccatccggtcgggccgagtgcgtcagccatggtgcggtacagcaattcgatgcgctccggcacaggccacttgtgtgcctggttggctttcatacgtttcatattctgcattcaggctccgtattagccatccgccattcatttattaggtcgattatgcgttcattaggtcacttgtgatgaacactgccttcaagaatggcttcattccaatgctcattatctcatgctaagcagggcaccgacctaatgaacgcataatcgacctaatgaacgcaacggtaaggaaaaactacagagattcagcgagatatgctcggtccacctggtctggaagtcgaaaatcttgatgacatctaccgcaattcgtgcaggattcgccgcatgaacgggatggtgaccacgaatgtcagcacgtcggacaccgattgggccatttccacgccgagcacgccgaacatcatcggcagaatcagtacgatcggtgccaaaaacagaccttgtcggcacagggccaggaaggaggcgatgccggtgcggcccatggtctgggtcatcatattgcccatcatgttgaagccgttgagaatcaccgtgcagcattggatgtgcagcgcggccacacccaccgcgaccacggccgggtcggagcggaagatctcgaccagttgcggtgcgaacacccacagcaacaccgccaacaccacgagcacgcaggtggcgagccgcacgcagaaccagtacccttctttgacgcgcgcgaacaggccggcaccgtagttgtagccgcacaccggttggaaaccttggccgaggccgacgatcaccgagttggcgcccagcataatgcgcatcacaatggccatgccggcgatggccgcatcgccgaacggattggcggcaatgttcacgcaggtcacggaaatcgaaccggcgccttggcggatcagcgagggcaggccaccgccggccacttcgcgcatgagcagcacatccggcctgcaattgcgcagggacagtttcatcacgccgaatttgcggctcattgtggtcagaatcgtgaagctcaccgtctggcagatggcggtggccaggccggcaccgaaaatccccagaccggccacgaaaatgaacaatggtgcaagcaggaaattcagcaatgcgcccgaaaccagcccgatcatgccgaacgccgattgcccttggtatcgcagcagtccgttgagcgcgaacgacccgcatacacagggtgcggcgaccaacaacggcgtcaggtattgcacggcgtatggggcgatcgtcgaggtcgatcccagcatgacgaccagcggccgcagggtcagcaatccgattgtggcaatcaccaaaccagagagcaccgcacccgcgaagcccacggccagtagtcgggaggcgcgctcattgttctgtttgccgagttcgcggctcatcgagttgcccgcgccgttgccaaagaagaagccgagcgcctgcatcacggtcatgatggagaacgcgatgccgatggcaccggactgcgcggtgccgagctgaccaataaagaacgtgtccgtgagattgtaggcggtggtcaccaagttggagatgacggccggcaagcacagtttgagaatcagcggcttgaccggctgcccggtcatctgccgatatttcgcgtccgcgcttgcgcgtctaatgccatgaatctgcaccatggacggctatcctactcgcgcagggtcctatgcaaaggcgcgttaccgccatacgagtcagcgcagataccgcccggtgatgctgttcggattggccgcgatttgttccggcgttccggtggcgacgatgcgtccgccgctttcgccaccgcccggacccatgtcgatgatccagtccgcattggcgatcacgtcaaggtcatgttcgatgaccacgactgttgcgccgctcgccacaagccggtcgaacacgcccagcagcacgcgcacgtcgaacgggtgcagaccgatggtcggctcatcgaacacgaataccgcgtccgattgggccttgcccatttcgctggcgagtttcagccgctgggcttcgccgcccgaa

SEQ ID NO: 2670 - DNA, 16592 bp, Unknown
  R36_18m  MAG No. k141_4594
accgggccgtactggccgttgatcgagtagttgccgtccttgtagttgccggtgtccttcttgtcggacgtggtggtggacgggtcgttgtgcgacgagctggaatcggagccgtcggagctatcggagccgttcgactgggattgcgactgctcttcctgcgacttctcggtctcgcccgagttgccggcgtacgcatcgtccatcggcgtggccttggattcgccgcacccggccagcagcgcgccagccacgaccagtccggccgccgccaatgtcgcggatttcttcaacatattcttttcggtcatattcacgctccttaagcccccctctgacgaggggggggctgtcagcgaagctgactgggggagagaccatcagcttgccatgtattcctcacatactgctcgatgcccctgacggccctactcctcgccgccggttttcgcggccttggtggggtcagcgaaaccaatggcggtctcgccgttctgcgcgccctcgacctgtgcacccgtggaggcgggcttgccgccggccgcctcgtaggccttgcgcgcatcctcgtcattccacttctcaccgacgagcacgccatggttgagcatgatctcgcgctgcgcgcagctggcgaccagcgcatcgtgggtgaccacgataatcgtggtgccctgctcgtgcagcttgcggaacaggtcgagcacgattttctcgttcttctcgtcgaggttgccggtgggctcatcggccagaatcagcttcgggtcgttgatcagcgcgcgggccacgcacacgcgctgctgctcgccgccggagagctggccgggcaggtggtgggcgcggtccttcaggccgaccttttccagcgcctccatggcctgcttctcatcgaccaccgaatggtagtactgggccaccatcacgttttccacggcggtcaggtgcggcaccagatagaacttctggaacaccagtccgatgaggttcttgcgcacgtcggccagctgcgtggcgttcaggtcctccagcttgcggccttccagcttcacggagcccttggagggcgtgtccatgcagccgatcatgttcatcagcgtggtcttgcctgagccggaggagccgacgatggcgagccattcgccttccggcacggtcagattgaggtcgtccacggcatgcaggtcgccgtagatcttcgagatgtggtcgagttcaagtagcatgacgtttctctttctttattcttcgcgaagcacgacggcggggtcgatgcgggtggcgcggtggacgggcgggatggaggcgacgatggcgaccagcgcgctgaacagcacggagatcagcgccagccaccagttgaatccgatggagcgttcgaacaccgccacgcacagccaactggcgagtccgtagccgattgcggtgccgatgaggccgccaatcaggccgtagagcgatgattcgatgtagaactcggtgccgatggcacgcgagctggcaccgagggccttgcgcaggccgatctcgttgcgtcgctgcgagacgatcgagctgattgtggtgccgacgccgacgagcgtcagcaccagcaccaccaacgagacgatccagaacagcgtctgcagcatggtgatgatgcgggtgtcggaggcggtgatcttggtgacctgctgcgccttgacgtgcatggaggtcatgtcgttgatgctggacaccaggcccgcgagatcgctggagccggccgaatactcgatgacgtccacgccgcgcgtgatgccggtgagcttgttgacgtcggcgttggtggcgtagatgatcgagtcttcgctgccaccggtgtccacgatgccggccacgcggaattcggtgccggaggtgtccatgatgtcactggagacacggccgtctttggtttgctggtcgatcgaggagttcgacgaagtgccgttggtgctggcgttatcggatgcacggtagccgatggtgatggcggagccgattctcagaccgatggcgtcggcgatgtcacgtccgaccagcaccttgccgtcggtcggccacgagccgtcgaccacccagtgatggttgaggttcttgacctgcgccgcattcacgccggccatcacgtacggcgaggcgttgacgcgcacgttctcgtagcggtaagtggcgtatttcacggaacccttggccttgaccatttcagtggtgtgctgcaccatcgccttgtcgatgccggccttgccgtcggcattggtcgattcggtgggtgtgacaatcaggttcgcgccgtacgcacgcatctcctcgttcatctgctgcggcacggcgaggcagatcatcgccaggcagaacagtgtggccgcgccgaccagcgacgccaccacggccatcaccgcgcgcgaacgccggcggaacacggcgctgaacagcattctgaagaacataccggtgttggtcatcggtttcctccttccacacctacgtagataaactcagcggccatggagcacctccgcgggcttgagattcagaatcgaacgaatcgaggaggcggacgccagcagcacggtgacagccagcagcacgaacaccagcacgaacaccatcggccgcatcgtgatgccggaaccgaataccacccggcctatcagctgggccacgccggaaccaagcaacgcgcccacaatcgcgcccagcagcgagattgccgccgtttcggccagcatcaggcgggataccgcggcatcggtggcaccgagcgccttgagcagcgccagctcgccagaccgttcgccgatcgaggcgaccatcaggttggccacggccacggctgcggcgatcaggctcagcacggtcatcagaatcatcacggcctgcgtcttctgcagcacattgccctgcaacgcggcgacctgacgcacctgcttggccaccgcgcccggaatcacctcttcgatctggtaggcgatcgagctcgggtaggcggtgcagtaccaggtctcccattcctcctggctcagcgcggccgggttcgcggcggccttacgggccaggtcgttctccggcgtggtcagggccttgacctcgattttgtcgaccgaatcgggcaggtcggcgagcacctgggccgtggaggaggcgatgtagagcgagccgttgtcctcgtcgccggaatcgtagacgccggtgagcttgattttctgctcgttcttcttgcctgaggcggtggttttgttgagggtgatggtgtcgccggtggtcgcgccgagttcggaggccagcgtcttgccgatcacgccctggtcggaatcgtccttgggccacttgccgtccagctgccaccacgagcgcatgccttccacgcccacgacggtggtctcgccggtggagatcttgaggtccttgttgaaccacgtgccgacgaccggcacgttggcaccgttcaccgtggcgtggatgttgagctgcggcgcgaagttggtgatgttgaacgaccagaagatcgtcttgatcttggccgcgtccgactccttcagaaaagcggtcgggtcgctggtggacgccgcgccgcccgactcggtgttgtacaggtcggaaacgaccgcgtccgccttgggctgcacggtgatgttcgaaccgtaggtggacagctcggcgttgagcttgtcgcccacgtcgaacacgacgcccagcatcgatacggacacggtcgccgacaggcatacggtcagcgcgataagcaggcgccggcgcagctgtcgggtgaacgagcgagtaatcatacgcagaaagaacatgattcttgtctcctgcctgactcactggaagtgggcgctcagcgcgtccagatccgtagtctgaatggtgatcttgccgtggccggtcttgtacgggaatggtatcgggttgcagccacccttgaagccgatggtcgccaggttgatggccacctcgcacttcttgcagatgatcttgccgtccttctcgtagtagccggcgtcgccgcagttctcgcaggcgtccaggccgatgccgtacgcgccaccgttctttcggatgatgatgaagcgcatgacggtgccgtccttggccttgtattcgaagcggtgcaggtggccgtcctcgacctggctgaaggggatggtggccacgccgtccttgagcgagtaggcttccggcggcgaaagagtgatggtctgatgggtcgcggcgacgccgacggtgagggtcagcgtgacgccgatcatggccacgaggctccagacggcggaggccacggcgcggcggcggaacgccttgtgcttgcggccgatggcttcgttcgcgccggtcagcggcatgcggaagccggccaccacggaggcgacggccggaatcaggaacacgaacgcctgggccatgatcatccagtcgttgtggttgatcgaccaggcgagggccacgaatcccgtgtggcctatcgggaaaccgcgtgcctgcaggatctgcatgacaccggtcaggtgctggacgaacagaatcaccagcaccgcgagaacggcggcggtgaacgaggcacgcaccgcggtcgaacgcatcgtgcggaagatcgcggccacgatgatcgacatggccaggcccagcgcgaagccgagcgcgcgcagcaacatgtcggacgtgaagatcgggtcgccgggctccacccagatggtcagctgcaggatcacgtccggcagcgcgtagaacagggtgagcgcgatgtcgatggcggccacggcgttcgcaatgtgcatgaacaccttgtgctgctgccaattggtggtgatgcggcgtgcgaacaccaccacgacgatggtgaggatgtcggcaatgatcgcgcaccacagcaccggatagttgacgaacgtgcgctggttgatcacggccgaggcgcgcaggccggcgaatgtgatagcggcgatcaggccgacggtcaggccgatgagacgccaatgcgagcttatcggcttatctcgcccctcgccgaccgtgagcatcacgctcaggctcatcaccagcaatgcgggggccaaggtgcccggcatcactgccacgaattgttcaagcattcgcgtcctttctctgttcatcttaggctcccctccctgaggggagctgtccgcaaagcggactgaggggagtttttagaccgtcctaagaattatctccctaaagcggcgtaaagccccctctgacgagggggctgtctgcttagtcaatcaccactgacgcggggtgtagtcccagttgtcgaaggtgacctcgatgggctcggtccagaacttgtggttcttgacaccggtctccgggtcaacgtggagcatccagccgttcttctcaggggactcgatggagagcttgagttggtaggtgccggccttgtcgagcttgacgttggcgccgtagtgcgggccgtcggaggcgttcatctgcatgaaggtaccggaggtggcctggccgccctcgacttccttgccggtggacttgtcgatgatggtgtagttcacagtaaggtcagggacgaagtcgcccttgccgtagccgtagtcggtgccttcctgggaggcgtggatgtcggcttccaggtggaaggaagcgtcagcagccttcagacccatggaagcagggtacatgtcgatgggctggaagtagacggcgcccacggtcagcgggccagcggccttgtcctgctcctcggcggtgccggaggggccgaccgggacctcttcgaagccggaggtctcagtcggggcgtcggccttcttggagtcgtctttcttggcggtgtcggaggagctggtcgaggacttggtatcggaagcgttgttggtggaaccgcaagcagccatcgaaacagccatggagccggcgagcagcacgccgagcagagcggcaagcttcttgttcttcatcatttctcttattccttctgttgtggtgaatggattattcacgacttatctgtttttagttgtggcggcgtgggctggaatcgcttccattgccatgtcgcaagttgtgttgcgcgagatggtcgcaccgggcgttgtgctacgcctgcgcgctctcctcgtcagccttcgcgtccgacttgctcgcaccggccgcaagccgggccttggccttacgctgtttggcaaagccgaccacgaacagcgcgatgacggcgatggctgccagtacctgggcgatgatgcattcggcgtacgggtagaatccgagccagtcgttggtgggaacgcccggcaggtagttggcgggcagcaggtcgccctcgatgagcgcgtgcacgccgccgccggcgaagacaaccaccagcacggacatgaggatcgaggtgaccaggaagaacgggccaatcggaatctttacggaggtgaagcgaatcaccaggaagatgatcacgagcaccacggcggcggcgagtgcgccgaccaccatgccatgcgtatcctggctcatcgtgtagatggactggtagaagatcacggtttcggcgccctcacggaacacggcgaggaagctcagcatggcgagcgaaatcaccgtgcgggaagccaccttctcgccggattcgacctgcgaggagacagaggccaccgcggcttcggtcttttccctgatgtagcggttccacgcttccaccgaggacttgttgagcatccagttgctggtccacagcagcatgcacatggcgacgagcgcgcacacgccttccatgatctcctgcagcgggccggagccgccgaacgcgagcatgaagatgaccgccacgatgcctgcgccggccagaccggcgagcacgcccacgtagatccacttggtgaagcgcttgttgccggacttgacgaggtaggccaccacagcggcgaccacgagcagggcctcgagaccctcgcggatcagaatcaggaacgcctggccgaccgagctggtgatgaacttgaggaagccaccctcctcatcggccgcgccgccgtcgagcttggcggcatcggtggccagcatgttcttcaggtcgtcgatgtacttcttgacttcggaagcaggcttgccggtgttcatcgaggagcggcacagcttgaactggtattccacctgggagacgcggttgccgctgatggcgctcagcacggtcttctcgaagccgagcttctcgtagtgctggtagtaggcgtcgttcacgagcgtggcgcccttggcggcgtcgccaccctcataggccttgtaggcgttgtccaggatcggaagcatcgcatccgcgacttccttccaagtcttggccgtttcctcggtgcgcttcttcttggcgtcgagctccttgcgctccttggcgatctgcttctggaggtcttcggagtactgcttcgggttggcgaggctggtgttggcgtcgagctgctgggccgtggcgtcgaggtcggcggtcaggtcgttgaccttctgggtaagctgatcggcctggtctgacgtgaacacctggctttgcaggtcctggaaggcctgctgctgcgcggtctgcttgtctgcgccgatggtgtcgctcaccactttgttgaagttggacgtcacgtagacggtggtgtatgcagccccgaaatcggacttggcacccattgggttgccgtccttgtattccttaaggccttcctgcaactgcgcttcgacggccttggcaacgtcggcccaggtcgcgtaatcgacgctggtggtgtcgtcgctcttgacggtggcagcagtggcagtggttgccggcgtcacggcgaacgcggactgcggaatgatggcggaggggaggaaggtcgcggcgatcatcgcaaacagaaaaacgatgaccgcaaatgcacgagccgagaccgtggccgactgcagacgaccggtgctgcccgacttcgcgcgcacgcgagaaacggcaacgcgcgtatcacgttcccgcatcgtgttcatttcagcggactgcgcgcaggcgcgacgaaccatgctgaattcctctcacttcaagtactcgaatggtccaaaaacaactatgaactctatagaaaaaaattcttgaacaacagtcttgattttttgacgggtgcgaggtaatagaaggcgttttagtgcttttcaaccccgcaattatttcactatctgagataactatgctcagagaggatggctttcccggaatgtgaacggcaacaccacaaaaagcggcaacgtgaggaataccggaatcggataccaaaatagtgccacgggtgaggcatacagcgacagcaccgtgaatgccagcaagccgtaagcggccagtgcggggccgtagcgtcgtcgcgcaggccgcaccgccagcgcaagaccagcagccagcggaatccacgtgacgtacagggccatcgaagtcagcggattgcctttgcgaacaccgacatgaccatccgaacgcacccaccgatgaatcgcccgcaatatgtttttctgccattgcggcttgtcggaggtacccctcagcggcgcaaggtcatgttcgatggcggcaagccgttcggccgccacggtatcggcatcgccgtcggaagtatgcttccaagcaccttcagtcaggaaagacgcccattgcctgagatagctaggcgtgaacaggtagtcggaatcagtggggtacgcgaaattgacgcgcgggtcccaccatccgcgagtcaccccggcataggccgtggcatattcaaccggatgcgcgaggccgagctgcgcccagacctgcagggccgcgagttgttgcgccgcggttggcctagggtgctcgcgcagagtgcggaaggtctcatcggtgcggtgcgggttgatgccgacggcggcccagtcgaggtccatgatcgcgttcagccgctgccgctgaatcttgtctatcgcgctgggatcatcgtgcgcgagccgggccactggctgggtgaccaggccccacacctcacgtccgggcgaccgattcgcatgcgtggcggccgcgcttaatggcgtccacacgccctgcgccacaacgatggcaaccgcaagacacgcgaacgcacgacgccgcgcgcctttgggcgtgcagacggcgagcaaacagcagccggcgcatagcacgattatgagcgccgtccgcttggagacgatggtggcgaacaacaggatgacgaacgcgaatgccaccgggcggcgagccagtaccgagccgcgcgtcagacaagcctccacgaacagcacggccaacggcagatagaacacggcgtgcaacgagtccttgcccatcgtggtgattgcgccgaccaccacatagttggcggcaagatagacgaggccgagaccgatgagccagcgcggcgagccgattttgcggatgtagcacagcagaagcgcgcacccggcggcgagtagaaccgcttgggtcacggtgtacagggcctgcccgatcagaggggagccgagtgcgctgccgatatgccagaacaggccgaacgtgagagtatcaaacagcggatgctgggtgtagtagtggtgcagaccggacgattgcagatattgggcaagcgtatcgtcgcgcatcgaacccggccaggtgagtatgagccacggcagccaagcgatagcgagcgtgagcaggtaagggaggaatcgcgcgcgcagcgatgtggataacgtggtcgggcggcgggccgtgagccaactaaggatcgcggatacgctgcggtacgtctttgagtgtttcttcgattggcgcgaccggccgccatgtgctgcggttacgtcggccgctgtcccctcgttcatgactcaacagcctaggcgcgattgcgggcgcgcgccgggcgaacatcgaaaattcacccggatacggtgatttctttaccgggggttgtgtaggtgcgcgcgggtgtgtgggccctgcacaagcatgcggtccttgtgcgggtgttgcgcgggactttccagtgagtctttcactcgcagtgatcattcttcacatccgcgtcgcgacacgcgccacgccgaagcgtgcacttatccgaaacctgtggtaacttattcgagttgcctgcggaacacagttcaactgcgcgctgcaaagcatggaggattcgcctagtggtctatggcgcacgcttggaaagcgtgttggtgtaacagcctcacgagttcgaatctcgtatcctccgccctcgccggaggccttatttttctaaggcttccggcttttttgtaccctcttgtttcccctctggttcctttagcgttccagttccccgtacttcggtgccgtcgctccccgctctgggtattctcgggcgtgtcgcggctccctgtttcccagtcgggagaaggcttttcggcacttctcatcaagtgccgccccccaccttcattgcaatagaatggaggcagttgcctgttcacctgagggagaagaaacaatggcgttgaataccacacagctggagcgctactacaacgcgccaatcggacaagtctatgaagccatgaagcgctgtctgcaatccgatcagtcccgctttaccttgaagaacgccgacgatttgtcctgctcatgcacgttctcatcgggtattagcctgaccacttggggcgagaatctgacggcctcagccgtacccagcggtgacggcactttagtcaggctcaccgtcgcaggaaagatagggtcaacggcagctggcttccagaactcacatagcatctcccttgcggacgaattcttctcgggagtgtctggagttctttctgccggtagcgcagaaccctcacaagtcacacaagagcaaccagccccagcagcagatacgcttcctcagaaaccagaggagacgcagacgcaggaagagctaacaccggaacccgctccagacgaagagggtattacagaggctaaggcagaggcggattcccagcctttcgttgcacaagaggcgagcaagtcaaaggcggaggaggtttggaataagtatcgcttgccggtagtgatagcctcatttgtagtcgcagcaatcatactggttacctcgattgcggctattgtatctcataacgttcaagttggagaacgtctcgaagtcgttcagaaagtgtctaccgcttgcaatcgagatggcaagattaaagtgctgtctgatggcgattattccgaggagcctgctttgcaaatggtttggagcagcatccctgaccgcgagattcttgaatgcatagcggctaataccggaatgagtgagaacaccgtagacaccatagggtattcatcttcctcaaaggagaacgcatcaatcctgtggacagattggaaggcggcatggacgatagatgacgacaccatgtacgccacggttacagtacagtatttgggtaccggcggaggtgctttcaagattaaatcgaccttgaaagattttgtggataaagaagaagaatcttctgataccaccgaagaggaatcggagccacagcctttcaccattggcatgaactgctacgtcacttcaggtgatggagatttgtcggcacatacggaacgcattgatggtgtcactagccaaaacttcagagacacggtatggaagaccggtaaatcagttagttgcaattctgaaggagaggattcaacagccaccggagaaaagagcacgactgattacgaagctttaaagacggcgtatggagaccatgctgacgataccgaatacggcatgggcgttctgtacagtgaatgcgcttccacttcattcattccgctaagtttgccaacaatgggtgaaggccaagcaaaagaactgctgggagcacttgtactgtgccccgatcacccgcgtgctgaagaaatcagacaaaaagctggagccgatacagcaagattggcggaaatccaaaccaaacgccaacaaggtctaataaaggatgcggggacctacaaagtccctgacgaaatgtccaccggcacttggaaaaccatgagcgacaaggtggagaactgctattgggagatgcaggacgcaaacggtcagaccattgacaacaacttcgtgtccgcaggaatagcccagaccatcaccatccctgacggggtggccggattcagttccgaaggctgcggagcttgggagaagcagtagcctcaccaatccataaccaatgaatcccgccctcttcttctggaggacgggattcttcttttcgtataccacgaccattcccgtgcattttctataaattcatcagcatggccggtcaatggctcctgtgttgtcggaatcccccgccagtacttccctttatgaaggagttcaaatggtgatgcttaaacgatccaaggaacagcagtatgtgcttgccgtcatccgaggcaaggctgtggctaccgtggacaccatcgagcgcatcaacgccaaaccaatctcctactggcagagcaatgagtctcttccggaggttgccatactgtacaactccacgattaagcacatcaagaaacgcctctcatactcggtcgagcagccgaagcctccattcggattcccctgcccggttccgttcggcggtttcgatgatgatgacgaggacgacgaggactgatcccacctagggtatttctcacgagcaatctcctttgattcgagggggattgcttttttgtcgttgttccgtactttgccccgctctgggtattgtcgggcgtgtcgcggttccctgtttcccagtcgggagaagggttttcggcgctcagcgaatcgcggtgatgcttggcacgtacacttgtgggtagtagatgagccgacgaaagggcacgggcatgcactccaatagcattagaacacacatggccgaggatggtatacccgaagaggcaagagcagtaggctcttggagcgccagagatgagcactatagggagatagtacttgcgcctctccgtgatgcaatgaagtacaagcccaagatgggaacggataaggctgtatcgctgcctgactttatcagtttgtactcgtcagaccccttgtatcactggatgggacttgacaacgagttaatgtacctcgccgcgaaagcaggcggcggtcagacctctatctataggcaccttggtgacggcatggagcgtctggtacggcaaatctttatagatgagtaccaacttacggagggagaagcgaactggggttatgtcatcactgaggacaatggcactcagacgcacaggacactggatggccgtcttgacctaagcatgattaggtctactgaaaaagcagagatcttggctgactggttgaactccgtgaaagaggctcagggcactcagtttgatctgcaaggggcggtatttgagattcggcaaggctacaagagccaagatagcaagcgcgccaaaggcgatatagttaacggctcccatgcccttaattcggcctaccagatgttcgtcatggtgatgagtatgcagatacctaatgcggtgcgtagccgctatgaacgctcgaatatctgcgtgatgacgggcaatttacaagacgatggccccctaaccagcacctatgctttcttcaggcaagtagtcggctacgacctagcggggttcttcgagaggaactcgcaggtgttccgcgatcagacccacgccattcttacatctattctggaggccaagtgaaccgaactgccttacgacagcgatctgattacacctacaaggcaaacattaaggcgggtcgtcatggatggctccgtcttactcccgcatacggcatcaaccttgtttatggagaactctccaagctgtccgaaggaagccgggttatagagcctttttcgggtagtggtacaactccgttggctgcgtccgaactggggttgtcctgcaatgcacgggagattaacccgttccttgtttggttgggcaatgcaaaactgaattcctatagcaaggaagacggtgaagccagtatagaagaagcgcattcggtcatagccgaggcttctaaattcgaggggctggatggcttatgggttcctcccatgcacaacatcactaggtggtgggatcaggcctcattggaggctctggccgctctccggcacgagatagacgagcgaaacggcaaggtgaggacccttcttgatatagctttctgccgcctgctcataggtcttagcgcagccgctttcaatcaccagagcatgtcgtttaaagaccaagaatccctctttgggtattcacgagaggattttcttcataacgtcagaagctatgcgaccgaagtgaaggatgtcgtggcgaaagctatgaacgacacccctgtggggaaagcttccgtggagcatggtgattccacgttaccgtttacaggatatgaaccggctgatctagtcatcacgtctccaccgtatgcgaatcgcatgtcgtatatccgtgaacttcgtccctatatgtattggatgcgctatcttacttccggggaacaggccggggagatggactggaagacaataggcggcacatggggttcggtcggcactaagttgcgcgcccgcgtctctccgcatgaatcacctatcgacaccacacttagtgaagtatgcgaaaagatacttcaagggaagagcggagagattctatccccgtatgtatataagtattttgacgatatgtggtcacacttcaaagccattacgccagtggttaaagagggtggaaacctatgctatatcgtaggcaattccacattctccggtatcgaggtgccatcgcatacatggtatgcagagatgatgaaagcactcggctaccataatgttaaggccaccgcaatacgtaagcgtaacagcaacaagcagctctatgaatatgcagtgacggcaaccaaatagagccttcgccagtttgtgtggtgaggggagttgggttcggcgtcgtcgccggggtttctgtatcggatgtggaaagggcattcgtctgttagatttgtttccgccaagaaagaaaaccgaacaacagaggaacgcctgtgcccaccatatcagccgatgcgctcaagcgcatgctcaacctgcccgccaacgtcgtggccgttccggtccgcccttacgcgggcgacatggatcggtgcgccagatgtggggagcgtggccggccgtacgaccgtctgggcgtgcgccgctggcggcacctcgacatcggctgcacgaggctcctgctggagcacgcgccccggagggtcgattgcgcggagcacggggtgacggtcgcgatggggccgtgggccaaacgcaagagcgcgtacacgcgtgacttcgagcggcagacggcatggttgagcgtgcacgcgcccaggagcgcggtatcggcgctgatgcgcgtcgaccggaagagcgtgggcccgatctgcgaacgggtcgccgacgaactgcgcgtcgaacagggcgcgggcctgttcgacgggctgcgttccatcggcgtggacgagaccggctacaggaagggccacacgtacatgaccgtggtcgtcgaccacgaccgggggcgtgtcatctggatgcaccaggggcgcggacagaaggtgttcgacctgttcttccaggcattgacgccggcccggcgcgagtccatccgggtggccgccggcgacggggcgcggtggatcgacgagtacgtgttccgctggtgccccatggccgaacgcatcctagacggcttccacatcgtctcctgggccaccgacgcgctcgacaaggtccgcaccaccgcatggcgcgaggccaggaagacgggcacggccgggaagggcgcgaaggacccggtcaagggcgcgcgccgggcgctgccgaagaacgggccggacctgaccgccacccaacgggcacaactggaatgcgtggcgaacaccaacgagaccctctgggaggcatgcaagctcaaggaacgcctgcgcatgatcctcaggcagacggcggacgaggccgcgcccatgccgcgccagtgggccgcggacgcttccctgtcgggcatcgaggagttctcgaaactcggcgagaagatcgaccgacgccgcttcgacatcctgcgcaccatccggtccggactgtccaacgcccgactagaggccgtgaacaacaggatcaagaccaccatcaagatcggctacggctaccggaacctcggcaaccgcatcgccctggtcatgctcaaatgcggcggactcaacctccgactccccggacgccaatagacagtaagcaagacagatgattcacatccacacaaacacccgaagagcctcaaaaatgcgtaatcaccagtgcaccactggtatgccgatgcatctgattggccaaagcgtcgatagttcaccgtcaccgtacgggagtagggagtagagtggcggcgtcgaccgacgcatgttctcgccataatttcaatcccgaaaaggagcctcgtcgcaaccatgacatcacatcttgccgaagcaggacgcacgttggttccccgcaaggaagacagatacggtctgctctcccccgccttggtggtgctgacgttc

SEQ ID NO: 2671 - DNA, 4428 bp, Unknown
  R36_18m  MAG No. k141_4700
ggacgatccgctgaccgccgcacgcaacaagacccgtgagggtatgagcctgcctgtcatgtctaacgagaccgacgcgcgaatgcgtgccgcattgacagcggacggttccggcgtggaagcgtccagcggcatcgacgtggcctgcacgcggaatatcgacggattggacgaatttctggacgacgattccagtaagaacatgcttgacgaatgcgaggagcgattcttcgcatcgctcatgccattaacgacgaaggaggaatgatgcagcagattcctgctgacgcgaacgatgtgatcggccagctttccatgcaggtcggccaattttccaaggagatcgcgattttgaaaagtcaattgtcggcggcgatgaaactgattccagccgacgtgctcgaagccatgaacaaggaggaaaacaatggccgcgactaatgtgcatttttcgttcaaagactctcaaggaaggtcgaagaccggtactttgcatttcgcgccggtacgacgccgcattgccggatcgaccgtggtcgtgcttggtggattcgatgtggctcttggttcggacggcactgtgaccgtacagcttgagccgaccgacaacactttcgcatggaggataaccgaattcccggatgatccggtttgctcgttcgatcgcgtcgtgcaggtgccggcctcttccagccctgtcgagtatacggcgctggtcgatgtggatgcgagtactttggctccggcgcttaacaatggtgcggccttgacctacctgatggcgtccagcttgcaggaggcgcaggccatgtcggcggcgaatccgggtcagatggtgttttatccggagggcagggccaagactgtcgcttctcagattttggaggatttgaccgatgcgcgtgccgtggtggaggctcagagcgccgtgtccgctcaggccgcgaatgccgcccgggccgcgtccgacgccgctcaggccgcaaacgcgcaggtgacggcggtggccgacagcatcaccgaatcgaaggcggtcgtggaatcacatgcgaatgatgctttgacggcgattgacgaggcggtgaagagcgtgaaggataaggcgtccgacgtgtctggcgaggataggacggatgccatgccgaccgattccaccgattccgcctcctctcaggaggcctgacaaatgtctgtactgctcaacggcgtgaaagtcggcctcccgtatatgaccaataatggtgacgtgcctgtgccgatgaacgcgctttacaacggcgtgcaggtgtggccgccagccgccgaaacgcttgtggacgtgtggctcaaaccggtcgatttcacggctcaggcactctatgccgaccatcctgaggtcaaggtggccgcccagaaggtctatgctgacgggcacatcgaggacgcggcgttgacgctttccacggcggataccaccgtggcgggcatcaatgccggcacggtcagcttcgtgagcgacgcttcgaattttctcaccgtgctcaaacaggatgcgttcaacccgtgtcacgtgtcgattgccgaaggcggcaagacgttgggtgccaagcggatcctcgtccagcctgacaagccggcgactgctccgatgggaagcctgtggtgccgcaccgaaaaactccataacggcctcaagtattacaccggcgccgtcgggtctgatgctaacgtcatgtgcttcctcctcgaccgtatccgcgaggtgtggcgcaaggaatgggatgattggaagcttttgacgggaaaggaattgtcgtgagaagaacgaatctgtgtgcaaaacccgctgagacgcttgatgcaaagagcggtgatccgggcaattggaaggacttcataaacgggaccggaatgtctttgcagccgggacgatacgtcgcctcatgcaatattacgaagcgcggaagcaaaaaagcggtgatccaattctgggatgagactcatcacgtgcagttgggtgctgtctggaatggcgtcatcggcgtcaacgtgatgcagttcgacgttcagaccgcttccgacaaatgtaatttttccgcctgcggctgcaaggccacggacttcatcgtcgaacgcgccgacacgcacgctctcgcttcggggggggttccgggcttcttcaccgcaggcaccgcgccgtactgagcttgagggtggaggcggacatcaactccgggtatctgtacctcggcgggttcctcggccggcttggcgcggggcgcggaacgttccagacggtctattttcgtaataaggagcatgagcgtgcagaggattaatcttttccccaatcctgtttttgccggaccgcttaccaacacctcccgttggggtgacgcgaatgggacggtccgtgataatgcgttgcacgtcacgggaaccagaggcggatatggcttcaacgttgcggttccattcaacgttccgctcctcctgtcgatgagagtggacgccagcgatgataacgtcgcgggcttgatgctcattcagacaactgataaggccagcgttaataatatgttgttttcccaaaaattaaagcaggggatatcggatgtcttgtgcagattcacggtcccctcccatgggtttcgattcgaggtaaatccatacggaatccgtgacgtggcggtatcgaatgtgctcatcgaacgcgccgacacttacgacgccgccgtcggggggctccgggcttcttcaccgcgcagaccacaccgtactgaggcgggtgaccgccgatgaggatcaggaaccgttacgccgatccgaattgcgagcggacgatgccaacatggagtttcaagggccaggttgccgtcacacaggacggcgggcactggaaatacagctttcctcgagctgcgagcttgattccgcaaaaaaatgtcagactgtctgatgataaggctgacgcctgcaagcgtatgggagtccatgcgcgtggagaactcggacttgctttactcgtcgtccgatggtctgcgggtcgtggacgtatccaaggagaagcggaatatcgtcagcatccaggcgctgctcgcgttagaggccacgccaatcggcatgtgcttcgtcgggttggacgagtggccgattttgcaggaggttggcgcttgtatcttcgccgtcgacaccgcaccctactaaacattttgggggtggccgcgtgaggatcaggaaccagcatccggacgcgcacgctgcccagaaagtctcgacatggaacctgttggccgagccggatggaaaaggccatgtgacgtacacaaacgtcggcggccccggcggcgacttcgggacttttcatgctttcagagacacgaagctggaaggcatgacttacctgctccggacaagcggatattgctccaagaggcactttaatctcctgtcggacggatcgtttgcctgtgacagccctcagctgaaggacagcgatgtgtgggtggacaagggcaagtcctgcacggcgatcgaatactgcatcgtcgcgccagcggagttcaatgtcctgcaagcagtcggaatcggatgcttcaccggggacaccgccccctattagcctgctgcagaatgctggcctaccgtccgtgttcgccgcctctgaccacccgtattaaacaaaccacagccccgccgtgtgcggggcttgttcgtaaggagatgtaatgtgctgcaaaattttctagccgggttcggcggcgtgggcggcgcgtgcgccatcatcacgctcggacttaaagtctggccgggcgctttggacgcgctggccaccggcctgtattcgcacgtgcggccggaacgattgccctatgattcgccgctctcgcagcatttcgccaaaaccagaatgctgggcgaacgtactgcgaaattcgatgaccgtatggacgagttgtgccgcgacgcgatcaagaacacgatcatcagcctgatctacggcgaccagtcgcacgaccattcggaggcagtccgatacgagctcgccaaactcgaaaaactcgacgcgcaatgctggatagtcaacgccgccgaaaaatacttggaggaccggcaatgagcggccccgtcgcgttggtcgcgtatctcatcctcctcgcgctcatcatcgtgtccaatcatggtgcgcgcaggcattgattttcacactggttttcaaagccatcccatttcggggtggcttttttattgccccttgactcggggcgggaaggagaggatgtgaagatcctcgacaaaagcaagcataaacacggacgcctgcaccggcgcgtgggcgtgacgctggccgcgctcgtcgccgcggtctccatggcgtgcgccccggcggcgatggccgacatgcagggcatcgacgtgtccaactggcagtgcggcatcgacatcgcc

SEQ ID NO: 2672 - DNA, 3340 bp, Unknown
  R36_18m  MAG No. k141_4878
agtgttgcgtcttcaatggcgccaatgtcctcgccctcgtccagtttaaaagcgctgaacgcgtgatgttcgggttcggtcagtggcatatcggccacaatcacagtgatattgtcggttccgcccgcatcgagcgcggccgccaccaaggcgtccacggcttcctgcggactggaatgcgctgcggcgatggccgcaatctgttcgtctgacacttcaccgtgcaatccatccgaacagatgatgaaacggccggtcagatcggcaacatatacgtcgggcactatgccgtccggatcgcccaggcattgggtgatgatgttgcgtggaatggtcgcctccgcctcttccggcagcatctgaccggaatcgatagcctcctggcgttgggaatgatcccgcgtgatgcgggtcagcgaggaggcgtcccacacggggatgatatccgtggcgggggcatcggcatccggcagcgggctgagatggtaggttcgggaatcgccgacattgaccacataggtctggtccgagaaatccggggagtcggcgtcgtcaaacggagctgcgctgtgggcattgatggcatctgcgtaaggctggggcaaaaccaggccggagcaggtcgtaccggccacgccgccgagacggtcacccaaatcgagaatgtcgtgctgagcctgtgccagggtgtcgtcgatgtcatggcgggtgcgcgagggcatggaagccagctgcgcgaaatgctgggcagccaactggcttgcctgctcgccgcctttgccgccgcccatgccgtcgcagaccatgaacacgccctgttgggcgaatccggtgtcttggttgttcttgcgcctaagacccacgtcactggtcatcgcgatacggatggagcctgtggtcatgacgtcttccccttcttacgcgcgcgcttgacatgcgtcgtgtgcgacttggctgcgtgtctatttgacagtatagccacgcttttcagggaaagtcgtgtacgtatcctcctgaaacgcggcaaagaagtgagcattgccttgcgcaattggtcgactcctgtccaatatgtggtggcttggcccgattcaatgtcttgccccgagaacgtgacgtagtcggcttcccggccaagctggatcaaagcctggtcatctgtgccgagttgacgggcgatggcaccggcctgatctcgacgagtgcccttggctgtgatgccgctttgctcggcaagcatgcgtatggcattccaacctgctgccacacgggctttcggactgccatgccgccgcgctcgcgccagcagcatggccttgaacatcagaatcagaccgcaggcgatgagtagggtccacaatgggctgccgtacagggccaccttgcgggtcactcgccagaaccgcacccagaacaggttggtcggcgaatcatcggcgtcggcgccggccaatgagctttggcccctggcttgcgtctgatcgcgcagcggatcggtcaacggcaccggtggttgccggaccagcgtctgcggattcggcggcgtcaggttctggttttcatcaggcaccttggtctccttgggcgtcggatagaacgccacccatcccaggccctgcaatttgatttccacccaagcggtgacatcgttgccggtgaattcgattttggtgccattgcccgaggtcttctccgtgcgggcatcggtgatttcgccatcctcgtttttcggcaggaagcccaggaccacacgggagggcagtcccagctcacgagccatcagtgccatggcggaggcatattgctcggagtcgcccaccatggccgtgcctgccagcagcttgttgatacggtagttgccatggccggcatcggagggataatcgccttcgagtccatgagagaaccatccggagtctttcaatgtgtcggccaacgccgtggctgcggcaccgcccgaggactgtccgccggcaatggacgtggccagtttgctggccgaatcgggaacatcctgggcttccggttgggtgatgcgggccgcggccgcactgctgatctgcttatcggtgggcttgcgggcgataatgccggattcggtataggtgaggcttttacgcgtgccggcgggaataatggcggaatcggtatccgtgttgtagtagaacgtgtcattgccgttgtcggcatcgttggcgaagctcacgccagtggccgctcccgccagcggcagccaggtgtcggtcaatccctgatcgacggtgaaggtcgcagtgaaggattcgccctgctcatccgccttgatcgtggtgcccacgcgatgataattcgaggagtccgtggcttcggaagaatcggacaggttccatactgtgccatcgaatcgatccatcaccgcaagtttgaccggtgttccggccggcagattatgaacggtcagcaacacgtcttttttgtggtccttgatataggatcgcatgccgctgagcgggctggtgtaatcgtaggggcttaacggcggatcgtagcggtcacgcagcacgaaacggtcctgcggcaccagcaacgtgcctccgaaagcaaggccggcagcgagcacgacgatgatcagcgcggatatccagcgcccccattccagcagttcaagacgccaagacagccagataatcagcagcaaggcaaaggcaatgccgcagatggcacgttgccagccgctgtccgtacccagcagagcacatacggccacggccgccgcaaggggcggcactcccaccagagacaaccatgcgttggcattaatggcaaacacgccggtgaggaacgtaagccacaggccgatggtccataccgccagcagcacgccgtcttgcgtgcccagaggcggatcgacggaaataatgtacttgaacgagccaaacgtcatttcccaacctgaactcaaggtcttcaaggtgggaatcacgtaatgggacgtggtggaactcagcgttaccaccggaccgatgatgaattgggcaaacgccagaaacacgatttgccaccacagtcgcaacgccggcaacatgcccgccagagcgatgatcgcgcccagcaaggtggccggtacggcggcgatcgcccaagtggccacgccgccgtacacgtcgatgagattggcttgcgccagcaacatcatcgccgctatgagtacgaggctggtgattcgtttgccccacggctggcgactgaggcccatgccgcgaagcacattgcctctggtcatccagataaccgaatgtgtggagtcggcccaggagccggtggtggtggaggttccggtgtacgtgccggaggaagtgcc

SEQ ID NO: 2673 - DNA, 6941 bp, Unknown
  R36_18m  MAG No. k141_5007
gaccgtctggtggcgttgcaggagcagatcaccgaagagaacctcgccacattcgagggccgcgacgtcgaagtgatgatcaccggcaaactcggcaagaaggacaccgacacccaccgtgtcaccggccgcgagaaaaccggcgtgctggtgcacatcggcgtgcctgaaggcgaaccggtacctgaaatcggcgatttcgtcacggccaccgtcacacacgccggccgccataatctgcttgccgaccccgacgtggccgccggccagacctattccgtgcggcactgagggggcgtatatgacgcaacgagtcgtctccatcgtcggtcccaccgcgtccggcaagacggggttgggcatcgccatcgcccggcgtctggccgaagcgggggagcgggccgaaatcgtgaacgcggacgcctaccagatgtaccgtggcatggatatcggcaccgccaaacccaccgccgaagaacaggcggccgtgccgcatcatctcatcgacatcatcgaccccgaagacacgatgagcgtggcccgattccagcagcttgcgcgcgagaccatcgccgacctgcaatcacgtggcatccggccgattctcgtcggcggctccggcttgtacgccagagcggccatcgatgacatcacctttcccggcaccgatcccgacgtgcgcacacgtcttgaggaacgcgagaaaaccgagggtgccggtgctttgttcgacgagctgcgggccaaagaccccgaagccgccgcgcgcatggacccacgcaacccacgccgcaccatccgtgcgctggaagtcatcgagcttaccggcaaaccgtattcggccagcctgccgcgctaccggtacgtgattccgtccgtacagatcggactcgacctggaccgcccggatttggaccatcgcatcgacctgcgcaccaagcagatgtatgacgatggattcatcgaagaagtcgaacggctgcgcccgcatctgggtgccaccgccgtacgcgcgctcggctatcagcagatcatcgacctgctggacggcatctgggatgtgaacgacgccttcgcggacatcgcacagaaaaccaagcgactcgcccgcaaacagatgggatggttcggccgtgacccgcgcatccactggctgcaggccctgaacccgaaactggtcgacaacgcgatggccattatcgcgcacgccgacgccggcgactacgacccgatcgacgcccgagccgacgaatacacccagcatcatctgggcgatatcacggcgtaggaatcagccaaaggccggtgcaatcacccgcaatcagtgtgcaggcccctgattccagccggcgatcaagaacacgcgcgtcggattcgccgggcgtagtatcgcgtcgaacatcgtctccagtacagacgtgtcgccccgatatgccgagtgcttggcggagcgatactcctcgcgcgtcactgagccccagtcgagatcccagccggcgtcatgcgccaagcgtgaaccgaatatacgcagcaccatcgcattgccgccacggaacggatgcagataaccgagctcatcataaatagaagcgaacgcgtgaacgaacacgtcgcgatccaacgcatgcaggttgcgcttgtccgccaactccatcgcgatgttgtgcgcgccggtctcaatgagcccagccgggaagaacgcctccggattcgcggcccgagcccggtcgttcgtcacctcgcgtgtggtgtttgaggtacgcaacttgcccgcatcctcgaacacgccttcgaacagccccttatgaatggcggtcaactcgtccaagtcgccagacggattccaccgacgttccgccaacaacacggtacgtgcgaacaccgcatccgcgcgatccgtggcatgatcatccagactgccggcagccagacgatcctttccggcagggtcggcggcggcgcgcagacgcatggcggtctgctcgtccgccacgtcgatgagatgggtcacgggctccaagccacgttcgtaggcaaccgcggcgcgcatcgttgcctcgcccggcgtcatcgcttccagtgcgcagttcttgagtgcaaatgcgactgcgctcgcacgctctgcgggtgtcatgcaacccatgataaggcatattcgcgccccagcggggaatcgactcagacgaacgcggcgaatcggctgtcgggattcgtcaatcgaccatatcgtcacggtgtcgtcaccaaccatgcacccccgtactagtagaatcagacccgatatggcacgaacagcatcctccaacagcaccaaaccccgtaaatccaaagacaacgggtctacccatgatggcgaaaccaaggtccagcccgagcttgacctcgaacctgagccgttgtggaagaagatcctgctcgcgattccgcgcgcgttcggctccggcgtacgcgccgtcaccggcgtcggcgaatacgacccagcctaccgtcgtgacggtttgtgtttcctgctgctcgtgctcgccgtactgttctgcgcgtccgaatggttccgtgtcagcggtccattcggccagctgcttcacgccatcgcggccggtgtgcttggtctgatgagcgtcgtgctgccggtgttgctcgccgccgtggccttccgactcatgcgcaattccggtaaagggtccaataacccgcgtgtggtcaccggttgggtgctgctcatgtggtcgatttgttcgatcatcgacgtggcgatcgccgccgaccacaccggattcgacatcacgattctgcaatccgccggcggcctgttcggcttcttcctcggctcaccgctcgcctggggcctttccaacgtgttcgccatcatcattttcgtggtcgtcggcctgttctccttgctgatgattaccggcacccacgtcaccgatttgccggaggatgcgcgcaaaatcgcagctaaaatccaacgcaaaccgtatgtgccgatgggccaggaggccgacggaagcgccagccagttccccaacgaggtccgtgtgggagataccacactcgcctttgccgacggtgttccctcgcatgacggcaacgacgacggcaacgacaacgatcaggccggcgatgcacggcccagcctgttcgcacgactgttcggccgcaaatccaagaccgaagacgacaaaacccttgacaagtatgctgccgacgatccgttcgaccgtgccgccagccagcatggtgccaccgccgaaaccccggtggtcgatccgatgaccggcgagattaccggtgcgcgaaccattgcatcgtcttcgtacgacggtcgtccgcacctatccagccctgcgcctgctgccgatgcggatgatggcgacgcttcccgaacccgcgtcatcaccagtggccagaccatcgccatgcccggtgggggagcggtagacgatccgtgggcacccagtgccgcccaggccggtactgtcgcgctcgcaggggcagccggggcgatgggagcggccggggccgccggtgccgcggccgcggcagccgcgaccggagcctacgcaggcgccgatgcggatggcagcggagtcggccagggcgtgcccaatacggacggacagccgaatgccgccgccggcaacggtacagacgacgacgccaataggccgtatcagttgcccgacctgaacctgctgaccaaaggtcagccccatgcgatgcgcaccccggccaacgatcgcgtgatccgggcactgacttccaccttcgaacagttcaacgtggacgccaaagtcgtcggcttcctgcgtggcccttcggtcacccaatatgaggtcgagcttggccccggcgtcaaggtggagaaagtcaccaacctgcagcgcaacatcgcctacgcggtggccagttcggatgtgcgcatcctttcaccgattcccggcaagtccgctatcggcatcgaaatcccgaacgaggatcgcgaaatcgtgcacttgggcgacgtattgcgctccgacaaggccgtgggcgacccgaacccgatgctctccggcatcggcaaggacgtcgaaggccacttcgtgaccgctgacctgaccaagatgccgcacctgctggtggcaggtgccaccggttccggtaagtcgagttttatcaactcgatgctcacttcgatcatcatgcgtgccacgcccgaacaggtgcgtctgatcatggtggaccccaagcgcgtggaactgtccgcctacgcaggcatcccgcacctgctgaccccgatcatcaccgatccgaagaaagccgcacaggccctcgaatgggtggtcaaggagatggatgcacgctactccgacctcgaattcttcggattccgccacgtcaaggacttcaacgaggccgtgcgcgccggcaaggtacatgcgcccgccggctcccagcgcaaggtggccccctatccgtacatcctcgtggtggtcgacgagatggccgaccttatgatggtggccaagaacgatgtggaaagctccatccagcgcatcacccagctggcacgagccgccggtgtgcatctggtgctcgccacccagcgtccgtccgtggacgtggtcaccggtctgatcaaggccaacattccatcccgactggcgttcgccacctcgtccgccaccgattcgcgagtcattctcgacacggtcggtgccgagaccctgattggtcagggcgatgcgctgttcctgccgatgggttccgccaagccgattcgtgtgcagggctcgtgggtgtccgaatccgagattcgcaaggccgtggagttcgtgcgcacccagcgcaagccgaaataccgcgaagacatcgaacagatggccaaggaagccgaaaagaaagacagcatggagcccgacgaggagatcggcgacgacatggacgtgctgctgcaggccgccgaactcgtggtcaccagccaattcggctccacctcgatgctgcagcgcaagctcagggtcggcttcgccaaggccggccgactcatggacttgctcgaatcgcgcggcgtggtcgggccgtccgaaggctcgaaggcccgcgaggtgcttgttcagccgcaggacctgccgcaggtgctcgccttcatccgaggcgaaaccagctcgctcgaagccagcgccccgcaacaacccgaactcggcgaataattcacccatcgacctccctctgatgagggaggtgcccgaaggggcggagggagagaagcgcggacagcatcagcacgaaacctgattcccgaataatagcagtcaatatccagccaccactcactcaaggtaggagtatgggggtaacgtgaacactatggatgagaacacaatggacaagcagtcatcgcccaaatcatcgctgttcgacggatggaacgcgccgccgaacctggtcacctactcgcgcatcgtactcgtggtgattttcctgacactcgacattctcgccggttcctggggtgaggacaacctgatcatgcgttgggtcgccgcggtactgttcatcatcgccgcgtccaccgataaaatcgacggttggatggcccgcaaatacaatcaggtcaccgaaatgggcaagctcatggatccgatcgcggacaagctgctcacttgcggcgcaatgattgtatgctccgcgttcggcgagctcggctggtgggtaaccatcctgttcctgattcgcgaaattggtatcaccgttatgcgtttcttcgttatggagcgtccgggcggcaaagtcatcgccgccgcatggcccggcaagctcaagaccgtattccagtgcgtgggtctgtccatgctgctgctgccgttctggtctctgggtaacggacaggccacgccgttctggatgaccgcttactacttcctgacctacgccatcatctacgtggcattggtcctgtgcctctactcgggtgccgtgtacctgtacaacacgttcgtcgccccgaagcggaagtgacggatattccaatgcaggaattgtgcgacagtctcgcggccggcatcctcaagatctgcgaggcgaacaatacgaaaatctcctgcgctgaatccctgaccggtggcctgctcgccgatgcgttcgtgcgtattcccggtgcctccaacgtgttgctgggctccgctgtcacctacgacatcaatgccaaggcctcgatcctacacgtggacaaggccctattggatcgagaaggcgccgtacaccccgaagtcgcccggcggatggccatcggtgccgctcgcctatacagccagccggaatacggcgaccgaatcatcggcctttccaccaccggcgtggccggccccggtccggacggtgataagccggccggactggtgtatgtgggcctgcgcatccccgcaagcctcaccgcggaccatgccgaagtgctcaaagccgtcgaactccatcttgatggcatgcgcgaagaggttcgtcgcctcaccgtattccacgttctgcaaaacttgagtctattcacagcaagttttaaggaataaaaccgcgggaccgtcgtgttgtacatagtggaaacactgaaccgaccttggaaggggcgatggcgatggaaacgatgacccgagtgaacgaacagatggatgtggccgccaagaagccgatggctgtgcagccgggtgtcgcccgtatgcgtgaactgactccggcccagcgccgtgcggtgatgttcgcccagcagcaggtgctcaaggcgcaggctgccaagaaggccaaggatcagcgtcaagccgttcgtgaacgtatgtgggatgaggattcgccgtcgtacaagccgactgccgccgccgagcccgtggtggttgaggaggagcctcgcgtggtttcgctgcgtggtgctatcggctacgtgctgcgcgaactgcgtacgcgcgatcgcc

SEQ ID NO: 2674 - DNA, 4635 bp, Unknown
  R36_18m  MAG No. k141_5054
aagccaagaaaatgaggcgtatggcctatattggtgtctatgagaagcccacgcgaggattttgaggcggcaggcaagcgactgccttgggatgctgctgctcgcaatgcagcgctgtccgccaccgcgccagtctctgacgtcaaggcatccgccaatggtgccgacaatgccagcaatgccagcaatgctgaacattccgatgacatgcccaccgtgccgattcccgcacgcaaggctgccacgacgttcgacaccccctccaagcgtgagcgcatcgaggtcaagccgccgatcacccgattcatacgtcgtgccatcacccgcgtgttcggcgtatggtcacacatctccactcaggtggtgcgccaatggggctggtatccgcgagtggaaccctatgtgggttatggcaccggcgattactcgcgcctgatctgccgcacggtatacgcccccaagcatgcgcaatccggcgaactgatccgcggcatccgcggcatgcttgccgtgcccgcgccgcgcacccacgtgcaggccagcattgatgacacgccgctcaacaccgtgcagatcggcgtctccgaggtctatgacaaggtggaccgcacgcgcgatctcggcagcgaatacgccatctccgattccgccggatacctcgacctcgtggccgagcatcgtctggtgcccggcatccatcgcgtctcctacagcgtggccaaccgcaaacccgtgagcgccaacctgtacaccatccccgccagtgccaaagtcggcatcatctccgatgtggacgacaccatcatgatcacacaggccccggtgccatggaaggccgcgtacaacctgctgttcctcgaccccaagaagaaagcctccgtgccgggcatgagcgtgctgttcacccgcatcgccgacttgttccccggcgcaccgttcttctatctttcgacatcgccctggaatgtggagagttcgattcgcaacttcatcactgaccatggttttcccgaaggcccgctgctgctgcgcgacctcgacccgaggcccaagaccttcgtgcccaccggcccccagcacaaacttgagtttgccgaacaacttatggccgacttcccggacatgaagttcattctggtgggcgatgacgggcagaaggacccgaccacgtacgccaccatcgcccgcagatatcccggacgtgtactggcgatcgtcattcgtgagttgagcccgcgcgaatcaaccggattggcgtcggtgacgggactcacctcgacccagccgactccggtaaccgatgtaccagtattcaccggcaccaccggctcgaacattctgaagaccatgctgccgtatctgaaggcggtgttgcgataagcgcggcgtgatgaacgccgaatgcgtcctggtgtggtgcctcgcctataatcgcgtggtatgactgacgagagcacaaacgccgcggccgcgatgccgccttacgccaagcgcgagccgaagcgccgcgaattccacggtgacgttttcgaagacgattacgagtggatgcgagacaaagactccgatgatgtgcgcagctacgtagctgccgaaaaccagtactgcgagcgtcgcatggcgcatctggcggatttccggcatacgttgtttgaagagctgaaatcgcatgtggaagagaccgatatgtcggttcccacgcgcgtcaatgattactggtacttcacccgcacgcagcagggcaaacagtatggcgtgcaatgccgcatccccgtgcgcgatgccgatgactgggacccgccggtcgtggatccgcaaggcgcgcccggctccatgcccggtgaacaggtcgtttttgatgcgaacaaggaatccgaggggcatgacttcttccggctcggcggcttggatctgagcaaggacggccgttggatgctgtacggcgtggatgttgcgggagacgaacgatatgatttccgcattcgcgaccttgccgggctggagaccggggagccggtcagcgaactgcccgaacagttcaccggcattggcagcgcatgcttcacgccggacggccaatgggtgttctgggtggaattggacgattcctggcggccgctcgccgtgtggcggcatcgtgttggcacggcggtcgaatcggatgtgtgcgtgtaccgagaaaccgatgaacggttctgggtgggcgtcggcatcagttttgatgagcgcaatatcgtgatcggcaccggttccaaaaccaccaccgaagtgctgatgctgccggtggccacgcctgaaggcgaattccaagccttcattccacgtcagaacgatattgaatatgatgtgagctttgcctgttttgaaggcgcgggggagaacggtgcggatgtgccactcgccgtggtctaccacaacgccgccaatccgaatttcgaaatcgacgtcattgacatgcgtggccatgagccgccgtaccgactcggcgaaggcgtgtgcattgccgccgggtcgccgtacggctgtgaacatggtgagccggataagccgattaccgaggcatacttcaacgccgccaatccggcgatattgcagggtgcccacggtctgggcatcgaaggcatcgcgttgcatcgcaactttgtgtccctgagctaccgtgccgacggccagccgcacgtggcatacatgaccaagagcgcggctgccgccgacttcctggccggacggccgtggcggtttacggaactgctgccgcctgccctggaggacgactgggacatggtcgccgccgatcgcgaaaacttcaccggcgatcatggcgagatcttgtggaccgaagatgaggcccccacggatcacacgtcatcttccgatggtgccagcgacgaccacctgcccggtgagacccggcgcttgtacaccatcggcgtcggcggcaacccatcgtatgaggcgccgcgcatgcgctactcgttcgccagctacacccgcccgggcgagctgcacgaaatcgatcccgccaccggcgaagatgcgctgctgaaacgagccaccgtgctgggcgacttcaatccacgcgattacatggaacgccgtgtgtggattaccgcgcgcgacggcgaacgcattcctgtttccctcgtctggcaccgcgattgcccggcgcaggattcgccgatgttcattaccggatatggtgcatacgagatttcctccgatccggggttctcggtctctcgtctgagcatgttggatcgcggtgtgctgtacgccgtgccgcacattcgcggtggcggcgaaatgggacgcgcctggtatgaacaggggcgcagactgaacaagaagcattcctttgaggacttcgtggacgccacgcgcgcgctgcagaaggcgcatttggctgatgcttggcgcaccgtggccaacggcggatccgctggcggcctgctgatgggcgcgattgccaatatggcacccgaatgctacgccggtgttgaggcggatgtgccgttcgtggacgcgttgacctccattcttgacccggacttgccgttgaccgtcaccgaatgggacgaatggggagacccattgcatgaccctgaggtgtatcagtacatgaagtcgtacacgccatacgagaatgtgccggtcaccgtgctcgagggcggcgacgacgaggctgccggtgacggcagtgctgatggggctgccgccggcgcgctcgccgccgcgcaattcccgagaatcttcattaccacctcgatgaacgacacccgcgtgctgtacgtcgagccgctcaaatggctggcccgtctgcagtccgccggcgtggatgcggtggccaagattgaggtcgaggccggtcacggcggcctatccgggcgttacaagcaatgggaagaggtttcctatgagaacgcttggtgcatggatgtgatggggctcgctcattaggtcattctgtcgttcattaggtcggtgtcctcttctatgtgagactgaaatgccgccatttcagtccctgaaatgaacccacaccgacctaatgaacactaaaatgacctaatgaatgtctcgacacgatacgcatgttggttgtgtccactagctgagcgggttcgggccggcaggtggtcgcgcgagtaggctccttgaactatggcaaagacatataaaatcgccgttattcccggcgacggtattggcaaggaagtcactccgtgggctcagaaggctttggaaaaggccgctgaaggcgtagctgacttcgagtacgagaacttcgacttgggtgccgagcgctatctgcgcgatggtgcgatcctgcccgaggacgaagaggagcgcatcaaggccaacgacgcgattctgctcggtgccgtgggcgatccgcgcatcaaggccggcattctggaacgcggcctgctgctgaagctgcgcttcgacctcgaccagtacgtgaacctgcgcccctccaagctgtacaagggcgtcacctcgccgctcgccaaccccggcgacatcgacttcggggtggtgcgtgaaggcaccgaaggtctgtactgcggcgccggcggcgcggtgcgccgcaacaccccgcaggaggtggccaccgaggtgtccatcaacacc

SEQ ID NO: 2675 - DNA, 2849 bp, Unknown
  R36_18m  MAG No. k141_5249
gagccgcccaacagcgtacgttgcacggcattgccggcttatctgccggtatcggcacagcggtgatggtgattaccgtgctgttgtatggctatatgagcgccgtaggcgtatcggctgtattggttatgcctcaaccgcagttgttttcccttgggtggagggcattgcaggtgctgaccgtgctgttggtcgtgctgttcgcgtgggaactggaacgtatgtggcggtatcgcgccagcattatcggcgtgcgtcgtgtcatttgcgtgatggtgacactggctgcacttgtcacattgacgatattgtctttctgggggttgttcagtctgtgatattcacggtcgttaccggctccttcccgaatatgtgccactgagtcgccgtgagcgtcacaaattcgggaaggtggatggggcgtgacggcgtggaggcactgtcgtcagcgctgagcggcttcagcctcatccaaagtgtcgaaaccgccgagctggactgtgtgcaacaaggtttcctcagtgatattgcgttgcgggctggctgcggcgcgctcgctaatcatcacctcgtagagctggaaggtccgttcggaatacgtaccaagctcgccgcgcagataggtttcgaatgaggtggcagatggtgtgtcttcggtggtggtgagtacgcgcatcgcctcgccgagcttggggtagcgctcgcggaaatccttggcccaggcgacttgctgggcgatgacctgttcctgacgggccacgcgctcttcagagggacgcggaatatacggctctatgttcttcgtgaaatcttccggcgcggtggaggccatcatgcggccgtatttttcggtcacgaggttgcggcccacgtggtcggccgcgtcaagatcagcggcatagctggtgagtaatggccgctcccatgtgaggaactgggccagccgcatctggtggaacaccggccagttgccttggcatgccgcgcgtccaccctcattgttggtgcgctggaactgatcccattcatggcgcacaatagcctcgcgcagttcatcatcagtcagttcgttggtcatcgacgttcctttcactaatatctccctctgatgagggagatggcacggcgaagccgtgacagagggagggaagcggcggctgtactgaggtccctccctcagtacagccgcaggctgacagctccctctgatgagggagctctaaagcgccggatcatcagagggagcttgaatctacaaacttttaagcaccggatcatcggagacgatgtggtcctcgacatacgggcgctgccattcgaggaaggtctcgccggacgtggtcaggtgttcgcgtttgagttccctgacgatatccaccgcaatctgctccacaacatcgttgattttctcgattgctggagccgcgcccttgccgccttcgccgaatccggccccgccatagcaggctgtcgaactcaatcgcatcacggtttccaactgttcgcccacgttcggcaacagcgcgaacatcgagccagacagcttgcgcaatgctgcgaactgccacttgtaatacggcatatagcccaccaccatcggcacgttaaccaggaacaccaacgaggcggtggcctgcacgaactcgtggatggacagccatgcggccgcgccgtcgccgcgcttcaacgaacgcggcagattatattgaccggcctgggcgatcatgccgagtcgcttggagatcagcgcgagccgcacatcgtctggcatgtttttgaacccttggcgcgtcttggaaaacagaccggtgggatcggcgaacacctcgccattggtggcggcggccaaggtcgattcctgaagcatcagccactcgtgcggcgcggtctgcgcgggcgcagtgcgatacccggtgatcgactcaaagaagtcgccgatgcggaacacgccgtcacggcgattcgcgccctgtgcgcgcggcgtgacgggggagagcggtgcatcaatcggagtcgtcatcgcttccgccacatcagaggacgccgcgcctgactcggcagtggcggtatcgtccgtagcggtgccgggggtgggtgcgtttgtcgcatcgggtatgacggtggagcctgcacctgcggaggggaatgtcccggaagcatcggatctggcatgcgcctcgaacgtcacgcggccttgcgcatccacgctgaacttgcgcggcagcgcctcgtaatcggcctcaagttgctcgccgatggccgcgtaatcctcatccgtaagccacaggcagaagcgcgggccgaaatcgtggtcctgcgaatacgcatcatcgaatccgtagcattccgagccatgacccaccagaccggcggcgatacgcccggcatactgcggatacttcgccgcaatcatcggcttgcccatctgcgtccagaacgcgcgggccagcttcagtccggacaccgggcatgcggaaacggcctcggccgcgcccgcagaaccggtcgacaccgaaacggtggatggggaaaacgccgcgttcgcaccggtctcgggtaacgcctgcgccaatgcgcccggcgtatccgcgtccacggccgatgacgcggagccgacctgtgcctcgacgcccgcaccggtcttgccctgtgccgggctgtccggcagccgtgatccggactggggcagcgcgcctgcatcgccggcaacacccgcattgtcaaccgtcaccccggccttcgccgcctcttcctcggcctgccgcagattgtcggcggtgatacgccagtaatcggtgtccttgccgtaacattcctcgatcacggccagcgcatgccggtatccagta

SEQ ID NO: 2676 - DNA, 7705 bp, Unknown
  R36_18m  MAG No. k141_5460
acgggcgcatcggctgcctgcgcggtgactgcaccgccggtggccagtgtggcgaccgctgcaaccgcgccgattgacgcaagccaccgctttcgtgttgattgatgcattcctgcttggacctctccgccccggtctttcacgtcttcgctcaggctacgtcgcgtctatgcgaccaggacttcttctgtggatgctgggccgcagagcccgttctccatcagtttcctttattggttattgggttcaccggaatgagtgtcttcagtaaatctggtgtgatatccgccatgggtatcccggttggagcaattcaccgaagctgattccacatcataaccgagcgaatacggtttcacaactttccctcagtgatatcaaccatcttatacaacaaaaacccggtaatttctcagctttcgcatttattttcgcattagggcattgctgtgtttcgccgtgtcgcagtacctacggcgcaacgattcagcctcgctgaatcaggaaccaacaggctcccgctggcgggagctggctcgcaaagcgagactgagggtggcttacacggtaccgcttatgaccaccctcagtcgactccgccgacagctctcacagcgggagcatataattaaaaatctcctgcacgggtattaccccacacaggagacctcattccccggatgtgttttcggctccaatcgatactgacatccggcctatgccgtcatcgacttattgcagacgatggcggcataagtattattttgccggccagttgcgcgcaggccggcatatcgccgatatttatcgacgctggaagacacgcatctcgcctatctcgcggttggcccacgagtagtacggcaccaagcgcagcgtcgcgggttcgcccgcacgcggttcgtcggcatccacgtacagcggcgcgtcatcctcgtcggcgtgctcgcgcactgccggcaaatcaacggtatcgactccacccagcaagtcggcctggaaagccacagcggcatccgcaccggtgacgccatcggccagacgatagttccacaaatcaccgggattatcgacctgttcggcgcagtagaccagcggtccgcgcatcacggccacctgaccggcatcggagcgcacgcgggagttggcgcgcacgaacttcacggacatgtcgagctcgagcgcaatctccaacgtatcgccggcgttgaccacaaggtatacgaagccgtcttccagcgaacccactgcgggcttgccgttcacggtcagcgtgtaggagccccgcgaccagccggggatgcgcagtccgaaacggaccgagctgtcagtggcgctggcgggcaggctcaccgtgtattccacatggccatcccacgggaagttcgaacgctgctcgaccgtcagaccggaagcgaattcggctgtgttggcgatgaactggtggctcagcacggtcttgccgccgtcgcgctcggtgtagatgtagcggtccacggaggcgatgagtcgggcgatgttggccgggcagcaggcgcagccgaaccagtcgacgcggtgggagagcacgtggtgacggtccgggttatccagtccgtcaggcgtggtctccagtgcattgacgtagtagtactgcttgccgtcgagcgagatgccggcaatggaaccgttgaacagttccttctccagcacgtcggcgtattcgcccttgggctcgaggtcgagcatctgctgggcgaacatgctcatagccacggaagcacaggtctcaccgtacatcgtgtcgttcggcagatcatagtcgtaggtgaacgactcgcccacgtgggtggaaccaatcgcgccggtgacatacatacgacgggtgacgatgttcttccagaaacgcttggcggtgtcgatcagtccccgatcgccgagcagtcggcccacatgggccacaccagtgcacaggtagccgacgcgcacggcgtggccatccgcggtctgctggtcgcgcacaggttcggcggcctggaagtaggtgggcttgtagaagccgaggtcggggaagatgttgtcgccgttcagggccttcagctgcttggtgtagaactgagggtcttggccgcgcacgtcgatgaggtattgggagagcgtcaggtaacgcttttcgccggtttcctcgtacagtttggcgagggcgagttcgatttccgggtggccgtcggcgccatgaatcttgccttcttcgggcccgaagttggcatccaggcagtcggccatcttcttggcgacttcaagggcctgctcgttgccggtcacctgatggtaggcgacggcggcttcgatgtagtgacccatcacatacatctcgtggctttgctgaatcaggctgaagcgcgggcggtcggcccatacgccggacttgatctggtacggagtgtccaagtagccgtccggctgctgagcgcgggcgatgagatcgaccgtgcgatcgcacagcgccttgagttcgggatccggatggtaggccagcgcataagcggcttcctcaagccacttgtagacgtcggaatcctggaacaccatgccgtggaattcgtcgtccaattcgccggcggcaaccttcagattggcgaccgcgtggcttttgctgtcagccagctggttaccggccgggtcgtcgggcactgtggtgtcgatttcgtcgttcatcacgccccactggtaggggatgacggattcgacaatctggtcgcgacgccgcttccagaacggggaagtgattgtaacgttcatgatcagcccttcacggctccagccataaagcccttgacgtagtacttctggagtgcgaggaacaggatggcgcagggaatcagcaggatcacgacgccggcctcagtggcaccgtagtcgataacacccatggtctgctgacgcatgttcaccatcgccagcggcaacgtggacttggacgaagagctcaagtacagcggaatcatgaagttgttccatgcctcgaggaaggcgagcaggccaaccgtaaccatcgaaggcttgaccaccggcaccaggatcttgaacaaggcctggaggctgttgcagccgtcgaccatggcggcctcctccatgtccttggggatcgcgtcaaatgcgttacgcatgatgaacgtgctcataggcagctggaacagtgtgatgaccaggcccacgcccagcaggctgtcgttcaggccgatctgcttgtaccagaccatcagcgggatcaacagcgaggcgtacggcaccatcaggatcgacagggtgaccatgaagccgaggttgcggcccgggtagtcgaagcgggagaacgagtagccggccagcgtacagacgaccacggagaacacgaccgcgaccagagtcacgattaccgagttgaacaggtacttgggcagaccttcctgataaccgaacagggtcaggtagttggccacgccccagcccttggactgggccgaaccggcctgcgggctgaacgagcagatgatgacccagaccagcgggctgatgaagatgatggcgagcagagcctcaaggattcgagcgatgacgcgcttccacaatggggtagtcataatgtgttacctcccctttctcacttggtgttgtcgcgcatgccgcgcatctggatggagttgatgatgaccagggccaccagcacgatcagcgagagcgccgcggccatacccagatccttcttggaatcgaaggcgaagttgtagatgagctgcaccacggtcatggtggagttgttcggaccacccttggtcagaatgaagaactgatcgaaggcgaggatcgagccggtcacgcagtagatcaggcacatcacgatggtcggcttcatcagcggcagggtgatcgagcggaagatacgccaggaaccggcaccgtccatgcgggccgcctcgtacagatcaccggggatggcctgcagaccgatcatcatcagcagcatgtagtagcccgagaatcgccagacaatcacgataatcgtggcccacagggccgactggccggtggccagcaccgaaccgccctcctgcatcaggcccaacgagctcagaatcttggtgacagggcccacctgcggggaatacagtgcgtagaacagcagggacgcggacgccaggcccgtcgcggacggcagcaggaagcaggtacgcagcacgttgttccacttcgagctctcctgcacgatcatggccatgcccaggcccaggaccagcaggaagaccgtgacgatcacggtgtactccaacgtgaaccagatcgagggccagaacaatttgttctcgaacaccttgacgaagttgtccgggaagttcacgccgcggttgccgcccagcaggctccaacgcgagcaggccatcaccaccagcagcacgatcggcacgaagaacaggacgacgatcatcaaccagtccggcagcgagtacaacaggccgcgacgcgtctcggccgccttcgccttggacttatgcacgggcaccgccccggcgctcttggaaacactcgacatgtttctctctcctttggggaataactgtgaaatggtaatcacggaatccgaatgcaatccgatgtcagggcttcgaggaaggaggactccgaagccccgccaacacaccgcattcaagaggtatgtaatgatgaaggaagaaaaggaatgaagaagaagatagaagttcaattatgtggttgagccggcccctgccctcacaaggaagggaccggctcaatctgttcagttgttattcagttattgctgtgatttgatgagcgatggtgaggagcatcaccaccgaatcactgggcagacaggacgtcggtgacggccttgttgtcggccttgaggtcaccggaaccccacacggcgttctgcacgagcagctgccacggggagccagcggcgttgaaggcttcattgaaggccggggacttcggggtctggccgttgccgtcgatgatcacggagttgatggtctggatgcgcgggtcagcgtcgttgtaagcggtcttcagggtctggatgttggaggcggtgtcgccccggtcagcgaaaacttccttctgagtgtcagactgcatcagccagtagaggaagttccaggcctgagcaacgtgcttggagtccttggagatacccatggcatcgccaccgaggaacgtggaggtcttgccttccttggtgcccgggatcggagcgacgccgacctcgaagcctccgtccttctcagcatcgaacagagcagtggtggaggtgttcgggtaaggcatgacaccgatcttgccgttcgcgaacggagcggtccaagtggcaccggtctcttccttggagcctgcgcccaaaccgttggtggtgttggccagttccttgtaagcgtccagaacgcccttcatggagtcgttgtccagagtggcctcggagccatccttgttcataacggattcaccgtcagcccacacggacgggaagaggtcgaagaccagagcaccaccggactgaccggcgaggtaggaaccggcaacgccatccttgttgagggcggcgaccttcttggcctgctcggtgaactcagcgatggacttcgggccctgctccgggtccaggccagcttccttgtacagggccttgttccagaccatcacggaaacatcggtgatgaacggcagggtgtactcggtgccgtccacggtgccggcctcaatgtggccctgctgcaggtcggccttgttgtccagaccgtcgatctgcttggtgatgtcagtgaagatgccctcggaagcccagtacggaatacggaccacgtcgccggcgaggatgtcaggcagagagtcggtctgcgaagcaccgccgaccttgccttccatatcgtcgttcgggatgatctcgagcttgacctggttcttgtggctcttgttgtaagcctcgaccacgttcttggcctgacgctccagcggggaacgggtccacagggtgatctcggtgccatcgtcggtgcccttggccgggatgccttcggcggtggcggtaccgccattgccggagccaccacaggcggccagcggaacaatcaacgcggcggcagcgatgccagcaagagtacgggtcagtttattgaaagacaccatgttcgcttctttctctatttatccgctcaactatgagaggcggtggcggacggtccgcctccttggtcttcgccctgctcgctcctttgctcggaacaggtaacactgcgaaagccttttctcaatataaacgaacatcgccatttttgcaaaaacgctttcgcactttcgcatattttcgcatatcgaacaggtttgatatgcattttgcgcgattgtttgactcaaacaaacacttatttttagcgctttcttacggcgtgtcgccaaaagccaacatattcgaacgtgaacacaacgctttctttcattctcttttcaatcgcacaaaaatgatcactgcgccacgccaaaaaatagacttgcgaaagttttcgcgtcatgtctacaatagaaaacaatacaaaggggtatcggtacaatcactactttcgcacgaaagagtgcagcaatatactgctgagaaagaaacgaggaatcgaggcattatggcccagacattgaccggacgcgcggcacggctcgaagacgttgccgctttggcgggagtctctttggccactgcgtccaaggcactgcacaacaagccccgcattagcgaagaaaccaagcagcgcgttctggacgccgcccgccagctcaactactcccccaacaaactcgcccaatccctggcccgcggcaccaccggcactatcggcctggtcacctccgatctgcagggccgtttctccacaccgattcttatcggcgcagagaacgagttgcgagcacaatcgacctcagtattgttggccaacgctcgtggcgacgccgcgctggaccgtcagcatgtcaagaaactgctgtccctcaaggtcgacggcctgctcatcgtgcagtgcgaaaccaacccccggcccacgcttggccatgactggggcgtgccactggtctacgtctacggcccctccaccgatatcgaagattgttcggtcacctgtgacaatgtggacgccgggcgcatggccatcaaccatctcatctcttgtggtcgccggcacattgccattatcggtggcgacgaaacctataccgccgccaccgaccgcaccaagggtgcggtcgaggcactggccgagctgggcatcgaaccggccgggccaatccggtacggcaagtgggacgaaggttggggccgcgccgccacccgtctgctgctcgatcagggcgtcacgttcgacgccgtggtctgtcaaaacgaccagctggccagaggctgcattgatgcgctcaagcagcagggcctgcgcattccggatgatgtcgctgttatcggccatgacaactggtctgtgctgacctccagctcgaggcccgcactgacgtcgatcgacaatgaaaccgagaccatcggccgccgcgcggcacgatacttggtcgatgccatcgaaggcaacccccatcacggtgtcgactacgtaccctgccgccttatccagcgcgaatccaccctcccgctggactgatatcaatcgataccctaccgcttcttggttttgcg

SEQ ID NO: 2677 - DNA, 2934 bp, Unknown
  R36_18m  MAG No. k141_5518
ccggattcgacgacctggcccttgtacatcacgacgatgtgctgggcgcgctcggcagcgaggcccagatcgtgggtgatgaacagcacggcggtgcccaacgagtcggtgagcatgtgcaggtggtcgaggatgcgcttctgcacggtcacgtccagagcggaggtcggctcgtcggcgattagcaggtcagggcggcaggccagaccgatggcgatgagcgcacgctggcgcataccaccggagaactcgtgcgggaactgacgggcacgggtagcggcgtcgggcagaccggcctcggacagcagacccgcgatacggtcatccattgtggagccggtgacgtacttcttagccagataccaggcctggtcgtcggccacgccggccttgatgaggtcgtcggccacgcgccaacgggtttcggagcccggaacccattcgttggtgaagcgggcgacggccttgtcgaaggcctcgccggacacgccggcttcggtcagggccttcttggcctcggtcatgagctcgggcagttccttggtgccgaggaaggtctcgtcgtcgttgcccttgacttcgacctcgtcgccggccagagccttggcgagggcggagcgcttctcgtgggccacgtccatgttgttggccttcagcgcctccttgacctgggagccgatacgccacaccgggttgaggttgctcatcgggtcctgaggcacgagacccatcttggtaccgcgcagcttgtcgaactcgctctgcttggcgccggcgatttcctcgccgtcaagcttgatggaaccgttgaccacgtgaccggtgccgggcagcaggcccagcacagccatggcggaggtggacttgccggagccggattcgcccacgatggccacccactggccggggtagacggtgaagttggcatcgcgcaccgcatgcaccggcttgccggtgtcagtggtgaagtcgatggccagatccttgacctcgagcagcggaccatgctctttctgcatagccagcatcttggcgttggtgttgtcagtcataatgattctccactcccctcgctcaggccgtacggctcttcggatcgagggcgtccttgacggcgtcgcccatcatgatgaacgcgagcacggtgatggccagtgcggcggacgggtagaacagcaccatcggatcggtctgcaggttggtctgcgcgctggagatgtcgccgccccagctcaccgtggtggtgggcaggccgacgccgaggaagctcagcgtggcttcggccacgatgtaggaggccagcgaggtggtggcgatgacgatgatcggggccagggagttcggcaggatgtgacggaacaggtttctggcaggcgtggagccgagggccgtggaagcggtgttgaattcgaggttcttcgattccagcacggcgcttcgggcgatacggcatacgccgacccagccgaagagcgtcagcaccagcacgatcttccagatggacttggaggtcttgaacatctgaagcaccacgatggcgccaagcagcataggcagcgcgaagaagatgtcggtgatacggctcagcaccgcgtcgacccaaccgccgaagaagccggcgacggcaccgatcagggtaccgacaatcacgactagtagcgtggagagcacgccgacagacagtgaggtacgggtgccgtagaccacgcgggtgtacacgtcgcagccctgcaggtcgtagccgaaggggtgtccggcggaggcggggctcaaggagttgcccagatcgcaggcgttcggatcctgcttggtgaacagaccgggggcgatggccaccacgatgatgaacaggatcagcaagccggagatgatgaacagcgggttgcggcgcagggttcgccatgcgtcggcccacatgctggtggccggtgcggattcgtcgacggaatcgacgtcctgcaacggggtctcgtcgagaggagctacgtaacggtcctgaccgggcagggtttccatgaagtattcggttcctggctcgccggtctggttgagctcgttttcagtggtttcgtttgccatgtgactcactcctccctatcacgcgtaacggatacgcggatcgagggccgcgtacagcatgtcgacaacgaggttgcacactacgaaaatcagcatgagcaacgtgacgatggacaccaccaggtttgcctcgcccttcagaatggactggtaggtgaggaagccgatgccgtggatgttgaagatctgctcggtgatcatggcaccacccatcagggcgccgatgtcctggccgaggtaagtgacgactggaatcagggagttgcgcagtacgtggcgcagcatgacctgaccgttcgacatacctttggcacgtgcggtgcgcacgtaatcctcggcgatgttggaggagatttcggagcgggtcagtcggatgatataggccatcgacaccgaaccgagcaccatggccggcatgagcagatcaaggaagccggggtcggcgcctgccgtcaccggcaatatcgcccactgaataccaaagacatattgcatgacgaagccggtgacgaaggtcggcacggaaataagcagcagagagacgatcaggataacggtgtcgtaccacttgcccttcttgaggcccgagataatgccgaagaccacaccgaaaatcgcctcgaacacgaacgccatcaagccgagcctgatggtgaccgggaaggcgcgggtgatttcgtcgagaacgggctggccggcgaaggtatcgccgaagttcagggtcagtgcattcttcaggtagataaagtactgaacgatgaacggctggtcgagatggtattctgcgcggatctgggctgcgacggcctcattgacaggcttgtctccgaacatggccttgacggggtcgcccgg

SEQ ID NO: 2678 - DNA, 12903 bp, Unknown
  R36_18m  MAG No. k141_5729
gcggctaaatagctttgtctttgtaaaaatgctcactgagacccactcagtgagcattctttgccaataacggtggtcatgtcagtttgttcccgtgacaccttatccttgggaaagatactgatccaaggagagatgttatgcagcagcaggaggaagcagcacattcgctgcatccgttgcaagtcggtccgcagccgttgaacaccccggaagagcttcgcgccattcgtcaggcgatgggggaggggaagaacccgctcgttgccactgatgtgccgcgttgggaagatcaggtgggtgtcagtcgcatcatcaaccgccgcgtattggagctggagccgctgcccacgcccgcgcaagtgctcgatgaacacccgcggaccgatcaggctcaggaaatcgtcgcctactcgcgtgatgagattcgcgcgtgcctgtacggccaagacgacaggttgttggtcatcgtcggcccctgttcggttcatgacccgaaggccgcgctggactacgcgcgccgattggccaagctgaaagatgagctcggtgaacagctgctcatcgtcatgcgcgtgtacttcgagaagccgcgcaccaccatcggctggaagggcctgatcaacgacccggatattgatggcagccacaatattcgcaaaggcctgttgcttgctcgcaaaaccttgcttggtgtgctgaaggaaggattggcggccgccacggaatttctggagcccaccagcccgcagttcatctcggacgcggtgagttggggcgccattggtgcgcgcaacacggaaagccagatccaccgccaattggccagcgggctttccatgccggtcggcttcaagaacgccactgacggctcggtgaaggcagcggtcaacggttgcttcgccgccgcccagcagcacacgttcttcggcattgaccatctggggcgtgcctgcgcagtcgagacccttggcaacccggactgccatgtggtgttgcgcggctcgattcacggcccgaactacgatgccgagtccgtggccaaagccatggaagacgtacgcgccgaaatgcccgccgaatccgcagcctcgcacggtctgattgttgattgctcgcacggtaactccggcaaggacgagcatcgtcaggccgaagtcgtgcgcaatattgccagcagaattgcagctggcgaacagggtattaccggcatcatgatggaaagctttattgaagggggcaatcagaaggccgcgccgcttgatcagctggtctatggcaagtcgattaccgacaagtgcatcagctgggaagaaaccgaggccttgctgcgcgagcttgcggaagccgtggccacgcggcgttggcactgagttgcgtcatcggctctctcgcgggagcaatgcaacgaaacgtctctacccctcagcctgccattcggcggccacctcccctgacaaggggagccgaaagtgttgtgaaaggaacttacgtatgggtatgaaaactgtagctattattggcgcattggatgaggaagtggcgctgatcgccaaatcgctcacgcatgtgacgcacaccgccaagggcagccttgacatcgtgtccggcacggtcgactcctttggttctgacgtcatcaaggttgccgcaacggtaggcggcatgggactggtcaatgcggccgccaccacgcagctgctgattgacgagttcgccccggacgccgtgattttcagcggcatcgccggcaacctcaacacccacctgcacatcaacgacgtggtgctcggcggcaccctgcgctacctcgacactgacatgcggctcgtaggccagtggaagcccggcactgcggacgctccggtggaggaattccactctgatgaccgtctgctggaagttgccgacgaggcgcttgccaatgcgggcattacccacatcaccggcatcatcgcctctggcaactacttcgtggacacgccccaaaaggtcgaggaggtcatccgactcaccggggctgacgccgtggagatggaaggcgccgccgtggcacaggtcgccgcccgcaatgacgtgccggcactggtgattcgtgccctttccgacaacgccgacaccgattacgaggtattcaaggagttcgacatctccgagtacgccgataccgccgcccgtctggctgtcgacatcgtcaagcgcctgtagtcggcgggctggcccatctcaccatccacgttttgggtatgatgaccacaatatgagcgttttcaaactattgcttataacctgagccatactcggtgttcggcacagcgatgtgcggggttcatcgctggggccacaagccgtaccagttcttctcccgcatgccggtcgctgtgctcaattcgttaagcgacgacaacaccgtcgcgaagcattgaatacacaatgcgcacgctgcactggggtttatctgcagcatgaggagagaaaaaatgactgcaagcgcaaccgcggctgtgaccaaaccggtgaagaaggattcggttcctgagatcatcgccgcttccatggtcggtacggccatcgaattctacgataactactgctattccattgccgctgctagctacttcggcatgatcttcttcacggacgtcgccaagtccaaccagaccctcgccacgctgatggccttcgtgaccttcgccgtttcgttcctcgcccgtccgttcggctccatgctgttcggccacttcggtgacaagctcggccgtaagaagacgctggttatcgccctgatgaccatgggtatcgccaccttcctggtcggctgcctgcccggttatgagcagattggcgcatggtccgtcgtgattctgtgcatctgccgtgcctgccagggcgtgggcctcgccggcgaatggtccggtgccgcgctggtcgccactgaaaacgctccggccgacaagcgcgccctgtacggttccttcccgaaccttggcgccccgattggcttcttctgcgcttacggcctgaacctgctactcgaatccaacctgagcaaggaacagatgattgccttcggctggcgtatcccgttcctgtgctccgccgtgctggtgatcattggcctgtacgtgcgtgcccgcatgtctgagaccccagtgttccagaaggccactgaagagaagcgcacctccaagcacccgctgcgcgacctgctgccgtactggaaggaagtcgtgctcggcaccgtagccatgggtatcacctataccctgttctacgtactcggcacttggtcgctggcctacggcgtcaagggcttgggcttccagcagggcgagtacctgctcatgcagatgtgctccgtggtgttcttcgccatcttcatcgtggtctcctgcgtgtacgccgacaaggtgggccgcaagaaggtcatgattgccgtgaccgccgccgccttggtgttcagcttcttcgtgccgatgctgctcgtgcactccgccgcccatatcatgatcttcctgtgcgtcggcttcatgatcatgggtggtttgttcggcccctgcggcgcctacctgcctgagctgttcccggtgcacgtgcgttactccggcgccggcctgagctacaacctcgccgccatcttcggtggcgcattcgctccgaccatcgcccaggccctggtcgcctccaagttcggcgttgccggtgtgggctggtacatggccatcatggccgccctcgctctgctcgctctgttcctgattaaggaaagcaaggacaaggactacgagctgtaaatagagctccccatattatgctcccgctggcgggagctgtccacgaaagcggactgagggtggccaatgggatttcggttctttgaccaccctcagtctcactgcgttcgacagctcccgccagcgggagcattttgttatgtcgtcccaccaaaaatgaacaatagacgaacttacgtagtttgggcatctcactacgccttgcacgttttactctggaaatcatggatatctggcagatcgtcgtgattgtggtgctcgccgcgctgatactggcgtgggttgccgtcatcgcctacaacaaaggccgcgtttcaggtcggctcgccgccgaacaggacctgtccggcgacgaggatacgcgttctctattcggtgatgatgcgcccgtgcgccccaccgagcgtcgcctgattgaagtcctgcccgaagccctgattgttaccgaccgcaacggcttggtccaatattcaagccccggctcagtgccattcggcctggtctccggcgaccgactcaactcgcgcgaagtcgaggacatcctcactcaggccgccgccgacggtggcgtgcgtgagcgtgaggttcagctgccggtcaatcgcaattcctatccgtcctctaatggccgaggactggaggccggccagtcacgcccgtccaacatgctgtatttgcgtgtgcgcattggcgatatcggcgatgacctgtacgccatcttcatcaacgacatgtccgagcagcgccgtttcgaggccgttcgccgtgactttgtgaccaacgtttcgcacgaactcaagactccggccggtgccatctcgctactggccgaaaccgtgaccgacgccgccgatgatccggacgccgtacggtatttttccggccgtatctccaaggaatccgcgcgcctgaccgaactggtacatcatcttatcgacttgcagaaagcccaaagcccgcaaagtgtgattgatgcgcggcgcatttccgcgctggatgtggcacgcgctgccatcgccgccaatcagacccaagccgactcccgccatgtggatattcgactgagtgtcaacggacagtcagtgcccacgaaggtcgaggagctggccgatggcgaaggttccttggaagaatcaggcagcccggccacgagcggtccgatgatcaaggccgacaaagaggccatgcaaaccgccgtcaagaacctcgtagagaacgccatccattactcgcccgaacacaccactgtggcggtcggcgtgggggagcgcgatggcaaagtcaccattcgcgtggtcgatcagggcatcggcatccccgccaaatcactggaccgcattttcgagcggttctaccgggtcgacccggcccgttcgcgcgagaccggcggttcgggactcggcttggccatcaccaagcactgcgtgcaggagaacggcggtcggatttcggtctggtcgcgtacgggggaggggtcgacgttcaccatcgagctgccggccgccccggatgaggatgacgacgaggcccggccggacgagtcgacacaagcgtagggccttggttggtgcccgatatggtgccattccattgccgcacaatcacacagtgggcgaggtgcgcacaccgtgcgtagcacaattacgcaattacgtactttcaggaaacagcaggctaacggagaacaaatggttacgataatgtcggaaaactttgcgcctatgcgcacgggaacatacccaagaaaggctactatgacacgcattcttatcgtcgaagacgaggaatcctatcgcgagccgctggtataccagctcacacgcgaggggtacgacgtgtccgccgccgccactggcgaggaaggtctggaactgttcaccaagggcggcatcgatttggtgctgcttgatttgatgctgccgggcattgacggcactgcactgtgccgtcgcattcgtgagcagagccgtgtgccgattattatgctcaccgccaagagcgccgaaatcgataaggtcgttggccttgagattggtgcggacgattatgtgaccaagccgtactctttccgtgagctgctggcccgcatccgtgccgtgatgcgtcgcaatcaggccacggcccaggcttccggcactgtggatgacgatattccgctggtgtgcggcgatatcgccatgcaggtaggccagcatcaggtcaccgtacgcggcgaaaccgtgttcttcccgctcaaggaattcgaactgctcgaatacctgatgcagaacaagggccgtgtgatgacgcgtcaccagctgatcgaccgcatctggggttcggattatgtgggcgacaccaagacgctcgacgtgcatgtcaagcgcgtgcgctccaagatcgaggaagatccggcgcaccccaagtatctgactaccgtgcgcggtctcggatacaagatcgatactcccgcggagtaaatggaaggcggccttcgggccgccttttttgttgtggattgtgggctcgccgcaggcgagtccactccaaaaactacgtagcctcaacgtagcccacaaacatccaagtgttcatcttctgtttactgatttcggttttgggcccttgaaaccaccaatacgcttgtagttgtcatgaattgaccgggcagcgctgagccgcccgcgaatagttgatagagggattaagtaataatcatgcagaagaacatcctcattcgctccattgccgctctgtccggcattgtgatgctcgcttccgtggccgcctgcggcgataacaccgccaccacgaccgacaacagctcctcctccgattccacttccaagtccaccccggtctccggcaacttctcgggcgccggcgcctcctctcagcaggccgccgttgaagcctggatcgccggcttccagggcaccaaccctgaagccaagatcgcctacaacccgtccggttccggcgctggcgtgcagaccttcctgaccggtgccaccgcttgggccggctccgataaggcccttgccgatgacgaagttgagcagtccaagtccgtgtgcactgaaggcaccgccttcgatgtcccggtctacatctccccgatcgccgtggtcttcaacctcaagggcgtttccgatgccggcaagcacatcaacatggacgctgccaccatcgccaagatcttcgacggcaagatcaccaagtggaacgatccggccatcgccgatcagaacaaggacctgaagctgcccgacaccgccatcaccgtcgtgcaccgctccgataagtccggcaccacccagaacttcgtctcctacttcaaggacgtcacccctgacaactggacctacgacctctccgagaactggccgaacgaggttggccagggcgccaagggcacttccggcgtgatctccaccgtcaagcaggccgacggcaccatcggctacgctgacttctcccaggtcggcgacctgggcaccgtggccgtcaaggtcggcgacaagtacaacgagatttccgccgaggccggctccaaggtcatcgaggactccaagcaggacgacaccgttaagggcgacaaccgcatcgtcatcaagatcaaccacgccaccgaggccgagggtgcctacccgatcgtcttggtctcctacgacatcgtctgcccggcctacaaggacaccaagcaggctgagttcgccaaggcttggctgacctacgtgacctccgacgagggccagaaggccgctcaggatgccgccggcaccgctccgctgccctcctccctgaagtctaagatcaccaagtccatcgaggccatcaagaccaagtgatgacgtcggcccgcaagggtcgtgtggactggacctgacaactgaacgatagactgtagtagtaagagcagtcgccgccaactttaagccgcagtcgtaaaccatacggctgcggcttaaagcgggtcaggacccgaacggtttggcaaagtcacagacgaaaaccgcaccacttgaatacttgataaccaccctatataaggagaatccgtgagttcgcaagacaaaacggctgtgcagccagttggaggcaagaccgccgacaaggtgtttcgcggtgtggcatacgcctgcggcatcctgatcctggttgtacttgccgctgtgttcctgttcctgtttttccgcgcctggccactcatcggtggcgatcaggccgccaacagcgacaccgtgtccagctttaccggcggcaaggccagcagcttctggggctacgtgctcccgctgttgttcggtactgtgctcgtgtctttgctggcactgctgattgccttcttcgtgtccatcggcattgcgctgttcatttcgcactatgcacctaagaagctcgccaccgcgctgagctatgtggtcgatctgctggctgccatcccgtccgttatctacggtttgtggggcggcctgattctggtgccggccatctacccgttctggaactgggttgccaaccacttgggcttcattccactgttcgagggcccggccgccaacccgtcgcgcaccgtcgccaccgtggctgtggtgctcgccgttatgattttgccgattatcacctccatgtcccgcgatatcttcatgcagaccccgcgcctgcacgaagaggccgcgctggcgctcggcgccaccaagtgggagatgattcgtctggccgtgctgcctttcggcaagtccggtattgtgtccgcctccatgctggctctcggccgcgcgcttggtgagacgatggccgtgttgatgatcctgtccccgggcctcaactactccatcaagctgctgcaggcctcgcagaaccagaccatcgccgcgaatattgccgcacagtaccctgaagccaacgatctgggcgtctccacgctgattggaaccggtctgattctgttcctgatcacgttcgtggtcaacttcatcgcccgtaagcttaccgagaaagcgactgcgtgatgactgctgctgagaacactgaaaagactccgatggacggcacgcccgaaatcgacttcgatcgtttccgcccgacccgttccgccatccagcgccgtaatatcatggaccgcttcatgtgggccctgatcgcggtggcgtttgtgatcgcctgcatcccgctgatctccctgctgtggaccactatcgtcaacggcatcaagcgcctgaacctgaacttcctgagctacaacatgaccggtgtggtcggtggtagccagaccccgtccggtggttacggcggtgtgctgcacgccatcatcggtactctcgaaatcaccgctggcgctatggttatctccattccgatcggtttgatgtgcgccgtgtacctggtcgaatactcgaaccgcggcaagctcgccaccacgatctccctgctcgtcgacgtgatgagcggcatcccgtccatcgtggccggcctgttcgccttctcgatgttcacgattctgctgggccccggtaccatcaacggtttcgaaggctccgtggctctctccctgctgatgctgcccaccgtggtcaagtccagcgaggaaatgctgaagatcgtgccgaacgatttgcgtgaggcttccttggctctgggcgttaccaagcagcgcacgattaccaagatcgtgctgcgcaccgctctgccgggcatcgtctccggtgccattctggccatcgcccgcgtgattggtgagaccgcaccgttgctgatgaccgccggctacatctccagcaccaacgtgaacctgttctccggccagatgaccaccctgccggtgttcgtctaccaggagtactcgaagctcagcgcgaactgcccgcccaacgccgacgccacctgcgtgaccacgattccgatggaacgtgcgtgggctgcggctctcgtgctgatcgtcatcgtgctgctgctgaacctcattggccgaatcgtggcgaaggtcttcgccgtcaagaccgagcgctaagccagtcgctaagcctaagccttaagaacacaaggaaatataaggaaacatcatgggacaacgtattgacgtcaaccacgagaacatctattacggcgactttctggccgtggaagatgtgaacatcaacatcgagccgaacaaggtcaccgccttcatcggcccgtccggctgcggcaagtccaccgtgctgcgcaccttggaccgtatgcacgagatcatccccggcgctcacgtcgagggcgaggtgctgctcgaaggcaagaacctgtacgacaaggacgtggatccggtggccgtgcgccgcgacgtcggcatggtcttccagcgcccgaacccgttcccgaccatgtccatccgtgagaacgtgctggccggcgtgcgcctgaacaaccaccacctggccaagtccgacgccgacgatctggtcgagtgggctctgcgcggtgccaacctctgggaagaggtcaaggaccgtcttgacaaccctggcatcggcttgtccggtggccagcagcagcgtctgtgcatcgcccgcgccgtggccgtccaccctcaggtgctgctcatggatgagccctgctccgccttggacccgatttcgaccttggctgtcgaggatctgatcaacgagctcaagagcgactacaccatcgtgatcgtgacccacaacatgcagcaggccgcccgtatcgccgactacaccgccttcttcaacctgaaggcagtgggccagcccggtcacctcgagtacttcgcggacaccatcacgatgttcaacaacccgcaaaacgaagaagccgagcgctacatctccggtcgcttcggctgatcgtttcctgcgcgcagcgtaatgatttgtgcgtaggagaaacggcaaagcccgccgcaaggcgggctttcgcatattcaacgcgagtattgccgagtattatcgttctcgcaacggagcgagctggaatactttgtcggactgggcggcgacttcccgcttcggtcgatcgacgggagaacggcgggtaaagcggtacaagacaagtccgcacgatgaatactctgtgatgaatcttctgtttacggtgcgagtgtggaagaatggtcacagcaaggtccagcaaaggagcataggtgagtactggtctgatcgtcggcattgtcgttgtcgttattatcgttgtcttgattggttggggcgtcagcgcctataacaacctggtgacgctgaagaaccgtgtgaagaacggttgggcgcaaatcgatgtgcagttgaagcagcgcgccgacctcatcccgaacctggtgaataccgtcaaggggtacgcatcccacgagtctgaagtcttcactcaggtgaccgccgcccgcgccggcgtagtggctgcggccagcaacccgagcacgaccactgctcagcgcgccgccgccgaaaatcagctgtcccgcgccctgttcaacctgcaagccacggctgaggcatatccgcagctgcaagccaaccagaacttcatggatctgcagaaccagctcaaggaactggagaacaagatcgcctacgcccgtcagttctacaacgacgtggtcctgaagctcaacaccgccatcgaaaccgtgccgacgaacatcatcgccggtctgttccactttgagcaggcgcaatacttcgaggccgatgacgcttcccgtcaggtgccacaggtccagttctgacccgcttcaggcccgtccggtaagccgccggccgggcccgtattgtcttaagagagggaagatatgcggatacgattcattcgcgccggaatcatcagcattgttgccacggtggtgttggcagttatcaccttggcgataatcgggacttccgcgttcggcgattcggccggcctcagctaccgcacgctggactatgacgtgaccgccaccgcgaacggtgatttgaaggtcacgcagcatatcgacgtcaagatgcgtgagcgtaccgacagtgacgacaacaccaagccgtggaagcagctgttccagcaatacacgctgaactccggcaccttgactgatatcagcgatatcagcgtgcgcaacgtcaccgacggcatcgactacgcacaacagagcgagcccaagctgcccagtgacgtctcttccgacaaggaatggaacagcgactacgccaaccattggtatgtcgccgatgtgagcgatggcagcgaccatccaaaggcatacacgcccggtaccgatggcctcaagcccagcgcctccgccaccgaagatgacacaaccgtggagatcggctggaatattccggtcaccaccgaggccgacagcatgaagttcgatgtaagcttcaccatgcacgatgtggccaccaaatggaaagacgtggcctccttccaatgggagccgttcggcaagaagaaccaagtgcctatcggcacggtcaccggcaccgtccatttccccaacggcatcaccggcaaaacctcatggacatggctgcacaccgagcgcacctcggaaaccaagcgcaacagcgacggcagctacacgttcacggcctacaacatccacaatggcgactacctcgatgtggtcgcggcgttcgatgccgccaaagccaagggcatcgcccgcaagggaaccggcaatcatctcacggacctgaaacaggacgaatataagcaacagcagcgctggctcgacaagcaacgattcgctgccagagctcgtctcgtgttctggattgtcagcatcgtgctcggcatcgcgttgtgcgcgtggggtatctgggctgtgatctccagcaaccggcgtgcgcaatacagtggcagcgtcgaatactggcgcgaccagcccggcatcagtccggcttccgcagcccgtctgattcgcgtggtcgatccgtcgacgcgccaatccgatgaagaccgccagctgacagccaccatgctgtcgctcgccgtcaagaaggccattgccgtctatccggggccgtcggacatgtatcgcggcatcgacatgagccaggccacgccggtgggcttgagccaaatgattgccgccgaccaaggcaagcagtatgcggcaggcatcaccagcaccatcgtgattctgccgctcgcc

SEQ ID NO: 2679 - DNA, 17209 bp, Unknown
  R36_18m  MAG No. k141_5749
aaccacgcgaaaatccatggtcagagccgcgaaaacactggccagcgatcttctgaacggcgtacgcatcaacccatcggaatcaatatccgtgttcagcgaatccgcgaaaatgccaatcaccgtcagcaatgaccttccttatgccgtcagcgtgcaggtcaactcgctgactgactccatgcagatcgtcacctcgcgaaccactgacatcgatattcccgcgcatagcgacgctcaggtgaccttcaccatccgcgtttccacttccggctcatcgacggcccatgtgtcgctgagcgaccgggaaggcaacagcttcggcaacacgcaggataccgcgatcaccagtgtgatgcgcgtcagtgatgccagcggtttcattatcatcggcttcgccgtgctactgtgcattatcggcctgtggcggcagttccatcggaagaaggaccccgacgaatgagttcaaccgtaggtcgtaattccctgatcatggccacgggaaccgctgcttcccgtgtgaccggtcagctccgcacgattcttctcgctgcggccatcggcaccactggattggcggccaacgcctatcaggccggttccatgattccccaatccgtgttcacgctggtgtccggcggcatcttcaacgccgtgctggtgccccagattgtgcgcacgttgaaagaaaaagacgcccaagaacgactgaatcgtctggttacgttggccatcggcatcctgttggccatgaccgtggtgatggcggcggccagccctctgcttgcccgcctgtacgtgggtagcgacgatcaccagatgatagccctgaccacctcgttcaccctgtggtgtatgcctcaggtgttcttctacggcctgtatacggtattgggtcagatcctggccgccaaagaccatttcctcacgtatgcgtggagctcaaccggtgccaacattattagttgcgccggttttactggttttattctgctgttcagcaaggccaatgaacagcccctcgaattctggaccgccgacaaaatcgcgcttaccgcaggcacctggactttgggcgtggccttccaagcgctgatactgttcctgccactggcccgtatcgggttcaagtacaaacccagcttcgggcttggcggctttggactcaggtctatgggtcccgtggcgttaggctctttgggcgtggtggtcaccagtgagatctgcggcattatccttacccgtatcgccacatccgcaccgcagcgcgcccacgaactgacgggtgccagcctgttcagcgtggcaggcaacgcgacctatcagaatgcgtacaccctgttcatcctgccctattcgctcatcgccgtatcggtatccacggctatgttccccaagatctcccgttccatcgcagctgcgaatctggatgaggcacggcacgacctagtcaacgcactgaataatgtgggcctgctcatcatatttttcgccgccgccatgattgtgttccccgaaccgatcatccgcgcattgcttccgtccgtctcgatggacgagaccatgctgatttcctacgcgcttatcgccctatctgtgggcactcctttgggatcggcgttcctgctgatccagcgcacgttctatgcctttgaggacggccttcaccccttcttgtccgcggtgatgcagtatgggttcacctcggtattcatgatgattggcatgatggtacttcctcctgagcattgggtactcggcatcgcctgctcggtgacactcggtggattactggcgttgccgctgacgttgatgatgttgcgccgcaagttcgaaggcaatcttggcggtcgggagatcacgaggacatatgccaaggccattgtggcggcactggcttccggagttgtggtctggctgatcaaacgaccggtagtcgcactgttcggcgcggatattcgatcggtaggcgggcacatgagctggtggtctgcgctggccatctgcgtggtgctcaccatcgtgctggccgtagtatatgtggctgtgttgtgggtgatacgcaccccggaactcatcagcgcctatcactcgatactggcccgtctacacaagactccggccagtgaggacgttgctgtgacagcccagccggaaaaagtcgacgatacgcaaatcaatcctgagacggagcccgtcaaggatagccccacacgtagaatatctaagaccagtctcgaacaccaatcacacggagccgaacgcactatgaaaccgcaactcggagacacgattctcaaccgatacaccttggtatcatcgttgcgtgaggagcctggcattcaggcatggaaagccaacgaccgtgtgttggcaaaggattgccagctgttcatcattaccaatcgcagcgctttcgccgcaatcgatgagctcgctggtcgcatcgccgccactcgccctgatcgtgtgattcccgtactgaaataccgtatggaatccgacgtacttctcattgtcatgccggtggacagcggccaatgcctgactgactacatggtggataccgacaagccgctcagctacagcgccatccggtcgattatcggagaatgcgccaacgtgctgcgcgaggtcattgcggatactcccagcagcatcgtcatcacaaccgacaccgttcgagtgactacctccggtgtgcagattgccgatgcaccatgtgccacgatgctggccgacacgtccgctactgatctgcgtacggacggtcctgaacggtatgcgattcgcaagcttgcggcattgctctatgccctgctgacacgcacgccaagccaagcgacacccacattcaatctgcgcgccttgccgcaagacacccctggcgaattccgcgtgatttgcaagcgtggattggccttaagcaagcccgacgagcacacgttgccgatggctgcccttgtagaactcgacgccttgttgggtaattggaagccgctctctgaactgagcgatgctgatatcgctttgccgagcgtggaaagcgattgctcgattaccaaggcgatactgaagcccgccaacgagaccgatatcgtgcctattcccagcacgttgattaacagcagcagtcttccggaattgtctattgccccttccctgccggttcagccggccgccgtccccgctccgcacgcgatgtcaccggctcctctgcctgatgggtccagtactgctgacggcacccagtctcaatctgacgcccgccgtctgtttgacttcaacctttctgacgcctgggagcacgagaatctttccggtgaagacaccggtgactggtacagcgaaatgaatccggcccccatcggcggtccgggtgataatactcggttgacggtgcctattgttaccggcggtatttccgatgccaccgtgggagagacgaccagtcgtattcccgtgttcgatgtcagcggccgtgctgtggcccccggtgaggaatcgctgcgtgccttggaagaggagcaggcccgcattgccgaagtaagcgccattcctccgagcttcacaccgaaggatgtgccggatgacgaggatgacagcaagctgcccgatgaacatctgttcggcaaactgtcgaccaaggtcgttgccatcattgtggctctgatattggtagtggcagcggctgtttgggcagtgcatgcgttccaatcctccggagacaatcctgccgatgcttccagcaactccagtgaaggtgactggcccgatatcaatgctgacgctgtgccattcggtggcagcaagaacgcgacgaacggtggcgccactgacgattcctcaaagtcgagtgatgccactcagagcgaatccagggactcggcatcagacaagtccaagaagtccgagactgctgattcgtcgtccaagaagaccaaggccaagaagtccggcgataaggattccagcgctgctccgcaaccgcgccatgagaacaacacggcgtttacgatttccagcgccaacttcctgtcgaatcctggcggccaatccgggtacgcatactacatgcaccttgaccagccgcaggatgcgtaccgcatggttatcaccatccgcacatccggtggtaagggctatattcgcgcaaataccactggagaccccactcagggcgagcaggtggccgaattcacctttgctgaaggtggcactactgaggtgaagttcaccaaagccgtcaatacgcaggatctgctgctgtgggtgccatcgggtagcctgccgcagaaccagctgtacatcgagaaggtggaggtcttctaatcggcatctataccgataactgacccaagaagggcggtaccgttcgcatacattcgacggtgccgccctttcttcgcgtctggctgaatgacatggaatatcgtatgggggtgtgacaatgtttcacgtgaaacataacgtcatcattatcggttctggtcccgctggctacacggccgccatctatcttggccgtgcaggtcttaatcctgttatggtcactggtgcgttgtcgccaggtggacagttggtcaacaccactgaggtggagaacttccccggattcccggaaggtattcttggcccggatcttatggatcgcatgaaggaacaggccaagcgcttcggtacaacctatatcacagacgatgtctcttccattgaggcgtgtgagagtgattcggtcaagccgacctatcgtgtaacgctctccgatgactcccagttggaggcatcagcactcatcatcgccacagggtcgtcattccgtaagcttggggtgcccggcgaacaggagctgtccggacatggcgtctcgtactgcgccacctgcgatggcttcttcttcaggaacaagcctatcgtggtcgtaggcggtggcgattcggcttttgaagaggcattattcctgacccggttcggttcttcggtcaccttgattcaccgacgcgatagcttccgtgcctcgcagatcatggtggaccgagccaaagccaatccgaccatcaccctgctgaccaacacagtggtgacctccattaccggcacctcctcccccacacagaacaccggtgcacctattgccattcctggcttgacaatcaaacgaccggctgtggcaccggccagtgtcagcagcattgccgtacgtaacgtggtgaccggagaagaaagcacgctggacaccaacgccgtattcgtggctatcggccatacgccagccactgattttgcagctggtgttgtggaccgtgacaatgatgggtatgtcgtagtgcagggtgccagcacggtgaccagtgcgccaggcatctttgctgcaggcgattgcgtggatcgtacttatcgtcaggcaatcagcgcagcgggcatgggctgccgtgcagcgctggatgcgcaggcctatcttacggactgattgcggcgacctgatgatggcttgctgttctgactgctgcctgtgacataggagcagcgctaggtcagtgttacagcatgccgcccttggatagtacgcaccggtcaaaggcatagaaaggcccctcaggcgacggagaatcacgatgtgtgatttgtcatcctccagcctgaggggttttctattgcgacaggggctacaacgcaggcatacgcccctgccaggaatcacgcagaggctataacgtcttgcgcgtacaacgcactgcacagcaataatgccggcgacaacacgaatgttcttatcgtgttacacccatttggaatcggcatcgccttggctcggcaccagcagctgcaggatgcgatccatatcctctggtgacgagaagacgatttcgatgcgaccatgcttggtgctgcccttaatcgacaccttggtgtcgaaatgattttccaaactctgctggatggcggaaccaacccaaggattggtcttggacgtcttgggcttcttcggctgctcccccgacgcaatcttcatggcgacgatttcttcggtgctgcgtacagaaagaccttccgcaataatacgagaagccagcttgtccatttcctccggatcgctcaggcccaatagcgcacgcgcatgaccggacgatagcacaccggcagccactctcttttgcacagaggccggcaggttcagcagtcgcaaggtattggcgatttgcgggcgagacttggacaccgacttggacagttgtacttgtgtcaacccgaactcttcaatcatctgctggtaggcagccgcctcttccagtggattcaaggccacacggtgcaggttttccagcaatgcatcgcggagcatatcatcatccgcagtggttttgacgatggcgggaatcgtctccaacccagccaactgggatgcacgccaacgacgttcacccataatgagctcatacgggctgtccaaatgaccggcaaacggatttgtgctggattccgtctcgtcgtgcttggcggctttggccgcagcaatctggcttgccggacgcttgcgcacgactatcggttgcagcacaccaacttccttaatggaagcagacagctcattcaactcatcctcgtcgaagatggtacgaggctgatgtgtattgggcccgatatcagacagtttgagttcagccagataaccaccggctaccggcttgagctcgtccttcttatctgtgtcagcggtctttgccgccgatgcagtctgagatgtttcacgtgaaacatctttgacggtgacggatgtacgatgtgccgtctgagacgcagacggcttgccgccctgctgaggtgcggcgaccttaccggtttgaggtttctccgtaccgaaaaacaggtcgctaggatgagtaatggtgtccaatgcgggcatggatgcgcgtttaccggcggctttcttggctgctttactggacgataccatctgaggcgcggcaggctttgattcctgctgggcagtagccttcttggcgggggttatgtcagcagtggccgccggagtagacgaatcctcctcaatcattgcgggctgctccgccactggctcctcccctggcaatgtggggaacaaagcgccaaggcccttaccgagtcgtgattttgatgccattacttgttcctcctcgcatcaatggtgtcaaggacttgttgcgaacgctgtgcgatttccaaagctgcttcaccatacgatatggcacctatgccacgaggatcataggcaatcaccgattgggagaaactcggcgcttcggagatcttgactgaacgcgggatggtggtattcagcacaatgctgggatagtgtcccttgacctcgttatatacttcacggctcaatagcgttcggcgatcgaacattgtgacgagcatggtggacaccagcagtactggattgaaatgctcctgcaccaaaccaatcgtgttgatcagctggccaagaccctccaatgcgtaatactcagcctggataggaatcagcatctcggtcactgcacacatggcgttgatgaccaagaggcccaagctgggcgggcaatcaatgaacacgtaatcatagtgtttatctgattgacgcaggtagaggtccaaggcctccttcaacaatgtgtttcggttgggcagatcagccacttccaactcggcaccgctgagatcgattgatgcaggcacaacatcaagtgtgggaaaatcaggacagaccgtgataacatcacccagatcggaacgcccctcgataacgtcatagaccgagggctctcccgatgcatgagatacacccaacgccgtagaggcattgccctgcgggtccatatcgatgaccaacacctgcgcgcccttgttcgccagcgccgcagcggtgtttaccgtggatgtggttttacccactccccccttctggttggccacggcaatacgacgggtacgttgaggtttggggaaatcggttttcttgagtacatcgtagcgtgagctttcatcaaccatctggctgccaagcactgaaccgtgaccatcgaatattcgctgaagcgtttcggaagccgattctataggttccgactgatgatccttggtggacatcgctcctccttgcacagacgtaagttccagtgttctcattcgtatggacatgatgctcgttatccacaattgcgatatgcaatgtggataagtgtggataagtgtgaatgacgttgagtgttagattatgtattcgcagacgaaaaacattgaaaaatcagtgttttcatcattctgcacatcgtcccgtaaaaatgtggataacttttacgcacatatggaaatgtggataactcaatcagtactccactcatcgcttatccacaatcaccacgtgggtaggctcaagatccggtccgacagccgcctcaacgacgcgtggacgacgaccaccgaattttgcaatctccttgccagccttgtcgatttcagcctgagcagaccgtcccttcagtgcgatcaactgtcccgacggtttcagcaacggcaacgtccagccagagagtttggtcataggagcaaccgcacgacacgtgacaacagcgaacggatgaatttcccgcttccgtacctgctggatgacggcatcggagcgtccacggataatctcaacgttctgcagttgcatcaggtcaacacattcatgcaaccattcgattcgccgctccatcggttcaatcagcgtgaagtcatgatcagacaaacacgcggcagccaccaatccaggaaaaccaccaccactgccgacgtcggcaactgttttgaagcgaataccattcgtcacattccgaacgtacggcacaatcgcagcggaattcagaatatgccgttcccaaatgatatcgacgtcacgggggccgattaatccacgaggttcaccctcttcggcaatcttggcatggaaacgctccaacttcggcaacgcatcacccaagacctcagcaagtacaggtgacccctgcagctgatccgtcatagccatctccctcaccatgtttcacgtgaaacaatcaacatggaaaaggcgtcgctcattacgacgccattctccctacggtcactcttgtttgtttagagacgacatccgttgaacgtccttgtcatctcaaaaactcgtcgacctattactcctgatcaagctcgtcgtcttcggcaacatcctcgattttgttcttgagatacaccgtcacgtaacgatgaggctcctcaccgtgcgagcgagacttcagcccctcttcccgaaccacatcgtgaacgactttacgttcgaaggaattcatcggcttcaaatcatacggctcgccggaatccttcactgcgtcaatggcatccagggcgatatcacggaggtgctgacgcttgcgcttcaggaaaccgtcgacatccacaatcagatgagaacgctcgccggtcttctgctgtacagccagacgagtcaattgctgcagagcatcaacgacttcaccattatggccaataagatgtttgatgtcggtatcgtcatcagcaacgatttgcacggtggggcggtcattacgcacgcccatctcaatgtcgccctcatagtcggcgatatccagtaggccttcaaggtaatccgcggcgatgtcagcctcttcgttgagctgatcgatcgacttcacgtcatcctgtgccatacgctactccttcatgtcgtgtttgaattccaagtctaagccctgctcccccgaacagagaaagtaatgtcggtgcgtgttgaatgtttcacgtgaaacatcgaacgcgcaccgacatggtcgtcacttctttttgcgcttacgcacgggctgttgacgctgatagccctgagtggccttacgctcagcctcttccttggccttggccaatgcttcttcttccagagagggcaggccggcctttgcgcggcgagcattctcattacgatgatcgcgcttctccttgtccgccgcagccggagagccaggggtcgggaatgcgtacacctgccacaatgtgcggcagaggttgcacacgttgttggtcagccagtagaccagcacggcgaacggcatggtggcaccagagaagatgtacatcaccgggaagagccacagcatagccttctgcatggtctcggcctgtttgttcatcgatgcggcgggcatgttgcgcttcatgttgaagtactgcataaaccacaggcagaagcacatcaggaacacgaaggtaccgatgaccaccttgcctgcagtagatgcgcgggtgaagttatcggtcacactgacaatgccgaacacatcggtttgggtgaattgcttggcggttgctacgtcgaacgcgcccaacgcaccgcgtttaccgttggcaatgtagggaatggccgacagcgtatagaacatggacatgaacaccgggccctgaatgagcataggcaagcaggagccagccggattggcgtcattgtcttgatacagtttcatggtttcacggctcatggcctccttggaagcctgatccgtcttgcctttgtacttgttctggatgcgcttcatcttcggcgccaacgcctgcatcttgcgcatcgacttcatctgcttgcagaacagcgggaagatacacgcctgcaccaccagcaccaggatgataatggcaagcacccatgagacaccaatcgggctcatgcccagcatcgcgaagaagtcatgcacgatcttcatgatccaggtctgcaaccactcaacgggagtcaggattttatatagaaatccccaaaacccgctatcaagcagaaattcatttgagttcatcgttgggcctctctttgggttgtggccaatggtgtcagtcggggctcttcatgagccttcgaccacgaaaatctgtaaaaaatggaataccgttgtggaacatcgtcgattcccccacgactccacggccggcaacgcagtaatctcagcatggcgagcactccccctttgaacgcgccataccgttccaatgcctcaatggcataattcgagcacgttggataatacttacaacaaggcggtgtgtttgccgagatgtgctgttgataccagcgcaccccaccaatcatcaccgccttgaaagaagctgtcatgcctcagccaccttatgcgccactgtggcaaaagccttcgcgatctgctgatctagcgaagcgaacgatgcggtcgcggcactgggcttggcgcgcaaaacgatatcgcaatgcgcgggcagcagatcctcatgggctctggccaatacacgaaacctacgcttcaccgtattacgggtgaccgcatgtcctaccgatttggagacagctaatcccaaacggcgatgcaccgtccggtcgtcatcatcatgatggtcgtcgggcaccaaatagtgcacgacgatatccttgccacctgctttgcgccggcgtttcagcacggtgacgaaatcacgatggctttgaagccgctccacctcgactatgcctgtggcactgatcggaatgatcaggcggagagggacttgcggcccttggcacggcgacggttgatcaccgcacggccagaacgggtgcgcatgcgcaggcggaagccgtgcttcatgtggcgacgacggttgttcggctggaacgtcctcttcataatccattgctcctaggtctattcggcaacgcttcgcgctgccctcacgtgagtcaagctataccaaagtactctcacccctaccctcaagtcaaaacggacggagtattttcacatttcgacacgttgcgagacacgcctcaaatctcttataatcggcggaataccaaccattcacggccaaaagttatccacaaattacatgtctgttattcacaatccagttatttcaacacgcgacacggtggataacttgtctaaaccagagtaaatattatctgttgtacagatttcgccacaccgatagaaggggccaccatggttaacgcttccggcgaccccgtaattgaggccgcccacatctggtcagacacgctgacggtgctcaaacacagcgcttcgctcagcccacgagaaaaaggctggttggaaggcgttgttcctgaaggcgtcttcggttcgaccatcgtgctgtgtgtggacaacaacgatacgcttcaagccattcagggtgatttgaacgattccctgcttcaggcattgcgtacggtaaccggcgaaaatatgtttcccgcgttcaaggtcgtgccgaaaaccgagcccgaaccgctttcggcggcaaagccggcgcagccatatccttcggaaatttctccgaccgtcgccgagttcggtaaagaatcctatggtgcaaagccggtagccgcaccgcgggaaccgatgcccgccaccgagtcgcagttcccggtcggtcagcagaagatgaatcgcgatcccgagactcatctcaataagaacttcacgtttgattccttcgtgcccggcgattccaaccgttttgcccgtacggtcgcactggccgtggccgaaggttccggtcaggatttcaacccgttgtgtatctatggcggatcgggcctgggcaaaacccacttgctgaacgccatcggcaactatgcactggtcaaggatcccgggctaaaggttcgatacgtcacgtctgaggaattcacgaacgaattcatcgacgcgctgcaaaacccgaaccaaagccagggtcagattgctgaattcaaccgtcgataccgacaggttgatgtgttgcttattgacgatatccagttcctcggcggcaaggaagccaccttggatcagttcttccatacgttcaatgcactgcatcaggcaaataagcgtattgtcattgcttccgatgtagcgcccaagaatttgaagggtttcgaggctcgactcatctcgcgcttcgaatccggcctgaccgtagacgtcaagccgccggatctggagacccgaatcgcaattcttcgtatgatcgcctcgatgaacggttcgaaaatccccagcgatgtgttggacctcatcgccgaacgcttcaccgagaacattcgcgaacttgagggcgcgcttacccgtgttacggccgtggcctcgctgagtaatcagccggtgacccgcgccttggccgagcagacgttgcaggacttcttcaccaccgatgtggaaatcaagcccacggacatcatcagtcaggtggcgaagtacttccacctgacgtttgaggatcttgtcggtaaatcacgaaccaaaaacgtggctgttcctcgtcagatcgccatgtatctggctcgcgaaatgaccagtatgagcctgatggatattggccaggtctttggcgggcgcgatcacaccacagtaatgcatgcctgcactcgaatcagtgaccgaatgcagcaaaaacaggagatctataactacgttatggagctcacggttcgcctcaagcaaagcaacaccaactgacacaacgcttctgagagacgaaaaacggcacttttcggactgactttccgaaaagtgccgtttttggttgctcaggcggattctggtggatacgtcgaggcaacggattcgagacatcagattcctcatggctcccctttgtgaggagagctgtcgtcgcagacgactgaggggagtatcgaaggggaacacgcaaaaaacccatgaaacgagagaatcgattctgaggaccgattttgcgggtttgggcgagcgagacgaaaaaagtgccgaaaacggtctccagaatcgattctcctcgacgaaaaacagccttcaacacgccgtgcgaaagtacgaaaaccaaaaaagttatccacacagttgtgcacagatgtgggtaaactcggcggataactcgtggattacccactgttttgttgtggaaaactcgtgcataaccgcgacctcgatgtggaaaactcaaattcgacgaactggctgtggaaaactcgcccacttatccacaagccatgcagaatttgtccacaattttcagggacttatgaaccgttgcatttgtagggctcacccctacttatccacactatccaccggccttattacgacgattacttactcagttacgtgaaaagcatcatcgccacagtaacagccagtcacccatcgtacgtaagttcgccacctaacggctagaatatttctcagccaatccgacgaagggaacaatcacacatgaaagtcgaaatcgatactgcagccctggccgacgccgtagcctggacctcccgagtcatcgacgcacgtccctccaacccgattctcgctggcgtcaagctggaagccattgacggaacgctgcaattctccgccttcaactacgagatttccgctcgccaccacatcgaagccggcgttgacgaagccggttccgtactggttcagggcaagctgctggccgatatcaccaaatcgctgcgttcggagaaaacgtacctggtcaccgacggctccacgctgaccatcacgtccggcaagtcgaagttcaccttgcagctcatgcccgacaccgagtacccggatctgcctgtggtaccggccatgctcggccaagtcgatgccccgactttcgttcaggccgtgaaccaggcgtgcgttgccgtctcccgcgaagaaaaccgcccggtactgaccggcgttcgcatgcaattccaaggcgacaaggtcgtcatgacctccaccgatcgcttccgtttggcccgcgccaccttcacttggactccgcagaacccggacgtcgacaccaccacgctggttcgcggctccctgctcaaggatgtggcccgcgctcttgatgagcaccagaacatccgccttgatttcgacgccgacagcccgacgctgctcggcttcgaaaacgccggccgcgtctccacctcccagctcatcgacggtgaattcccggcggtcgaccgcctgttcgccgacgaatatccgattcaggccgtagtcaacaagcaggatttgctcgacgccatcagccgtgtggctttggtcgccgaacgcaatgctccgattcgcatgaccttcaccggtcaggaagtggcgctgtccgccggatcggtcgacgaggcccaggccaacgagacactggacatcgacatggatggcgacgacatcaccgtggcattcaacccgtcctacctgaaggagggtctgtccgccgtgaccgaaccattcgtgcgcatcaagatgacgaccccggtcaagccggtcgagttcaacggccagcaggaagctgattccgacgagtccatggactaccgatacctgctcgtgccgatgcgctttaacaactgaagtccctgaatttccaacgattcgataatgcgcatctcccgtctcgcactcgaccactaccgctcatggagtcaggtagtggtcgatttcgtaccaggcgtgaatatcctgttcggcaagaatggcttgggcaaaaccaatctggtggaagccgtcgaagtgctgtccaccggatcgagccatcgcacgtccagcacgttgccgctgatcgaacgcgggcagaccacggccaccatccgcgcgaacgtcgctgatgatgccggtcaaaccactacgtatgaagcgtcgattcatgcgcgtggtgccaaccgagcccgcatcaactcggggtcgtcgctgtatctgcgcgatatcatcggcaagattcccagcgtttccttcactcccgaagatcagcgattggtgtccggcgatccgggagcacgccgcgtcatgatgaatcaggctgcggctctgctcgagcccggatacatgcagacgttgcaacagttcacgcgcatcgccaaacagcgtgccacattgttgaagcaattgaatgccaatgccaacaatggacagccgatggatgcggttctgagcggtttggaaatctggaccggccagttcatcgaagccggtgtggcgttgacccgtatgcgcgctcatgtgatcggtctgcttgccgagccatttgccgcgatttacgccgacttggccggtgccggcgagcaggtgacgctcacatatgcgccttcattcgacgaagtgctgatgttcgacgatccacatccgcggatcagcgagcattttcaacgcatctaccccggtgaaatggctcgcggcgtgaaccttatcggtccgcagcgcgatgacatgaaccttgagttggccggtattcccgcccgcgagttcgcttcgaacggcgagatgtggacgatggcgttggccttgaaaatggcattgtttgaaatcgtgcgtgaccggttgggattgcagccgattgtgattctcgatgatgtgttcgcccagcttgacgacagccggcgcacgcagattcttgatttcgccagaaaacaggatcaggtgctgattaccgtggccgctgaaggcgatgtgcccgactatgaatcggcccatcgcatcgacgtggccacactggccgaacccgcttccgtaatactgccaactctgggcaatttgtccgattcgcgggaaaacgagagtttgggtaagtatgacggaaaacccgcggtggacagcgcgtccgtagaacggaaagcgtcatgaacccgccgatcgcccgccaactcaacctggacgagaccaaactgccggccgaaatattcgagcggctctcccgtcgcggggcgaccttgaaggactacagacgccgccgtgaagaggccatcgaaaacttcggcaaaccggggcgcgatccggctgaactgggcagcgtgatgaccaccatcgccggcaatggcgtctgggcggcgaatatgaaacttgcgcaattgcgcaaccattgggaccaagtggtggggcaggccatcgccagccattcggcagtcgccgatttcacggacggcgtactgaccatccgtgccgaatccacggtctgggccacgcagctgacctaccttatcccccaacttaccgataccatccgtcgcaatctcaaaggattgaccatcgccgagattcgcgtgaccggaccggccgccggatacacgcgcaaatgggctcggcggcggtagccaagataccaaacaaattcgcagaagcctcgctatggcgctcgtcgggttagacgagtaaaatcacatgcagtatggtcaaatggccagaagagccctttacgggcctcgtaagcc

SEQ ID NO: 2680 - DNA, 12624 bp, Unknown
  R36_18m  MAG No. k141_5964
aacttcttctcagtggcctcggagccaggctttgcggccccttcctgagcagcctgagtatcagcagcgggggtgtgggctacgacgcgcggcgcgtagccgtgcttcttgtcgccgcggacggccttccagccatcgaccatggtgcgcgcggcctcttccgggttctcggcacccgcgatggcggagaccgcgaaccagccagcagccttggtatcggcgagtatggccatatcggctgcggtcacgccgccgcccacgaccaccgggaattcgctggcaacgcagatggtgttgatctgggcggcgtccagcgtcttgccggagccgtcgttgccgcccacggaagcctcgggcttggtggtggagacgtgcagagggccggcgccaatgtagtcgatgcagccgtcgggcagctcgttgatgagctgaacgaggctttcggtctcagccgacagacccacgatggcctcgtcgccgagcagggcgcgggcttctcgcggctccatgtcggtctggccgatatgcacaccgtccaccttgatgcccttgcggcgggcctgccacaccacgtcggcacggtcgtcgatcacaaaggccacggaatcggacttctcattgtcctcgatgatctgcgcgatgtcgcgggccatgtcggtcagctcagaggcatcggcctccttggcgcgcagttggatgaaggttgcgccgccgcgcagagcctgatccaccacgtcggtcagcggacggcctttgcagtcctccggccccaccacgaagtacgcggacaagtcgaagttgtctcgcatggaggcgtatgggtattcattactcattattattcctacctttgttgtttcttgtggaagtcttattgggaaaaactgttatgagctccctcatcagagggaactgaaactactgcaccaaaatctcggattccgccacctgttcggcggtaacattccacagcgcgtcaaggaacgcgatctggaacgagcccggcccgtgcgaagtcgtatcggctatctctgccgcgcggttgtacagcagagatgcggacagagcggcggtcaacggatcggaaaccgccagatatgtggcagccacgccgcccagcgagcagcctgcaccgatgatcttggtcatcatcgcgctgccgcccggcagtcggtacacggtttcgccgtcggtcaccagatcggcgatgccggacacagccactgcacagcgggtggaagcgtcatgggaggaatgcttggcgtgctgttcggtcagatactgtgccagcgccaccgccgcaccggttgcggactccacgtcgtcgacggattccactccggcggggcggtgctcggaagcgtcccccacggtttcggtattgagcccccacatgttcgccagcgcgattacctcggaggcgttcgcgcgaatcatggtcgggggagcggccttgaaggtctgaagaatggcggtgcgggtgtggccgatgccggcggccaccgggtcgagcacccacggcttgtccaagtagttgagtcgctgggcgatttcgggcagcgcatccttatagaacggcagcagcgtgcccacgttgatgtagttcgcgcccgcgattttcgcggtttcgatcacgtcgtccggcaggaaactcatggccgcagtgccgccggccgccagttgcgcgttggcgaccaaattgatggtcacaaaattggtgaatgactgggccaatggagtcgtctcgcgtacgcggcgaacggcatcggcgatattgtcgcggatgggtgaatcggctggaaccggagtcccggcggtacaaccgctggacacatcggcaaacgatgatgcactattgctcatttactgctccctacgatggtcttaaccaacaggttctaagggtcaggctcaggcctttctcaactcgcgaaccacatgcgagtccccctgcactacagtgccgacgctatgcgccaacatggacattatcgtgacggatttgttcgatacgtgtcgtcaggtctggcgcgtcccgtccattcgtgatatgtggacgcctccgccgagcaacatctcccgaatttgtgacgctaacgcgatgtcagtggtacaaattggggaagggcaaaacaacaggaacaatatggaggtgtttgcgatataggaatcgctgcgaacggccgctcgtgagaggcggaacatataccggacaatgccgcctgacctgtcaccgtatacggctatcctgaagcggttgttattagaccccaaaccgttcaaaccagaaggtgcattgtggctcagtccaaactcgatgaagtcgtatcccttgcgaagcgtcgcggcttcgtgttccccgccggcgaaatttacggcggcacccgttccgcttgggattacggccccctcggcgtcgctctcaaggacaatatcaagcgtgaatggtggcgctccatggtcgtcacccgtcctgatgtcgtcggtgtcgacacctccatcattctgccgcccgaagtgtgggtggcgtccggccacgtgagcgtgttcaacgatccgctcgtcgagtgcctcaactgccacaagcgcaaccgcgccgacaagctcgaggaatcctacgccgagaagcacggcgacaagatgccggaaaacggcatgaaggacatcgtctgcccgaactgcggcacccgtggccagtggaccgaaccgcgcgacttcaacatgatgctgcgcacccacctcggcccggtcgaggacgagaacagcctgcactacctgcgtccggagactgcacagggcatcttcgtggacttcaagaacgtgatgacctcttcccgttccaggccgccgttcggcatcgccaacatgggtaagtccttccgtaacgagatcaccccgggtaacttcatcttccgcacccgtgagttcgagcagatggagatggagttcttcgtcacgcccggcaccgatgaggaatggcaccagtactggatcgacgcccgcacccgctggtacatcgacctcggcgtcaagccggagaacctgcgccactacgagcatccgaaggagaagctctcccactactccaagcgcaccgtggacatcgaatacaagttcggcttccaaggttccgactggggcgagctcgaaggcatcgccaaccgtaccgattacgatttgagcgcgcactccaagcactccggcgaagacctgagctacttcaaccaggccaccggcgagaagtacgtgccgtacgtcatcgaaccggccgccggtctgacccgttccctgatgtgcttcctcgtggacgcctacgatgtggacgaggccccgaacaccaagggcggcgtcgacaagcgcaccgtgctgcgtctcgacccgcgtctcgccccggtcaaggccgccgtgctgccgctgagcaagaagcccgaactgcagaccgtggcacagaacctggccgacgacctgcgcttcaatgaatggatgatcgactacgacgagtccggcgccatcggccgccgttaccgtcgtcaggacgagatcggcaccccgttgtgcatcaccgtggacttcgacaccctcgaagaccatgccgtgaccatccgcgaacgtgacaccatggcccaggagcgtatcgccctcgacaaggtggccgattacgtggccgcccgcatcggcgagaagcgcacccgcgtgcccctgaagcctgtggaaatgggcggtgagccttggcctgagtccggcgttcaggaagccggcggtctgtactaaagacgggtctgtatagaggctcccctctatgaggggagctgtctacgaagtggactgaggggagccaaaactatttcagaacaggaaccacatggcagaatctgaaaccgaaaccaccatcaccgctactcacgagaccaacaatctcgacccgcgtacggacgcgccggcacggcccgagactccggtatacatcgcccccgtgcagctcggcaacattaccgtgccgaccccggtggtgctttcgccgatggcgggcgtgaccaactggccgttccgcgtgatctgcgaggaatacggtcccgatggtctttacgtggccgagatgatcaccgcgcgggccctcgtggcgcgcaacccgaaagccctgcgtctctgccatttcgccaaaagcgaaaaaattcgttcgctgcagttgtatggcgtgaatccgtccatcaccgaacaggcggcgaaaatcgtggtcgacggcaacatggccgaccatgtggacctgaacttcggttgcccggtacccaaggtcacccgtcgcgggggaggctcggccctgccatggaaaaccgacatcttcaccgagctcatccagcgcgtggtcgccgtatgcgagccggcgggcatccccgtcacctcgaagatccgcgtcggcatcgaccataaccatgagaccttcctcgaagccggacacatcgcgcaggaggagggctgcaaggccgtaaccctgcatgcccgcaccaccgccgaatactatggcggtcattccgactggtcccgcatcggcgagctcaaggaacacctcaacattccggtattcggcaatggcgatatctggggcgccgaggacgcgctcgaaatggtgcgcgagaccggctgcgacggcgtggccatcggccgcggatgtcagggccggccgtggctgttcgccaacatcaaaaacgccttcgagggcaatcccgaacggctcaacccgaatctgggcgaggtctgccgggtgattcaccgtcatgccgagctgcttaccgagttttatgagggcgatgagatgatggccgtccacgatctgcgcaagcacatcgcctggtatctgaaaggattcccggtgggcggctccacccgcaaggcctttatggaatgcgagagcctggccgatgtggaccgcgagatcggcaagctcgacccgaccatcgaatacccgccacgcgtggtcgacaaaccgcgcggccgcgtgcgtttcgccaagaaggtgcacttgccgtatggctggttggaatcgcgtaccaccacccacgaagagcgtgaggcgctcttcggtgacgacccaatggacgccagttactgagaaaatactgaaaatacacgcaacacgcgccattctgcgcgtgaatttccctccaagagtagcctgtttgcgctactcttgggtgtaaccgtgaagtgacaggagccaaacgtgagcgagatcgcgcagaatgagttcaacgacaagaccaacatcaaggttgttggcgtcggcggtgccggcggtaatgccgtcaatcgcatgattgccgagggattacagaatgttgaatttgtggcggtaaataccgatgcgaaggatcttctgcgctctgatgcggatgtcaagatttccctttccgataagtccagtcgtggtctcggtgctggtgccgacccggagcgtggagccaaggcggcccaggaccaccagtcggatatcgaagaggcgcttaggggtgccgacatggtgttcgtcacctgcggcgagggcggtggcaccggtactggcgccagcccgatcgtcgctcgtgcggctcatcaacagggtgctctcaccatcgcggttgttactcgtccgttcagcttcgaaggccctcagcgttccgcttccgccgaatacggcatcgacaacctgcgcaaggaagtcgacgcgctgatcgtcattccgaacgatcgcctgctcgagctttccgaccgttccatcggcatcattgaggccttcaagaccgctgataccgcactgcttgccggtgttcagggcatcactgacctgatttcgatgaactcctatattcacgtcgacttcaacgatgtgaactccattcttcgtggtgctggtactgcgctgtttggtatcggttccgcacggggagaggatcgtgccacgcaggccgccgaaatcgccatcagctctccgctgcttgaggaaagcatcgaaggcgcacacggtgcgctgatcaacatcgccggtccgaccgacctgaagttgcaggaggcctctgctgccaccgaactggtgcgcaaggcgattcaccctgaagcccagattatttggggtcttgctctggacgatgcttatggcgatgaagtgcgtgtcactgttattgctgctggttttgaccccgtcgccgctcaagatgacgacactcagagcacggtgacgccggttgtgccaaccgccgccgatcctgcgactcccgtggcacagccagctccagcaccggcaccggctgcacagcccgctgccactgcccaaccggcattcacaccggctatcggtgactccgcatcgttgccttttgatgatccgacttccgctcatccgaatatcgccgtgaacgatccggctggcgatctcgacatccctgacttcctgcgctgaaaggattgatccatggctgggttcatgaaaaacgcgatgtcctatctgggcatgagtgacgttgtggacgatgaggacgactacatcgaggaggacgaggagcagaagccggcttcgaagtccgcatttgattccgaccatacggtcacgccgctggcgtcaaccaccgcgcctgccgcatcgtcgactaccaagccgttccccggtggccgtgtgaacagaatcaccaccatccatccgaagtcatatgaggatgctcagctggtcggtcgcgcattgcgtgacggtgttccggtcgtactgaatctcaccggtgtggccgaagccgtggcatatcgcattgtggacttctccgccggcgtggtgttcggcgtgcgtggttccctcgagcgtgtcactccgcgcgtgttcctgttgagcccggcgcaggtgaacatcaaggtcgaagagccgacaaaaccaacctcgtcccacgatttgttcgctgactgaccggttcagtagttttcgcattcgacgttatatcggtattcggccgactcccagcaaggagtcggccgattcttattgcgctccgagcaaacttttcatgcgcggttgttagtctgtcagcatgctttccttagtgttctctctgatcggccgcattcttgcatggctcatcaacgcgtatatcacggttctgttcgtgcgcatgattctggactgggtctccgttctcgcacgaaactggtatccacgtggtgtggtggcccagctgatcaacattgtgtattccattaccgaaccccctctgcgctggctacgtcgctatattcgtccattgccgctcggctcgatttatcttgatgtcagcttcatcgtgctgtattttgcgttggtggtactagaaagtgttgttctgatagtgttctgaggccgtttttgacccgccggaggcatatatctggcataaaaacccacgttgaatgttctgaaacgatggggtcgtgatagcattctgacttgagaccaacgtaagtgcgggcaatgccccaaagcgaggtgcaagatttatggctctgttgacgccgaaggatattagggagcataccttccagactgttcgattcaaggaaggttatgatgtcgacgaggtcgatgacttccttgatcaggtcacggaaaccgtcgaggctcttggacgtcaggcggtagccggcggtcaggccacccagtctctgggtcctgacgtgaccaaccttaatgcgaagatctccgatcttaccggtcaggtgcagcaactccagtcggagaatgctggtttgaagaacgctgtggctcaggcccagcaggccgctcaggctggcaatgatcaggcggcacagcttgcctctgccaagctcagcgaagccgaggaatccaaccgcgcgctgtcctcccagaatgagcagctcaagggtcaggtcgatcagctgaacgctcaaatcgatcagctcaccgcccaggccgctcaggcctccggtaaccaggaagccgtcggccagcagatcgccgccattcagcaggaacgtgatcagttccgcgcggccaacgaggagctgtcccgtcagctcgccgctgctcagcaggagggttccgccgctcagcagcagtccgctcagatcgctgaactgtctcgtcagctcgaagaagccaagcagcgtgaaaaccagcttcgtgcccaggtttccaaggtcgagccgagcactgagaccggttctctgcagaagatcgctggcgtcgcttccatgccgggcaccgagcccgagcgcgccaccgccatgctgaccctggctatgcagctgcacgatcagtacgtggagaagggcaagaacaaggccaaggaaatcaccgaggccagccagaacaagtacaacgatctggtcaccaaggccaacaactactccgagcgtacccgttccgaggccgacgactactccactcgtactcgttccgacgccgacacctattcggatcgtacccgctccgaggccgacgcttaccgtgaccagattcacgcggatgccgagacctactcccagaacacccgttctgaggccgacgcatactccgtcaagactcgtcaggatgcggacaactactccaagtctcagcacgatgacgctgacaactacgagaaggaagtgcagcagcgtgccgccgagtatgacaagaacactcgttccgcagctgatgcgtacgacaagaacacccgctctgcagccgatacgtatgccgagcaggtgcgcgacaaccttcaggctcagtccaaggtcgtcgagggcaacatccagagcctcaagcagttcgagactgaataccgcgcccgcctcaccgagtacctcggccagctggcatcgcaggtttccgagtcgaacaactacgtcgaccagacctcgtccaagaccaactgagcgcaggcaggtacaggtcgtatgacgaaccaacagggacggctgcgcactcgcgtggccgtctttgcatgtgtggccgcggctgcgctgattgtcgatcagctcaccaaggcttgggcgatggccgcgttatccaacggtcagaccattcgcgtgattcccggactgctgtcctttaccttggtgcgtaatccgggcgcgtccttgggcatggggtcaggcgctacttgggtaatcagtctgttggccgttgtggcttgcgtggcccttgctgtggctggggtgcgcactatctccatgaaatggtcggtggcgctttctttcgcgtttgcaggcgctctgggcaacctgattgaccgtgttatgtacgctgacggcttcctcgacggcaaagtggtggatttccttaactatggctggtccgttggcaatgtggcggatatctatctggtagtcgccggtgtggtcctggtgattctgattcttatgggggagccgttctcccacaaggatcttatcgagcaatccgacgaatccctacagtctgagccggaggcggacgccaagtaatgagtcgaatggtccctgctcccgatgcattggtgggtaagcgtttcgacgtagccgtggccaaaatgctgggtatttcacgatctaaagccgccgatctggttgactccggacaggcgcgcgttttagggcgtgaagttgcgcggtccagcacgttgcaggcgggggagaccgtcgaatttgatttggcggaggaacaggccgggcctgagcctatcgcaactgatatggctgttgtctacgaagatgatgatgtcgtcgtagtcgataagcctgtaggcgtggcggcgcatgcctcggttggctggaccggtcccacggtattgggatcgttgcgtgatcgtggcgtgcatatcgcttcctatggcgcggccgggcgtgaaggcattgtttctcgccttgatgtaggcacttccggcttgatgttggtgtgcaagtccgaccttgcgtacaccgagatgcgtcggcagttcgccgagcatgaggtaaagaaaacctatcatgcgctcgtgcagggcggtcttaaagagaacaaagcgaccattgaggcaccgatcgggcgcgccaaagtgtccgatttccgcttctgcgtgactccggccggcaaaccggccgttacgcattgggatgtgttggagcgtttcggccatgaggccacactggtatccgtgaatctggagaccggacgtacccatcagattcgcgtgcatttctcctcgattgggcatcctctgtgcggcgaccccatgtatggtgccaatccggtgctgtctgaagctttgggacttgaccggcagtggctgcacgccatgaagctcgaattccgccatcctcgcacccgcgtctggaccacggtccggtcccagtacccggccgacctggccgccgccctcgatgccatgcgtgcccgtcacatcgaacccgctgaacctgccgagcatgccgaagttctggtggactaattccgcaacgtgtgcatcatgcgttttaatatttagattcagttccagcctcgccggattcatcccagaataatgagagatcggtcatgatggctctccgtcatgaccataccccaagtgactgcggatgctgagtaccgttcaggccaatggtcggtaaccgtacgtgaattaccggtatttccgctcaacgtgtctcggtactccagcgtgaagtgaacagaaatgagccaaagcagtaaggctgagtacgagtattcgtggccgtcatcaatcgatggtggtcattgggattcgcgccatgtactacgcagtatgttgtacgctctgcctggctgtgactggattctggggcccgctgccggttgacgaggctgaaggcatgtaaaacttatgcatactgatctgttttcttaaatttggctttatcaatggtgtcgcgcaggctctttacccgcgttcggattcgatcgttcgttttctccatggtcgtccgggctcgatcgagccggaccggtgccatatccggatcgcagatgactggcgattccggaagatctacgaaaacgtcatctttagatgacgattcaacgtttcatattgcaggtctccttacggggcgttacgtccgatcgcattctttgaaaaatgggccacctagatttccgaggagattgaagggcaacacgtgacttcggtagaccaaagctgccggaatatctccgtcaaaccgcctgtagctcgatggtgttgtcgcattgtgcggcgatgccaagatcgtgggtgacgatgatgagggtcttgccgtattcgtgctggaggcggagcatttcgtcgaagacatgttgggcgagatcgcggtcgagcgcgccggtgggctcgaccgcgaggatcaaatcccccgggcttcaatatgcatcgtgcgagggcgacgcgctgctgttcaccgccggagagggtcatgatcttgtctcccgcgacatggccgagtccgagccgggagagcatggccttggccttgcgctgcctgacctgtttgctgtcacgggtgaagcgcatgccgagggtgacgttgtcaagggcgctcatgtcgtggtagggggctgcggatgcgggcaagccatttcttggaagacgtttcgtcgagattggcgggagcttgcgtcagcaggcgtcgatgaaggcgctgaggatgcgacgttggttgctatcggcgcggtgagagaactcaggatgccattggacggcccagacgaaacgtttggccggcatccagaccgcctccacgatgccgtccggcgcggtggccatcggttccagtccctggcccagcgtgcgaatcgcctgatggtgataactgttgacgcccagcgtataggcgcgcggatgatacggcctgccgaaggaatcgacctcatcggcctccgcctcactcgggccgttgtctcccagcggccacaacgcgcgggccaacggcgaatcgggcgcgatcgacacttcgtggaccaccgggtcatacggcggcttgtcgccatgatgcacgaccgggctgggatgttcgtccggcagatcctgccacaacgtgccacccaaggcgacgttgaggctctggatgccgcggcagatgcccagcaatggcttgtccgccgcgatgacggaggggatcaggcgctcctccatccggtcgcgggccttgcatagtttgaccgtcttggggccggccgcctcgccataccgttctggatccacgtcgtggccgccggtgaccaggaacccatcgcattggctgaccagctgttcgattgtagtctcgtcgtcggtcagcggcagcatcaccgggatgccgccggcttcgatgatgccgtcgaaatagccgggcagcatccacaggctattcagtgtgtcgtcccacaacgggaccacgccgataagcggacgatgggccatcgatacctccaaatacagacttactgataaagcgactcaacttgctacagtctcaaacctgaaaattgtaccactgtgacttgcgggcggagcctaccccgatgtctatttagaagtgcaacacccttgttggtcctgcaattctaacagttcgtcggcgaacgcctcggcgggcgtgcggtagccgagcacgcgcatggggcggttgttgatctcgtcgacgatctccctgacctcctttgccatgtccatccgtatctcgcagcgtttgggcagatac

SEQ ID NO: 2681 - DNA, 3653 bp, Unknown
  R36_18m  MAG No. k141_5981
catgacgagcacgcccatcgaggcgatccacaccacgatgatcgggccgagatccttgatacgcggcagctgcagaccgagcatcttcttaccgcccacggccagctggtcgcgatgatcgaacaggtaggcagcgaagaagaacgcgaggaacagtttggcgaactcgcccggctggaactggcccaatcccggaatcctgatccagatgcgcgcgccgttcacctccatgccgatgaacggcagcatcggggcgagcagcagcaccaggcccaccaccatcgacacataggagaagcgtcgtagcacgcggtagtccttcaggaagatgatgagcagcgcggaaagcacgatggcgatgcacagccacaccagctggcgttgggccaccgcccaaccttcgctctggtcgatgcgggcgatcatggtcacgccggtggcggtcagcagtagcacgcaaggcagaatcgactggctggcgtacggctggaagcgcacaatcagcccccacagcaccagaaacagcactacgaccaatgccagcatgccggcgtattgcatagggaattcgccggcggtgcgttggaacatctggatgaacgccaacgcgctgatcgccatggcaatcagcaacaaggaaatctgacgtagacgggtagcgatcattgagaatcccccgtggccgcgttgtcggccgctccgataccggatttatccgaggaatcagatgagcttgacgaaccggactggctggacgaatccttggtgctgtccttggaatcgctctgggaactgtctttggaactgtccagggaattggacgcctcggccttcttggcggcgtcggcttcctgctgcttggccagtttgcgcatttcggtgcggatgatacccacatgcgactgcgcttcgtccaacgaaccgactgtgatgccttggctcagctggtcacgccatgtctgaggcaggtccgcggtggcgatattggtggtctgcacttcgtgcgaaagctcaagtccaaagagattggtcggcacgccacgataaatggccacggtgccgttgctatctcccacgtagtagtgcgtctggctccacgtgtacacgccccagccagcgccggccaaggccagcacggcaagaatgcaggtaataatcaccgcaagcttattgcggcgcttcttggtgcgcgtggccttcttctgctcgatctgctcatcgcggatggctttggccacatccgggtcgttggggtcggcggacaggcgcccatccggcttttgcaccaccggaatctcaccggtatcgggattggctcgttcaccggtctcctcgcggacggtggacggctgcaccacgcgtgtggacgacggttcggccgtggtttgcgcggcctccgtctcgtgcgcgctggcgggctgaatcaatgctgcggcgcgctgggcgggggaatcatcctcacgcagcgcgggcgcggtagccaccggctcgttgacgatgtcggcgatcggctcaagattacggctggcggcaccgccgaccaacggcgtttggtgcggcagatcgaacgcatcggcatccaacgccaacgtggcatccgcaataacggccgtgacattatcggtgctgcctgcccgcagtgccatctgcaccagacgctgcgcgcattcgccctgatcggacagcgtggtcatcgtctcttcgatggtggaatcttccagcacaccgcacaggccgtccgagcacagcagccaacggtcggcggggtgggctcggcgaatcgaaatatccgggcgcgggtcaatgtcaaagtcgccaagcacgcgcatcacgacgttgcgctgcgggtggttcttggcttcggacggggtgatacgaccggtgttgatgaggtgttgcacgtagctgtggtcgcacgtgatgcggctcaggtgtccgtcgcgcagcaggtaggcgcgcgaatcgccgatatgggcgatgacccagtagccggccaccaatgccactgcggtaacggtggtgcccatgccggcaagcttgcgttcgcgcttggccttgccgacgatggcgtcatgcgcggccataacggaggtttccatcatgcgggagatcgtctcgacgttgccgccggtgtcgtcctgctcgatgtgggccagtgaccggatggcgatggaggatgccgtatcgccgccggcgtgaccgcccatgccgtcgcacatggcgatgagatgctcgccggcgaaggaggaatcctgattgttcgcgcgcacagtgcccacatcggacaccgtggtggaatacaggaacagcggttgtgaagcggcggattttggcatgcggctacctcagttcgaaggtggtggcgccgatgcgcacaggaatacgagcgggcaggatggtggggcggttgatgcgctgctggttgaccacggtgccattggtggagttcaggtcttcaatggcccactgcccggagcgcgtgtcacggtagacacgggcatggtgggaagacacgaattcgtcatcgagcaccacggtgttcgaggcggcgcggccaagcgtgatgtcggcttcggccagcggcacggagctgccggcaagcggaccatcgatgatgaccaacagggtaggctgcgtcgaggcggcggacgacgcggaagcgctgggctggcgatgcgggcgcggcgcagctgcctgcggcgtttcggccttggccttatgcacttcacgctcacggcgacgacgcgcgcgcgaaggtcgcggactgaacgtctcgatgtccttgcgcagcgaacgcacggccagccagatgaatatccacagcaggatcaggaatccatacttgagcagggcgaatgtcagttcggtcataagtggacgactttcgggcgtgtgctcgactactcctgggcttgggcggaggcccagtacaggatgcgggtacggccgatggtgatggtgttgccatcgagcagcgtggcggcgggcacttggtggccctccacgtacgtgccgttggtcgaacccaggtcgcgggcgatcacgccgttatccgtgatgtcgatttccaggtgcttgcgggagatgcccggatcgtcgatgacgatatcgcaaccggaaccgcggccgattaccgtcttgtctttggtgagcaggtactggttgccgttcacctcgagcaccgggctatcctcggtctgcgcatcggtggtgaccggcacggcattgccctgcacggattcggaggtgaggttgaagttgcccttggacaggtcaaggtcttcctcgaagatcacgatcaccgggcccacgaaggcgtaatgctggctcttcgcgtactcggtgaggttatcggccagttcgttggccagggtctcgctaccccatgcctcgatacggtcgaagtcaggagtactgagcttgaaacggtattcattcggggccaccgtgcggtcacggcccacgggcatggcctcggcgtcaatctcgcgctccaaggcgctggaaagatcgacaggctgcaggtctttggagccaaacttggcgaatactccgttgactgcaccctccacgcttttttcaaaacggtcgagaacgctcatagtcctccctttctaatcttcacccatcctacgcggtgatgggaatatgag

SEQ ID NO: 2682 - DNA, 18718 bp, Unknown
  R36_18m  MAG No. k141_6087
gaactgcacgtggcggttgttcaggccacgctccatctcgttggtccggtccaggctttcgacagacttgagtttgcccgtagcctgccgtgtaccaccattcacattcgtatcggccatactgatttcatttctcttctccgccgcccgattgttacgcaccggacgcgatactcgttcaaaacaagttcggactgtatcaccgaaatatgtcacgaaaacgctcagctcaagaatacatgcgatgatactgtaaatattcagccaagaagttcaatttaccaacaccaaattgaacttctacctctattccacggacttgagcgagctgaccgggtctacgcgatcgagcactgggttggtgaacagctgcaccagcagcgcgaacgccagcgtcgccaccacggcaatcgcatagctgtaccagtgcacttccacttcgaaatacagcgacggcatattcaacgcagcagtcagtaatccgcctatccacctgccaagcggcagaccaaccaccacacccataccggtcaatatcatcatctcgcggttcacgtagttgtgcacctcgcggtcatagaagcccagcaccttcagtgtggccatctcgcggatgcgttcggacacgttcgtattggccaacgtaaacagcaccaccagcgccaggccgccggcgagccccacaatcagcgccaccacggcacccatcaaatcgaacttaaacgtggcggccagatgcgcacagctcacggccttgagcaccgacgattcctcgcccaaccgatccgcatattcggcctgttcggtctcggaacctttcagcttggcgagcatcgcgttccacgtcaaggtcgaggcagtgccatctcccgaagccgaagacgtcacaccgccggccgcaaacttctggtcgtacagtcgctcactgatgtacacatcagagccaataagattgcgcgtcacggccgtgacctgcaccttggcccggctgctaccgccattgcccagcgtgacggtgtcgccggcatgaatattcagcgagttggcggcggactgcgatacaatcacgccactatcgtccagcgctacagtgccgccacccgctttgccgaagatattgggcagcccaaaccatccatcatcgccagcttgttccagcgtgaccatatcgttcaagatattcagcgaatcgttgggcacggtcatcagctgcacggtttcgctttcctgcgccgcattgctcatctcgccactatccacgcgcagattcagcgtttcggtggtttggccatcttgtgccacctgcttgcgcatcgcggtggcgtcatcgtcattggccacgaccatcaggtcgtactggtagatctgctcgtattgtttgacgccaatcgtgtcgacggtgtcattaatcgcaaatccgcagataatcaacgctgtgcaaccggccacgccgcccacggtcataatcaagcgcgacttgaatcggaagatattgcgcgcggtgactttgccgaggaagttcagccggctccataccgggcgaatccgctccagcaatatgcgagcgcccgctttcggtgccttcggccgcatcagcgcggcgggcgtgtgccgcatctcctcgcgacaggcgagcgcggtggccacgcccacgccgaccacgaacagcacgatgccggccgaaccgtacagccagtcgtattcgagtcgcacaccgggcaatatatacagtccctcaatcaccaccagcaggaatgccgggatgccaaggaatccgaccagcagaccgatgccgccgccgaccaagcaggcgagcaacgcgaacagcagataccggctggacacggcgagtccgccatagccgagtccaaggtaggtgccgataagtccgcggtcttcctcgaccatgcgggtcatggtggtcaggctcatgagcacggcgaccagcaggaacacaatcgggaatgcgcggccgatggattcgatggaactgacgtctgatttgagcgagctgaatccgtcgatcgaagcgcgcgtctgcacataccaacgtgcgttggccacatcgtcgatgcgccgttgctgcttggcgaattcgctttccgcttcgcttcgcttcgcatcgagttcagactgcgcatcatccagtttcgccttgccgtccgcgagctgttgtccgccttcttccagctgccgctcgccttcttcgagctgctgcttgccgctggccagttgggcggcctgcgcttcaagttgcgccgattgggtttcgagggttgcggcattcgcttcgagttccgcggatttggtattgagctgtgcctctcctgcagccgcttcctgttccttggcggtcagttgcgcgttctgctggtccaaggtggattgtgcgggggcaatggtttcgtttaatgtgcgctgcaaatcggctttctgctgggtcagactgtctcgctgcgtttgcagttccgtttgcttggcggccagctgttgccgcagctcactgattgacggcacttcaggcagggtaatgccaaggcgcgcgagcagttgcttgatggcctgccatgtgggtgagttgaagtcgatattcgggtcaagttgcgccagtagattgtcggcctgttgaatcatggacagcatctgatcaatttgtgccacgccttggtcgatttgggtaatgccctgttcgattttcgtgcgattggcagtcagttccgtttgcgccgcatcgagctgtttgcgagccgaggtgagctgcgctttgcccgattcgagctgggtgcgcgcttcggctatctgctggcgaccttgcgcgatctgttgacgggccgatgcaatctgcgcacgtccatcggcgagctgccgttcgccatcggtaatggttgtcctgttgttctccaattcggtacggctatcttgcaatgtcgttttgttggcttccagctcggcccagttgtcgtcgatctgcttctgggcttcgtccagctgctcgttggcctcgtctttggcatcatccagtttgcgctgcgcgctggagacgatctgttgacgacgggctttctggcgtgtggcctgtatctgatgttcgatacggtcggccacggttttgatggcttcatcgtaggcatcggaaaacgtgtcaaaatcggacgcaccagtgacggcaaccgatatcgcagtgtatatattgccggtcacgccgtcgctgggtgcaaagaacgtatagtcctcggatgaggtggaccggaaggaggtcatgcccgaatagccgtctggattgttgaggtcgcgcgggtcgagtacgacgccggtgatggtgagtttcgtggggaactgcggggattgctcggcgtcggcgtccgtattggcgtcggacttcgcatcggatgccgaggcattggcggcgacacctaccgtatcggcattattggaatcgtcagtctccgtggccgctaccgatatgacggatgaagaggtgtcttgtggcgtcacagtaatggtgccgccaatcttgagtccgctatcgttcaggaattgctgcgtaaccgccacttcgccggccttgttcggcagtttgccctgccgtatgtacggctgatcaagcccttcggtaccgatttcctgcatggtcacggttttcttggtgccgtccaccaacgtggtcaccgtctgagaacgttcgggctgcacggtttgcacaccgtcgattcggcgcagtgccgttgcatcatcatcggtcaggccgtatgtggatagcacctgcaggtcatgcagtccctgctgatcgtaaaaacgaccggccgccagaaaagcatcgcggcatccggcgtagatgccggtcagcacggccacgccaagcagcgtgatgacggcgatcgagacgaacctcttccagctgcgcagccagcaacgcaacgtatctttggcaaataccgcagaaacgcccgctcctcgaccgccgctatcgtcgaggttccgccgcttcacagaatgtttcacaggttgtttcacgaatcgcctcgcttgtttcacggggcgtttcacagagtgtcttgcagtgagcatcgccaatcacctaccattcgatatcggcgatgggccgcggcgttgcgttgacctcctcgctggtcaccttgccggagcggaagcgaatcactttgtgagccatcggtgcaagcgcggaattatgcgtgatgatcattacggtcatgccttgtgtttggcaaatatcctgcagcaactgcagcacttccttgccggtctcgtaatcgagcgcaccggtcggctcatcgcacaacaacagcttcggctttttggcaatcgcgcgggcgatggatacacgctgttgttcgccgccggacagttgcgcggggaagttgtccatcctctcccccagtccgactttgcgcagcgtttcctctggatcgaaatggtcagggcagatttgcgaggcgagctccacgttttcgagcgcggtaaggttaggcaccagattgtagaactggaagacgaagccgatatcgttgcgccggtaggtcaccagttcctttttccgcagacccgtaatatcgcgtccgccgaccactacgcggccggttgtggcggtatccatgccgcccagaatgttcaatgccgtggttttgccggcaccggactgccccagaatcacgcttaattcgccttgttcggcggtgaagctggcctcgtcgagcgcgcgaatcacactgctgccagaaggatattccttgaccacatggtcgaattcgatatacgccatcgcacacctccaacgcgctcgtggcagccacctagccccataggccccgccagaacttcctgctatactcaagtaaaacaacactgtgtcggttctgcaaccaacagttggattgtgggttgtcggaacttggggagaaggccatggccaaagaattgacggaaagccgccgcacccgctacacgagacgtgccatgcaggacgcgcttatcgagttgctgcgcgatcagccgctcggctccatcaccgttaaagcgttgtgcgagcgggccgatgtgaatcgttccacgttttacgcgcattatgcgagcatcgaggaactgctgcacgacattgaagacgaaaccatggcctgggtcaccaccgcactcgaacagctactcgcccagccagatcctgccggcatcgagcatgttattgagcgcatctgccagtacattgccgacaatcgcaatcatctccaagtgctgatgagcccgaaagcggatatcggtttccagcagcagctgctgggattgatttacagccagcgcggtgtaggcgaacagttgcaatcttcggcgggttacccagccgaggcgcagatgcgtatgcgattcgccgtgtccggcagcattgggcttttgcaatattggctcgccaacgatctcgcggcctctcccgaatcggtgtcccacaccatcttcaccatgtgtatgcctgccacgcagtgagcacagtgaattcagtgaactcagtgaactcagtgaagcgtgcggtttcataagcatcgctcgctatagcttcgcctgctcaccggccgcgcccacgcccgcgcttgcaatagcgcacaaatagacgattgaccatttctgagacgatacggcggcatagaataacgaacgttgcgcatcacggcaagccccgcgtgcgccaaacccaagaaatgtgagagaagagcacaatgagtactactgatgcgcctaagaagccgcgcgaaaccgacgacgtgccggtgccggccacgctgcgcaagtcattgaaaaaccgccacatccagctgattgcgctgggcggcgccatcggaaccggcctgttctatggttccagtgaatccatcgcgctggccggaccctcgattctgctcgcctacttggttggcggcctcgcgattttcgcgattgtgcgtgcactgtctgaaatgtccgttgaggatccgaaggcgggcgcgttcagctactatgccacccgctactggtccaagcgcgccggctttatttccggctggaactactggttcaactacatcctcgtctcgatggtggagctatcagtggtgggttcgtttgtgaactactggttcccggcgattccgacatgggtgtcggcggccgtgttcttggtgatcatctgcgccgccaacctgctgggcgtctctaaattcggtgagttcgagttctggttcgccatcatcaagattgtggccgtgatcgccatgattatcggcggcctggccgtcatcatctttgtcctgcccaccgcatccggcgtgcgcgcaagcttcgcgaactggttcaccgtgggtaacggcttcttcccgaacggcctgatggggcagaattccgacggttcctggaccggcctgctgatggcactggttgtggtgatgttcagcttcggcggcaccgagctcatcggcatcaccgccggcgaaaccgaggatccgaagaccacgattccgcgcgccaccaatgatattatttggcgaatcctcgtgttctacatcggcgctctgggtgtgatcatggccgtagtgccgtggaacaccatcgatggcaagtccagcccgttcgtgcagatcttcgattccgtgggcattcacgcggctgccggtattttgaacttcgtgtgcctgaccgctgtgatgagcgtctacaactccggcctgtacgccaactcccgcatgttgtactcgctggccaagcagggcaatgcgcccgcttacttgggcaagctcaactcgcgcggcgtgccagtggccggcgtgctgacgtccgccgcgatcaccgccatcgccgtggtcgtggtgttcgtgtggcctgagttcgcgttcaactacctgatgtcgattgccaccattgccggcatcatcaactggacgatgatcatgctcaccgaaatgaagttccgtaaggtggtcgccgcgggcggcgctcccgaggattccgagctggccggtctgagcggccaggaggcactggacgcgattcacttcaaactgccgtttgccaaggtgaccccgtgggtggtgctggcgttcctggcgctggtcgtggtgctgatgtgcttctccaccagctaccgcatcgccgtcatcgccggcgtgatctggctggccatcctcttcgccgcctaccagctcactcaggcgaagaagtaaggctccatttgcgaatagctctcactgatgagcactcagtgagagctattcgcaaatgggatttattcatgaaacagctcatcgatgccgacgagctgaacgtcggattgagacgccgcagcatcgtcgaccagtgattgatcgaaaccgccgagcgaaaacagcaggtatgttcgctggccgataccggttcgcgcagcacggtctcgcagtagattcagcacggaacggtccaccggcgcattgcggaatttgcactcgcccacaatggcagcatcagacgcattgtcaacggccatcacgtctatctcatcctgacgatcccaccaacggccaaccgcacgcgcacggaagggcaaccgtccagcagcactctcacgccacatccattcacggcacagaccctcgaacggtttgccggcaaaatcatgtaataccggcttgatatgacgctcgtatacgccttccacatcgccccgctccaattccgaacgatacggaaagacaaacgaataccagaatcggaagaaattgtcgctcagctgatacagcccacgcgaacctttcgcccgctccttaggcttcgccgtgactgggaactcacgttccacaatccccagttccataagattggcgagatacgacgatactgttgcgtttgccatcatcgtgtgtgtcgcgatctcattcagcgaagttgcgccgagcgcgatcgcccgtatcacgctgttatatttcgcagtttcccgcagttcttcgtgcaacaaaaattcaacctcgctgtatagcggagcaatgcgtctcagaatatgccgcttgacatttgcgtctatggtctcatctgggtcaaattcctctaggtaacgcgggataccgcccagtattgcgtaggccagcgccttatcctcgctactatagttggggaagaattgcgctgcatcccaatatggcatcggcagcatcttcaggatgccggtcgcacgaccatatagcggcgatttttctcccaacagctccttttcgatgaagctcatggcactgccgcaaatcacaatcatcagatttgcatgacgcaacgtgtggtcccaaagattctgtagcactgacggcaatgacggatcagatttgaccagataaggaaactcatcgaatatcacaagcctgcggccgccatcgctcggctctggcagccgggttaactcggttaacgccctttcccaagaaggatattgactcagataatccttgcccggggcacccgcctcgaacatgagacgggagaacgatgccagctgttcatctttagtggcattctgcgccgcgaagaataaggtttccttgtcttttgcgagttgaataagcgtctctgtttttcccacgcgcctgcggccgtagacgaacacaagctgtgccctacgctcagtgaaacattcctgcagttgcttgaggtcatcgtctcgtccgatgaatgccatgctgcccgcctcctttatgccatacgccggcgtatttctatcgcatcacgatttattgtatcacgattagtataatcgtgattatacaagctgtgacgaggtgcgggtacgggccaatcggcatcgacgagaccagccgcaggggccacaattacatcaccgtggtcgccgatctcgtggagcacgatgtcatcaacgtgacgccgggcaaggactcgaccacggtcgaacggttctcgcgtgatttcatggaccacaacggggtcccggaatatgtgcgtctggtcgcctgcgacatgagcctgggcttccggaagggcatccgtgagcatctgccccatgcgcggcggatcgtcgacaggttccacgtggccaggcacgccaacgaggccgtcgacaaggtcaggaagacggaaggccgctccaacccgctgctcaaacggaccaagtacctgtggctgtgcaacgaggaaagcctgaccgaactgcaggtggagaccaagcgcaacctgacgaggcaacggttgaagaccggccgcgcctgccggatgcgcgaggtcctgcaggacatccacacggacagccgcaccccgtccgaggcatgggtgcgcctgcatcgcctgtgctcgtggatgatgcactcgaggctcgagcccatgaaggacttcgcccgcatgatccgacgccacttcgccgagatcgtcgcctacttcgagcacccgtacaccaacgccgtgctcaagggcgccgacagcgtcatccagaacgtcaaacgacgggcgagaggcttccgcaacatggactacttcgccaccatgatctacctgacctgcggcagactcgacctcaaagccgtcaccaccacttgaccatcacccaccacaaacagcgaatagcctcaatttgttatctttaccgcgcttgcgtggacagagaacgctcagacctcgaagatcgccgcatattcgcgagagaacccgcctagtcaatgagatatggattgaaaacacgctcggtgacggggatatggagcatcagcatggtgccgtaaccaagaaccaccagcaggaacagtccaccgggcatgtagaaccagctggccaccagcagcgccacgaacacggcatccacgatgaccagggccacggtcatcgcgatgtgggagatgccgaagatgaaggcgttcttcaaggtgccggccacggtgttctcgaagcgtgcctgaagcgcgaacacccattcgaagccgataagccagaggatggtcagcgcgaatttgatgatgagcagcggcgtgatctgcaggacgatccatgaccagaccagtgcaatcagcaccaccaagaacggcagccacagcagtgtggctttgatgaagttggctttgaatgacttgaagtagttggcggttacgcctttgccctcgccctcgatggagcggcggcaagcatcatggccggcggtcagggccgcaccgatggtgatgagcggaatcgaagtgaccagcatcagaatgttgatccatacgccgtcaacaagattgctccacgcgcgcatgaatttcgagtccggtgccagccagttcatcaactactccttgtgtcgcctgtggctcccctctctgaggggagctgtcatcgcagatgactgaggggagacttgatggagctcaggatactcccctcagtcggcttccgccgacggctcccctcaaagaggggagccggattggtggagctcagcccttgaccgctccgccttcggccctgcaattacggactcgcctacgacgaggctcatcattagcttcgccgctgtcgcggctcagcctggagcctgctggaagcccactgggcttccagccatgggctgacgacgcgagtcgtcagcccttgacggctcccgccatgacaccagagactatatacttctggcataccaagtagaagacgatgatggggatgattgccagcaccaggcaggccatcatggcgcccatatccacggaaccgtagccgcccttgaggtattgcacggcgaccgagatggtcttgtacttgccgaggtcgagcgtcaggtacggcagcaggtaatcgttccagatccacatggcttcgaggatggccaccgagacgatcgacggcttcataatcggcaccacgatctggaagaagatgcgcggcactgacgcgccgtcgatcatggcggactcctcaagctcctgcgggatgcccttgatcacgccggtgaagatgaacacggccagaccggccccgaaaccgaggtacacgatgcacaggccccacggggtattgagcttcagcatgtcggcgatcttggagagggtgaacatcaccatctggaacggcacgatcatgttgaacaggaacagggtgtagagcagcttcgcggcccagttgttcacgcgcacgatccaccatgcgcacatcgaggtgcacaccagaatcagcaccaccgagccgacggtgataagcagcgtccagccgaaggaagcgaagaactgcgtggtctcgatgccgcgcacatagttctcaagtcccacgaacgccttgccggcaggcagggagaaggcgttcttggagatgtacgccttctgcttgaaggagttgatcagcaccaggacgatcgggaaaacccagaacagggagacgacggcaaacagcacagtccataatgcgccatgcttcacaggcttgttctcgttcatcaggctgccacctccttgctcgtggtgagcttgttctgaatcagggcgatgaccgcgaccaggatgaagaacagcacggccttcgcctggccgacgccttcccagcccatacggccgtagaaggtgcgggtgatgttcagcgccagaccttcagacatgttgctcggcgcaccgttggtcaatgcgaggttctgatcgtagagcttgaaaccgttggtcacggtcaggaaggagcacacggtgatggacggcatcatcagcgggatgatgatgcggaacatggtctgccgtccgttggcgccgtccacggccgcggcctccagcacatcggtgggcagggcttgcaggccggcgatgtagatgatcatcatgtagccgatctgctgccagcacaccaggatgaccaagccccagaacccgtaggacgccttataggtcagggcgcggccccagtgggctagtacgccgttcaggagcagcagccagatgtagcccaggatgatgccgccgataaggttcggcatgaagaataccgagcggaacagcgtggagcccttgatcgccttggtcagcatgtaggcgatggcgaaggcgatcacgttgatcacgatggtggtcacgatggtaaacgcggtggagaagccgagcgcgtgcaggaattccttgtctttcaacgctttgccatagttcttaagccccacccattcaccgtcggtaacggtggtgaattcgcagaagcttaagtagacgcccatgatgaagggcaccaggaacccgatgatgaatgcggcgaatgtggggagcgcgaacagcgcccaccatctgcgtatcgccttgccagccatgctgatcatgacttttcctcctccttgagtccgctgcgttgcgacactgcatcgtgcgccggctgcggagttcaactcaatgcgagcctgccgatcgagaaccgcatgcacggcctgttctcgttcaagcctatgttcatagtaaacgtcgaatcattatatgtcaaacgttgtcattttcagcgtttcaatctcgagcatactccagctccagcaatcttctttcaactaagataatggctatataaagccaatatgacgccgtcatagacactttgcaaacgtttgtaatacaatcgttgtcatcgccgcaaatcaatcaatcagcatgtacactgtagtcagttgtgcatgtgtattgcgattttccattcaacgcaagggggctgcaatggctacgagcattcaggatgtcgcccgcgaggccggcgtctccatctccaccgtctcacgttccttcaccaggccggatctggtgtcggccaagacccgcgagcgcgtgctcgccatcgccgacaaactcaatttctcactctcccgctcggctgcggccctgaaatccggccgcgccctgcgcatcgcagtactgatgagcggccatatccgcctgtggttcaccgcctcggtcatcgaggggctcaacgaggtgctgcacacgcagggctacgatatttcggtattccagatttccagcatcgaggagcgcaaggaattcttcgagatgttgccggtacgccgtaacgccgatgccgtgattgtggcgtctttcgatatcgacaacaacgaaatcgcgcaactggcttcggtcggcgtgccgatcgtcggcatcaattcagtcgagcccgaagcccgcggctttaccgccgccgtcaatatcgacgacgtgcagggctccacgctggccgcccgccatcttatcaatctcggacatcgccgcatcacctatatcagcaccaatcgcgaggtgtcgctgagcttctccgtgcaaagccgattcgactcattcaccgcctgctgccgcagggaaggcatcgagccgcaggtcatcgtctgcaaggtcgatgacgatggacgttatgaaatcagcgacgtagtcgaccaactcatgagccaagacgagatgcccaccgccatcgcatgccaggaggatggcatcgctttgccgcttatgttccagctggagcgcaatggattctccgtgcccggcgacgtctcgctggtcggctacgacgatagtttctacaccggcgatatcggcctgaccaccatccgccaggatccggtggaaatggcccgcgtggcagcccgcatgacgctcgatctcattgacgagaagccgattgagcaaccctatatcgtgttcccggcccagctgaaggtccgctcctccacctcccgcgttaagtaggctcacacaacaaagcccaccatagaaaaagtgtgaggcaaccgcacaataacgctcaatcgcacattgtgggaaatggcgaaaaatcgccaatccatggacccacagtgtgcgattggccgggtgtgtgcctcacactttttctgcggcggccgattttgtgcgagactcagcaatacaaagcggcgcccctggagaaggaaaggcaggggcgccgcggattgttgcttatcggctatgggactctatgagactcagtgcgaggcctcgtattcggaagcccaaccgtccacgaaggcggtcttgacggcatcccacttgccggtgccctgcgcgtactcgagcagcgcctggccgaccttgttcttccattcctcggacggcatcatggtgaagttccaagaaacctgggtcttgccggactcctggtcttccacggcggcctcggtcagcgggttgtcgcttttgacgtcatcgaaggtcttgaacggggtggtgaagcccatgtcctgagagagggccttcttgccggtatcagaggtgatcacccacttgaggaagtcctcggtggccttcttgtcggcgtcggaggccttgtcattgatgcaccagtagttctcggaaccggtggtcagaccctgcttctcctcgcccttgacgccgatgtagatcggcatcatgcctacctgatcggcggtcatgccggccttctgcaggtcggtccaggcccaggtaccgttctggtagaaggcggcctcgccgagcgcgaactcggagttcgcatcatctccggtcttggcgctcagctgggtgggttcggtggtggagtcggtgatgtacaggtcgaagatcttcttgtagttcggcaggtaggtgcccttgatcttggccggctgctcggtgacgttgtcgtccttgaactcgtagtaaagcggcagattggccaggtgggtcttgaaacgccagtcggagctggagtcgaagccggcggaggtgaacgcgcccttgatgccgagctcgtccttgcgggcctgcatgtcgtcggccacggccttcagggtgtcgaagttgtcgatttcgtccatggacgtggccttggcgccatccagcgcgaagtacttgttgaggatgtccttgttgtagatcaggccgtaggtttccatcacatacggcacgccgaccaccttgtcgccatccttcagggccacatcttggttggtgagctccttgtacacatccgtattggacatatcggcggtgtacttcttccagttctggtagccgaccgggccgttgacctggaacaaggtcggggcttcggttttggcgatttcggacttcagggtctgctcgtaggtaccggaggccgcggtctgcaccttgacctcaacgcccttttccttggtgtattccttggccagagcggtccactgatcagccgcttccggcttgaaattcaggtagtagaccttgcccttggcgtcatcgccggaggtcgagcttccgcaggccgccaaagcgccgagggacatcgcagcgacagccgccatcgcgactgctgacttgactgtacgattcatcatcgaacctttctctttcatcgtcgacccggccgtccccggtcaggacaggtacgctagcacgcacctttacgactatcgacatgcactattgtgcaacggtttgcttctttttgcaaacgatagcaatatcggcgcgtcataaatcatcattttcaggccattgtcaacaaatatcccattaattcagtcatttttgcctcattatcgcaatgcaagcgttcgcaatcatgagagcgctaacatatctttcatggcaatcgattgccacttatacccatcaaaaaacaacacgccgacgctatcgtttgcaaatcatttatcgacataccgcaattcccgccacaaacaataaaggcccgcccgcagcagcgggcaggccagcgcaatcgcagcgcaaccggggctaggcgttccaccgttcgatgacgttatctcccttatagacgctgagcaccgagtagtgcgccgtatccaaacgcagcaaccgtgcgaaatgcgggtccacgcccagccattgcgaggtgaggatgcgcaggatgtgcgcatgagccaccaacagcacattatggccgtctttcagcagcggcgtaatctcatcgatggcgctcttggcgcgtaccgctgcttcttccagcgtctcgccaggcccggcatggaccggcacctgttcgcccgaaggcaaggtctcgacccagtcgccctccagcgtgggcgtcagcgagcgcggcccgtcacgccacacatcccattcaaaaccgctggcctcactcacctgctggcgcgtacgcccctcggctcggccgtaatcccattcagcgatgccgtccaacacaccgtggtccgcaaaaccagccaattcagcggtttggcacgcccgcttcagcggactggaaaacacacagctctggctgaatccttcggggaaggcctcgcgcaggcgccttccggcatccgctgcctgctgctcgccgaccgcggtcaacgggatgtccgtgcgcccggtatgctgcccggattcgctccacacggtctggccgtggcgcagcaacaccaaaaatccattgccgccacgagagttctcgacggcaacggtgccgttcacgttctgttcgctcatgcctccactctagtctgcgctcgttcatgactccaccattaacgcccatcttttgcgctgagatgattgagatgctattagactgagagtcatgagcgacgaaacgaacaccgacttcccctccagcgccgaccgcgcggtcgacagcctgcaccgcatcgacgagaaggtcaacaggctgcgcgaggaccggctcaacgaccctgattctctgggcgacaagctcatcaagtcggcagtcccagcgctggcaggcttggttgccggcaaagcattccagatgatatgggacaagggcacaagcaaacgcaatctgcgcaagggactggcggcagacgcgccgcaaagtctggcaatgagtctggcattcgccgccgtttcggccgcactcggcgcagtggtttcgcagctgtcggatcggggctccaaggcgttcgtcgaccaccgccatcgcaagcccagccgctaatcccccggttggatgatggtttctgttggctgactgatgactcatcgctggaatttcgtcaaggaaccatcagtcaatcgacaggaaccatcagtccagcacagttccgccacacaatatcggcatttcactgtgaggtaatccaccgtggcgtccggcgtctgccgtgcgacaataaagccatggttaccaacgcaacaatcgaggctcttctgggccgccgctccatccgtaagttcaaggacgaggccatcgacgacgatacccgcgccacgctcgaaaccgtcgcccagcatgccgcgtccagccagttccttaacgactggtccgccatccgtatcaccgacccggccaccaaagccaagctcgccgaattcggccatcagccgtatatcgccacgcgccgttgctgtacgtgttcgtcatcgacgagcaccgcaacgcacgcatcgccgaacgcaagggtatcgatcccgcttccgacgaattccatctcaagtacagctatcgcttcacccaagctcagaacgacgccgtgctggccctgcacgccatggagaccgccgcctattcgctgggactgggctgcgtgattctcggctctctgctcaacaacatccccggccttatcgacgtgctgaatctgccggaatacacgtatccggtgctgggtctggccatcggcaagcccgatcagaacccgaccgtcaagccgcgcatgccgcgcacgatgcagttcttcgagaacacctacccggctgacgccgatggcgtactcgaccagctgcccgccttcgacgaggaagttcaccggtactacgatctgcgccaagccgaccgtccggtggacgctttcagcgatcaggtcgccacgatcagtcggcaggatgtcagccatcagacactgctcgacaaggccgccgctcagggcttccgtctggatcagtgagaccagaaccaacgagatagcctcggataggctcgtcactgagtcgtctcggtctcagcactgcgacgactcagttccaacacctcaacatttcatcaccggataccggcaaaattgcacagccatcccgccggtgtcgcaccatcaacaaacgttcacatatcagtcccattatgcggacaaccaacggccagttttgcaagaaaacccgccaaaccagcagtatccgcaccagtggtgggaatagactgcatgtggccgcaatgactacgaaccggaaaagagggactggatgcggacggtttggcaagtctttctacgcgattgcagacgtatcttacgcaatcccgttgccgttgtggtgacgctcggcgtagcaatgctgccctcgctgtacgcatggttcaacattctcgccaactgggatccctattcagccaccggcaatctgcaagtggccgtagccaatgaagaccaaggcatcaccaacgatctggtcggccatctcgatgcgggccggcaggtcgtcaagaaactcaagcagaacgacgaactcggctggcgcttcgtagacaatgaggaacaggccgtacacggcgtggagaccggcgaatactatgcagccatcgtgctgcccaaggatttcagcaccagcctggtcgaatcggtgaccggaacctccaaacagccgaaaatcaagtattacgtcaacgagaagaagaacgcgatcgcgccgaaaatcaccgacaccggtgccaccaccatcgacgagcagatcaactccgccttcgtcaccacggtagccaccaccgttgcctcggccgtttccgaagcgggaggcgatctcgaccaagccaccggcaaagtccagcacgatacgatcaatgatctcaatacggtgatgtccacgctgaacaccgttcaggattcactcaccgacttaca

SEQ ID NO: 2683 - DNA, 3003 bp, Unknown
  R36_18m  MAG No. k141_6139
ataatttcagctcccctctggaggggagctgatataagacctcaaacgggaacttctggccccaaaggtcgcgaatcgcatccatcagctccatgatgcggatggtgtcggcgtgcggcatcgcctcgcattcgatcttgccatccagcagcgcgttggctgcatcggccacctcatactcataaccggtcaactgcgacggcaccgcaacactgcgcacgggcttgtgatcgttgttgtagatatcgatggactcgggattgttgatattggtgaccaccaaatacccttcggtgccccacacgtagccgccgcgatcggaggaaaccagcatcgaactggtggacacggccatcgtgccatcatcgtaatacaacgtggtggaattctgtgcatccacaccggtttcggcggccatcatcgacgtatcgaaatgatccagcgtgcggccatggtcggcaccgatcgccatatccaggaagttcagcggatacacgcccacatcgagcagcgcgccaccggcacaggccggatcggtcatacgtgccttgccggacaccggatagcacaggttggcgctcgccgctttcacctcgccgatctcgccggactcgataacttcgttgatgagcttgcggctgggcatgtagcgcgtccagatggcctccgtgcacagcatgccggtttcctcggccacggccagcgcctcacgtgcctgcccggcgttcgcggtgaacgacttctccaccagcacgttcttgccggctttcatacacaggatcgcctgttcggcgtgcagactgtgcggggtggcgatatacaccagatccacatccgggtccgccgtcaactcctcatacgatccataagccttgtcaaaatgccattggtcggcaaaagcctgcgcgcgcgtaatatcacgggccgctaccgcatacgggtgaatccatgaggaatacagtgaaccttcagccatctgggtcagggtgtcggccatggtgtgagctatgcggcccgcacccagaatcgcgacgttgatcttttcgccgctggcctcgaactcggcgcgtttgccattgaatcgactcattattcctccttgaatacgggttggtacactcaatcgacctacagtgattatagaagaagaaaccttgtcccgtgaggcggatagaaccgaaatatggaaaacgaagcagcgcagcagccccaatctccggccgcgtctccagtcatgtcccgccgagcgcgtgaggtcaatcccttccgtgccatggtattcggcgaacaagcagacaagatgatcgcccaaggtatcagcgtcatcaaattaagccttggcgagcccgatttcggcgcgccgcccgccgtacgcgacgccatgcgcgaacagtacgacggccgggccctgccgtacaccgccgccatgggcctacctgaactgcgtcaggccatcgccgacttctaccgcgagcgtcatgaccttgacatcgaccccaagcgtatctgcgtgaccgccggcggttcggccgctctgctgttggccaccgcgctgaccgtggaccccggtgacgatgtgattgtggccgacccctcctacccgtgcaaccgcgaacttgtgcgctcctttgaggggcgggtcatcgacgttccgacctcggccgccacccgcttccacctgaccgccgacctgtgcagccagtactggacaagcaagaccaaggccgtaatgatcacgtcgccgtccaaccccaccggcaccaccatcgacttcaacgtattggacgaggtgtgcaagttggccgccagccgcggcgcatggcgcatcgtggacgaaacctacctcgacttggctgaccgggagccggacggtaccgaagtcaaatccgtgctggcctgcgaccccgatgccatcgtatgcaacagcttctccaagttcttcggcatgaccggctggcgtctcggctgggctattctgcccgacgaccccaccgtgctggaagcggtcgacgacctggccaccaactactacctgtgcgcccacacgcccacgcaacatgcggcgctcgcctgcttcacgccggaaagcttggcggaatgcgaagctcgtcgtcaggaattgctggcccgtcgccgcattgtgattgacgggctcaagcgcatcggtttgccggttgaggtggagccgaatggcgcgttctacgcctacttcaacatttcccgtactggtctggatgcctggacgttctgcgaacgcgcgctggatgaagcccatgtggctctgactcctggccgcgacttcggtgcggccacagcggatacgcatgtgcgcctgagctatgccgcctcacgtgaggccctgaccgaggggctggaacgtctcggaacgttcgtcgaatcgttgtgaacggcgcggcatccggtgtgattgttgtacggtagtcgagtttgtgtgatgttcggctggcctcgcggtgttggttgccggccgaacgactcgccatggtggcgcacggctggctgattgcgatggtcggcccgttgttcggccatcacgggttaggtaaggtcaggaatagggatcatggtcaatctgcgttcgcgcaccacgcgacttggtgtgcttgatatcggttcgaacactatccacatgcttatcgtcgacgccgctcccggcgctcgccctgaccccgaggccagcaccaaatccacagtgcgcctgatgaagtatttaaaggatgacggctcaatcaagaagtccggcatcgaggcgattctggaagccgtgtcccagtgtatgcggctggccgaggaatacgaaatcacccaaccgccacggtagccaacaacgccgcatgatcggagccctcgactttgaccaccttgcattgcccggccttcatgccctgatcaagcaccacgtggtcaataccggcgaacatcggcatatacacgcggttcgtaggccacgaaaacgtaaacccatgtccggattcacgtgcg

SEQ ID NO: 2684 - DNA, 9617 bp, Unknown
  R36_18m  MAG No. k141_6199
caacctgcccatcaccgacgctccattgcccccagccgggagaaccggcaccatacgccatgcccgcgccgccgcacagcacactcgctgagccggaaagcgagagacaggatacccccatgttttccatcactctgaaacttatgaagaaaagcgccaggatgctgattccggcaggcatcgccatcctgatcggcactgcgttcatcgccgctaccttcctgttcggcaacgcgatgaacgatgcgcttgccgcccagaataccgcccagctcggcggcgcgaactacgtgatcagcccggatagcggcaaggacctgaccgataaggaccaggactacatctacacgcgcacggttaacgacttccagcttgaccgcatccgcgccaccaaaggcgtcaaggacgcacgtgccggctacgcgggttccgtgaccgtaacccgtggcaacaagcatgccagcagctacgtcatcaccaccgccacaaagcgcacgctgctgccggtcaccatcacgcaaggagaccagccggcggacagcaacgagatcgccctgaccaagtccgtagccgaccagctcggcgtcaaggtaggggaccgtgtgaccgtcaactcgcaggcggcgcagtatgcgggcaagaccggcgattcggccggtaataccggtgacgctggtgatgagtcggcccagaacgccgatggcacgagctcgcacgacggtgattccgatgccgcgtccggcgcgtccgccccatccgacggcaccgacacggccgccgactccggcatgaccgtgcgcgtggtcggcctcaccgacgacccgaacggtgcctacgcctactacggtggcgcttccgtgctttccgacaacgtcatcaccgcaatggccggcagcaacgatttcggcaacctgcctgtctacctcgtctatctcgacatcgacgatgccagcgacacggccgcggcatccaccgtaaaacaggtcagcacactgctccctaagcatttcagcgtgcaatcccgtgccgcgctcgtcgaggaatccgtcaaaagcatgagctcgggcgaaaccagcatcaccaccatcttcctgctgagcttcggcatgctcgccatgctggtcgcggcactcgtcatcgccaacaccttccaagtgctcgtggcacagcgccgccgcacactcgccctgctgcgcaccatcggcgcgaacaaaagccagctgtatgtctccgtgctgtttgaagccggtgtgctgggactgatcgcctccgcactgggagtgggcctgggcatcggactcatggccgcactatgccagtcgggcctgatgaaagccaccggcatgaccatgcgactggtactatccggtccggtgttcacggtgcctatggcattcggcatcattatgacggtgattgcctcgctaggctccgcgcgttccgctaccgccgtcaccccgctggaagcgttgcgacccatcgaactgaccgacacgcgacgggccggtgtggtccgcgccgtgatttccatgctgctgattgtgggcggcgtggcactgtgcgcattctctgtatggcagatgtccgagaaaatcgccggacgtgattcaatggccgacaagcagtattcgctggtgctgctcgccgccatcatcggatgtgcattgatcttccttggactggtgctttccgccacgttctggctaccggtgctcatgcgcggcgtgggcgcgctggttgcactggccggtccgtccgccaaagtggcacatgcgaacattcagaagaacccgcgccgcgtggccgccaccggtgccgcactgcttatcggcgtgacgctggtctccaccatcgccaccggtgccgccagcgccaagcaaaccatgaacgaggcgctgaccacgcgctacagcgtcgacatgattgccgctggcgccgatatgactggcaaacaggccggcgaggcagccaaagtcaagggcgttcagagcagtatctacgcgccgacccgcatgatgaccatgaaggatgccgacggcaagagcctgagtgtgctggtcgtgggcgtggatggcgtcgacgcgctgcgcaaggtggtgcgctccgatttgtccggtgtgaccattgatggcgattccgtactgatgcccaagtattccgccgctacaggcaaggatattccgctggacaagagcgttacgttcacggctggagcggccgaagcacaagccgatgccgccaatggtccgtccggtaatgatgcgaacggcagcgccgaaaacggcaatggacaatccggcggcacacagacgctgacgctcaaaccgcggaaggtggactatcgccgcattgcctccaactacgccgcggtcgccttcgtggacgccagccacttcaccaacggtggaatcaaggccgacgggcatatcatgcttatgcgtattgacgccgagggcgcgggtgttgcgctgaacgacgtattcaccaacgtgcagaatgtgttctccgccagtgctggcgttaccgtgaccggtccggtggccgaacgtacgcaatgggagaccatgatcaacggcatgatggcattgttggtcggtttgattgcggtggctgtgctcatcgccttggtcggtgtggcgaacacgctgagtctgtcggtgatcgaacgcacacgcgaatccgccaccttgcgtgccatcggcatgacgcgcggccaactgcggcgctcgctggcggtggaggcgttgctgctttcgctcgtctccggcgtggtgggagtggtattgggtaccctgttcggctggctcggatcctacatggtgtttagtttgtacggcgacaccgtgttcccgttcgaatgggccaccaacggtgtggtgctcggcgtcgccgcgctcgccgctctgctggccagcgtggcacccgcccgccgggccgtcaaaacgccaccagttgaagccttggccgaagcgtagagcaataagctccctcatcagagggagcttttttgttacaccagcccgttatcgtacgcgaagactacagcctgtacgcggtcacgggcgttgattttggcgaggatatgcgccacgtgggttttgacggtgggaagggagataaagagcttgtccgcgatctcctgattgctcagaccatgggcgatctccaccagcacctcgcgttcacggtcggtaagcagatccagttcgggatcggtgtatgctgggcgtgacgtattggaaccgtcggaagcggccccggcaggggaggggatgccggtcatcgagccggcaccgttgccggccgcaccgccagagacgccgacggcggaaccgtacacggcaccggagcgcgcgacatcgccggtcagcgaaccatgctgcgcgtaaccgtcctgcatcatcttttcgatgagtcgcttggtggcggaaggcgcgataatcgcattgccttggaatacagtacgaatcgaattgagcaacgtttccggttcggtgtccttgagcaggaagcccgaggcgccggcattgatggccgccatcacatactcgtccaaatcgaacgtcgtcagaatgattacgcgcgtcggccggtcgtcagccgattcggccgagacggtcgcgtcggcggccgggctggccgaatcggccgcgttgtccggcgcggcggagagcgaggtaatacggctcgtggcctcaatgccatccatgccgggcatgcgcacatccatcagcaccacgtcgggatgcagggattccgccaacgccacggcttgggcgccgtcggacgcctgcccgaccacctccatatccggttgcgaaccaatgaccatggcaaaaccggcacgtaccagctcctggtcgtccgcaataatcacgcgaatgcttctgctctcgttcatgctctccactgtatccgtttcctatcggagcgccgctccataaacaccctgattgttccctgagttcttattgggcaagtctctcaccggggtaacgttcccgcgtgttgcatctgactatccaacgaagccgccggtcgcaactgcatatccggctgcacaccctcatgggcctcgtcgctgaacccggtttcacgcaacactctcaacagctgacgcatatgagccaatgcggcgcgcccccgagcaccaatcgcggcaaaagccgcttcaatctgcatactatcaggcgcaggttcggcgttgagcatcaccagtccctcgtcagcctgcgcaatcaccgattccagcgtggtcagtacttcggtttgcatcgccgcactaatacggttgcgctctaagttggccgccagcaccttttgccgctcctgctcggctcgcagcgcctcctcgcgtcgcaacagcaccagagcgtttgcgccacgcgaacggctccatcgagccatcgcaatgcaggcaaaaccgaccaacatgattcccgcgcccggcagcaagccggacaaaaccagcctccattttgagagcatggaactaccatcgggcaaaaacagatggaacagctgactgtatccattccacccagccatcaccttgatgcccgcaagccacgaatcggctgccagcgccacgctcacccagcgccaagcggactctcgtccatacaataccgccgaatacacggataccatcgcaaacatattgatggtcaaaatcgatggcaagaacaacagttgcacagcagacagcaccgccatcgccagcgcgctgccctctgggaagcggcgacggaacgccaaaggcgagagcataataatcgtcagcgttatagtcggcacgcggttcggcgaatacggggcattgccgatcatttgcaaatcgccatacgtggcggaatcaaatagcgcaatcagcacgatagtggcgataacgtccatcagaagatagtgacgctcggtccactgcgcaaatcgacccacccagttcgactcacgcgtatctccttggtcgagtactttggggcgcgcccgatccatcaatcctcgtatacgcgagataacggttagcaccggatcctccgtatcggtgccagactgtggggcggcaggggagagcggaatcgtagccgccacaataaagccaccattcggccctgggccggcctgcacgctgccacccaacgactcaatgcgttcatgcataccaaccaatccgtatccgggcttatgaccgtctgctgcagacgtcgcgccacggccgttatcggatacggtaatcgacagcacatcgtttgaccagatttcatcgatggtggctttagcaccctcgcccgcatgtttgcgcgtattggtcagcgcttcctgcacaagacggaacacggcggtttccgcgtcggcggacagccggtcaggttgcgctttgccggtcatatgccgggacaccaccagatgaccgtcaaacagcgaatcgatgtcggcatatccggtactgccactcgcaccgaacacattgaacagacgctgcatatcatgctgcgcgcgttcggcctcatgccgaatcgtacccatcgtgtgcttggcgatggccagatcatgcgcacccgcataccggccgccatccgactgcacaataatcgtggagagcgtatgtgccaccacatcatgcatatcacgggcgatgcgtgcgcgttcggccagcgccgcgatgcgcgtctcctcggcctctttcgccacaatggaagcgttgcgctctcgcatggccgccagcgtggcgttgcgcgctcgctgccacaaggccatgatgatgacgctcagcacgctcgattcgatgaacgccgcctccatgccgaagtccgcgagcatcttggccccgcagttgacggcgccgcttgcccccacgacgccggtgaccgccgggcatgtgggcatcatgatggcatcggacagccagccgtcgcggatgacgcgcgaaccggaggaaggtccggcgaacagcggacccacgttgaaagacaccgaccagaccatcgccgcgaccagtcccatgacgaacgccgtgacgatgaaccgccaggaatgtcggggattgccgtacagaatcaccgaatacaccatgatcagggcgtagaaatcgaaatacatgatcgccgggccgaacacaagatgcgtgatggtcagcgccacgaacagccaggccgccggctccgggcaatacctgcgcagcatcagcggcacgaagaccggcagcgaccacagcgtcatcgacgcctgagttgcgggaaacaatatgccgcccgtcgaatcagggctggtgacgccgatgaacggcacgcagccggcgatcagcgctgcggcgagcaacgtgtcccatagcagtgtgcgggtcgactcccgtgcgcaccatgccctcacgcgcgccataatctccataacgcgcaaggctagcgtgtccggcgacgaaccggtatcactcttcaggaggatttatggactagagtcttgaaccatgacaatgctgagcaaatactacgtgcccggactggccatagaggaccattccatcgatgttccgctcgactggaccggccatgagccaggccaagcgttcgacggcgaaaccatcaaactgttctatcgcgtggtcaccgcgcccgaacacgtgcatgacgacctgcccctgctgattttcctgcaaggcggtcccggcggtgccggcccgcgcctcaacagcccgacctccgacggatggatcgaggaggccatcaggcacttccgggtgatcctgcccgaccagcgcggcgccggccgctcctcgcgcgtggacacgcacgccatggcccgcatcgccgccgcgcacgacgatgatgccgcggccggcgcacgagcccaagccgactacctgaagaagttccttgccgattccatcgtgcgtgacttcgaacatctgcgcctgaccgaattcggtggccgcaagtgggtgacgatgggccaaagctacggcggcttcctgaccctgaccacactgtccctgttcccggccggcgtaatcgccagcttcaccaccggcggcatcccgcacgtgccggtcgacgccgctgaagtgtacgagcataccttcccgcgcatggtgcgcaagacgactcagttctacgagcgctacccacaggacaaggagcgcgtggccgccatcgccgacaagttgccgactactgcggaagtcgccgaattcgttggcaaactcaccgattccgtactgaatccgatggctggtaccgatgtggagcatcgacttggcgtgatcgccggcatggccgcccacggcttcccgctgatgccgaacggcgacccgctcaccgtcgaacgcttccagtgcttgggatccgactttggcatgaagccgagcttcgagcgtgtccattggattcttgacgacgccttccttgatggcgatggttccgcttctgccgactcgccgttgtctgacgaatttttgaccaaagtgatgaacgccacgtcgtcgcgcccactgtactggccgctgcaggaattcatctacgccaacggcgagcttgacgagcccattcgttgggccgcccagcgcgtgcgcgatggcaagcccgaattcggtgctgatgaacgcccgctcaacttcactggcgaggccatgttcccgtggatgttcgaacaggaggccgcattgcgcccgttcaagccggccatggacctgctcatggaagacacgcacttcggcgtgatctatgacgaaggtcagctggcccgcaatgaggtgccgctgcaggccgccgtctacttcgacgacatgtacgtcgattccggcctgcagctcgacaccttgagccgcgtgggcaacagccactactggaccaccaacgaattcgagcatgacggtctgcacggctcgctcgtcttcaagcatctctatgacgaagccctcaaccggggcgacctcgaagaactgttctgactcaaggaagcaagctccctctgatgagggagctctgtatacatgcacgaaaggaaaacgtatgactcagaacctcaccatcggttttatcggatatggcaacatggcccaggccatcgcccaaggcttcgttgacgcgggcgtggtcgccggcggccagatggtcgcctgcgccgcccactacgacaagcttgagaagaccaccgccgaacttggcgtgcgtccgttgcacaatgcgctggaagtggtgacggccgccgacgtggtcatcatcgccatcaagccctaccagatcgccgccgtcgtcaagccgctggccgacgaacttgccaagccgggcaagatcgtcgtctccatcgccgccggctggaatctcaagaagtaccaggacctgttcaccaccgaagacggcgaatccgtcgactcttcggacatccatatccagtgcaccattccgaacactccgatggccgtgggcaagggcgtgcttgtcaccgaatccgtcaacacactgaccgacgacgaaaccgaaaccttcgaaagcctgttcgggccgatcagcctcatcgagcgcgtggacaccgcgcatatgaacatcgccatggtggtggccggctgcgcgcccgccttcactgacatgtacatcgaggccttgggcgacgccggcgtgcagtacggtctgcagcgagccacggcctaccggcttgccgccaagatggtcgaaggtgtcggcgcgctctacatggccaccgaaacccatcccggtgccatgaaggacgccgtgtgctcgcccggcggcaccaccatcaagggcgtcgcccagctcgaaaaggacggtttccgcggctcggtcatcgacgccgtagacgccatcgtcggctgactgccaatcagagtttgcgtatattcgcatatcacagtcaaagccttcgaaccgtatgctcggaggcttttgcatatggccggttcaccacatgcaggttcaaggtgtccagcttctccctagacttggaatcatgtctcttactatcggaatcgtcggactgcccaacgtcggcaagtccaccatgttcaacgcactgacccgcaacaacgtgctggctgaaaactacccgttcgccaccatcgaaccgaacaccggcatcgtaccgttgccggacaagcgtttgcccgtgctggccaagctggtccacaccgaaaaggtcgtgcccgccacggtgaccttcgtggacatcgccggcatcgtcaagggcgcctccgaaggcgaaggcctgggcaacaagttcctggccaacatccgcgaggcggacgcgatttgcgaggttgtgcgcgccttcgaggacgacgacatcgtccacgtcaacggcaaggtggatccggccgacgacatcgacaccatcaacaccgagctgatcctcgccgacctgcagaccatcgaaaacgcgctgcccaagctggagaaggatctgaggggcaagaagatcgagccggcctacatggacgcagtcaagcaggcaaagaccatccttgaagccggcgagacgctcgacaaggccgcacgcgaaggccgcttcgacaaggattccgtctacgacctgcatctgatgaccgccaagccgttcatctacgtgttcaacgtggacgacaacgagctggccaacaaggacctgcaggc

SEQ ID NO: 2685 - DNA, 3620 bp, Unknown
  R36_18m  MAG No. k141_6317
cgccagggtgacgaacaggatcacgaatttgatgatgctctgtttgcgcacgcgggcggcacgcagctgcggcggcttggttgtggaagtttcggtcattgccaacgtccggccctcttttccacggcgtggctcagcagcatgacgatggccacgacgatgatcattgcgaatgccagcacctgcgcgaagccctgctggttggggtccatctcattgcgcatggcaccctggatcatgagcggcaccaggatcgaacgctgggagaacagggcggcggcggtcgcataggcggagaacgcggaggcgaacaacagcaggaacgccgagatgaagcggggtgcgaggatcgggcaggccacgcgcgtccagtattggacggtgttgccgccgagcgactcgcaggcttcgcgccactgtggacgaatggaatcgaccgcaggcaggaagatgatgatcatcagcggaatctggaagtagcagtagacggtcaccagccccggcagggagctgagccaattcgggttcacggtatagccagtcagggttttgatgagcatggtgccgatgccgttgatgccaagagtggcgatgaacgcgaacgcgagcatcacgccgccgaactgggcgagcaccgatgagatggcggcgaccatacggcgcagcggtccgttcggcttggcgccgatcaccagcgcgtaggaggcgagcgcgcccaccacggcaccgatcagggatgaggccacggacaccaggattgacgtgccgaacgcggcgatggtgttggcttcgaacatcttgtggaagttcgcaagcgtgaaaccgccgctgcgatcctggaacgcgccgatgatcacgatcacggtgggtgccagcaggaagcaggcggtgtaggcgaagaacgggagcgtggtggcgagcgtgccaagctcctgacggtgcttcgccagtgcggacgaagcgggggtcgatgcggcggacggacccgcggccttggaggcggcgggtccgttcggtgcgatgggtgcgattgcggcggtcatcgtggactctcagttgccgatcgtcttgtcccagttgttttgaagccactcggtgatgcgggtggagtcatcgttgctgtaggtgaccggctggccttcgatggtgatggcgtccttcagggtggcctggtcgacggtgccgtcggccttcatggagtcgagcagcaccgggttggcgccgcccttgaaccacaggttctgggtttcggcggtgtacaggtattcctcccacaggcgtgcggcggcggggtgcggcgcgtccttgttgatggcctggttgtagtagctgacgacctgggccttcgggaaggtcttgtacttccagttcacgcccttggacttgagttccttcttgtaggaggcctggttgtaggtccagtcgaagaccacgccggtctggccggagtcgatggtgccgttggtcacatcgatggtgttcaggttgccggcttccttgagcttcttgaagaagtcgagaccgggctgcaggttgttgatgtcgccgccggcgagctggttgaccatcagatagccgttgaaggccgcgccggcctcggtaggcttgccgttcagggacacggtgccggcgaacttcggatcgagcaggtcgttcagggaggcgacatcgccgtacttgtcggcgttccagcccacggacatgatgccggtgtagtcggcgtagtaggcgccgtcgacgttcttggcagcatcagggatcttgttccaggcctgcaccttgtacggggcgaaatagtcggtggaggtggcggcgatggcctggccgacgtcgaagacatcgggggcggcgtcggtacccttgttggtcttggcggcgtcgatctcctccttggaggaggcgttcgggttcagctcggtgatcttgatctccgggtacttcttcttgaagccctcgatgacctcgccgtagttggaccaatcatgcggcaaggcgatgacgttcagcgcgccttcttccttggcagccttctcaaggtcctccatggtgccgaaatcggcgagggaggtggccttggcggacttctcgttcacggtgacggccttgccggtgccatcggaggaggcgttgctcgagccgcaggcggccatcgagaacgcgagtacggcggcaagggagccggccgcgatcttacgcaggttgttcatactgttccttttctcaacatcatccagacgacagtctggggagtcgggcttggtatgcgcggcattcgcgcggcccgtgaatccagaaaagaaactatgcgcctaatctgtcctgacactggcgtgcaagtgaattgcgtccgccatttgccgtacgcctgttgaacttaggaaaacttggcatgaattactgacaggtatgggcaatgtgtcaatagcggaaccggcctgcggccgattccgcaccacacttacctcagcacgccctcaatcaatcgcgtgatgagttcggtgtagctcactccggtggcatcccaagccttgggatacatagaaatcggcgtgaagccgggcatggtgttgatttcgttgaccatcaccgtgccatcaggcgtcacgaaggtgtccacacggctcaagccggcaccatccacggccttgaacgcacgccgggccacgtcacgcacgtcctcaagcacgctgaccggcagattggcaggcacttccacgtggctggcggaggcatccatgtacttggagtcgaaatcgtagaactggtcgtcgttctgatgatcgagcacgatttcgccgggccagctggcctcgggctcgtcaccggccttcgggcacagcacggcacattcgatttcgcgaccatcaatcccctgttcgacgagcaccttccaatcgtgctcgccggcggtggcgatggcggcggccagacgatcctgctgggtctctcggtcatcggctttctcgaccttggtcacaccgaagctggagcctgcgcgcgaaggcttgatgaacagcggataggtaagaccggcgtcctcgatcttggcaagcacatcggcggcggtgaagttgcgcgcatcgaccgtcacaccgggcgcggtgggaatgccggcggcacccagcaccaccttggtgtaatgcttatccatgcaggcggcggaagcaaacactccgcaccccacgtacggcacacccatcatttccagcaggccttgaaccgtgccgtcctcgccataggggccgtgcagcaccggcagtaccgcgtccacatggccaagggaggtcagcgcatggtgcatttccgggtcggacatgctgacgaagccggaatcggcggaattgatgtggcgggtctcgccgatgaagaaaccgtcctgtccgcgagaggggtcaagcatcaccgggcgcgattccggggtgatctttacggtcggcagctcgccgccgtccaagttccagccacgcggatcttcgccattgatgatccacttgccgtccttggtgatgccgaccggaatcggctcgaaccgttcagtgtccatggcccccagcacaccggcagtggagatgcaggaaatcgaatgctcgtctgcacgcccaccatagagcaccacaaca

SEQ ID NO: 2686 - DNA, 5870 bp, Unknown
  R36_18m  MAG No. k141_6362
gcctgcaactttccgacggcaacggcttgagaatccaggcagtgatggccgatcctgaagccggacttgctgaagttgtggaagtggggcgcgaacccgagccgctcacccgtttggcgctgattcaggcattggcgaaaaccggccatgatgagcaggccatcgatatggctacgcagattggcgtcgaccaagtggtgccatggcaggcggaccgatccattgccaagtggaaggtcggccgtacggacaagaagtggaattcggtactggatgccgccaccgagcagtcgcggcgcgcttttaagccgcaactggaggcgtgcgcgtccagcaaggaggtcgtggccatctgccgcagggcctgcgtgcatggcgatgtggtgattgtgctgcatcaggatgctaccgatacgtggtccggcgtggaggagaaggttacgcagttggtggaacgcacgctccaggacggccggccgcggactgtcagtgtggtggtcgggcctgagggcggcatcagtgagcaggaggtagctgatttcgtcaaggccggagcggtgagctgcgtactggggcacaatattctgagagccgcgacggccggtcctgtagcgttgtcgctgttgtctcgggtgttgggacgttacgagtaacgcccacgcgctaagctggtgcgtagcaacatcaaaccaaggagcatgatgagcgaatccgacgattgcctgttctgcaagatcatcgcagggcagattcccagcagcaaggtctacgaggacgagacgacctacgcattcaacgacatcaaccccaaggccaaggtccacgtgctcgtggtgcccaagaagcactacgccaacgtcgccgaacttgccgccgacgacccgaccgagctggcccacatcgtctccatcgcgcagaacatcgccgacaaggaatttcacggcgcctaccgactggtgttcaacaccggtctcgacgccggccagaccgtcttccacgtgcacgcgcacgtgatgaccggcgaaaagctcgacgagtagtaggggaatatccgcttcgtggcaacgactacacgtaccatcaccatcccgccccaacttgaccccgtcgccgtgctcggcccggttgacgaggtcattcgcgaggtggagcgcgcctttccggacctgacgattatcgtgcgcggcaaccgcgtggcgatcgtctcccgctccaagcagaccgaagcccaggccgcacaggccgaggatttggtcaacaccatcatccaagccgcctacaccgcgcctatggacgccgacaccgtgcgtcgcatgctcgaccagaacgtgctcaagaaccacgtgcgcctcgaacatccaggtcacggcccggtgcatgacaaactggcgcaatcgacctcaaacgaacgcgcccatgcacgttctgccggctcccacgacccgacgtaccgcaagcccacggttcccggcatcatcacctttgctgccggcgtgccggtccgtgcgaaaaccgccggacaagtggcctacgtgaacgccatcgaatcgcacaccatcaccttcggcattggtcccgcaggcaccggcaagacgtatctggccgtggccaaggctgtgcgtgccttccaggacaagcagattcgccgcatcatcctcacgcgcccggccgtggaggccggcgaaagcctcggctttctgcccggcacgctgaacgacaaggttgacccgtatctgcgcccgctgtacgacgcgcttggcgacatgctcggcgccgaccagctcaagcggtacatggacgacggctccatcgaagtggcgccgctcgcctacatgcgcggtcgtacgctgaacgacgcgttcgtgatcctcgacgaggctcagaacaccaccgaacagcagatgaagatgttcctgactcgtctgggcttcaacaccacgatggtcatcaccggcgatatctcgcaggtggacctgaccgtgccgcgctcgggactggccaccatcgaacgcatcctgggcggcatcaacgacatcgcattcgtgcatctcaaaaccgaggacgtggtacgtcaccagctggtcggccagatcgtggccgcctacgaccgtcactccgccatcgccggcgaccaccgcgacatcgaacgcaagggccgccgcaaccataccgacttcgatgcccgccagcaagcggattcaaccaaccaaagtgagacagacgatgagcgttgacgtcaccaatgaaacccagtgggtcatcgaccccaaggtcttctccgatttgggtatttgggtactcgaccagatgcgcgtgagcacccagtccgacctgaccatcatgttcgtggatcccgatcccatcgccgaactgcacatgcgttggatgaacctcgaaggtccgaccgacgtgatgagcttcccgatggacgagctgcgcccaggcgacggcaaaaccgtgatggaaggagtgctcggcgacatcgtcatctgcccgtgggtcgctgcccaacaggctgccgcagccgggcacagcaccatgcaggagatgctattgctcaccatccacggcatcctgcacctgctcggctacgaccacgtgacccccgagcaggagcgccagatgttcggcctgcagcgacagctgctgctcaccttcttcgccctgcgccacgatgccaacgtgcaggccacgctgcccgccggcacacccgacgcgctggccctgtacgacgccgtgcacggtgccggccgcgacctcgattccaaataagctcccaaatcaatcacaccaaatccggattattcgataccgttcaaggacattcaaggacaccgaaaaatcattatggagtattccagtaccacgctgatcgccgtcaccgtcattctcgtacttgtggcggccctgttcgtctggctttcgctgaccatggccgccgctgaaggcgccgtggcccgcgtaacgcgagccagcctcaacaatctcatcctcgaggtgcagaccgactccgaagcaagccagttcctcaagatgaagaagatcgacaagattcatcgcgtgcaacggctcatcgccgaccgttacgccaccgccggcagctgtgcgttcttccgcatcgcctgcaatgtgctcgacggcgtactggtgtcttccatcgcatccctgtggggtgcggaactgtgggttgaactgctcgccggattcctgttcgcgattatcgtagccgtggtctccgtactggtccgcccgcgcaccgccggcatgaccaagccggtcgacatcatgatttccaactcgcgcatcgtgtcgttggccaccaagctcacgccgttcgcacgcatcggtggcgacaagtccggttccaaggggtcgggccgccgctccaaggactccgatctgtccgacgacgaggagcttgagaagattcagctcgagcagggcaaggccgccatcgaccgactggtggagtccaacgacttcgatccggaagtctccgaaatgttgcgcaacgtgctcaccctgtctgatacgttgactcgcgagatcatggtgccgcgcaccgatatgatctgcatggagcgcgactccacactgtcttccgcgctgaaactgttctcccgctccggtttctcccgcgtgccggtgatcggtgaggatgtggatgacctgatcggcgtggcctatttgaaggacgccgtgcgcgccaccgccttcaacccggcggccatggagcgcacggtcgaatccatcgtccggcagccgctgcttgttcccgaatccaagccggtggacgacctgttccatgagatgcagcgttcccgccaacatgtggccgtggtggtcgatgagtatggcggcatcgccggcatggtgactatcgaggatgccatcgaacagatcgtcggcgagctggaagacgagcacgaccgcacccagcgtaccgagccggagaaaatcggcgacaacaagtggaagatgcccgcccgtacgccgattgccgatctggaggagatcttcgagatcgacattgatgaggacgatgtcgataccgtgtacggcctgctgaccaagattctgggccgcgtgccgattgtcggtgcttcggccgtgacgcgcggtctgcgactgaccgccgtggactccgccggacgccgcaagaaggtgtccaccatcgtcgtcgaaccggcgcacgtcgagggcggcgaggaaaatagcaggacccatgaggaaactgacggcgagcccgtcgaaggcgatgataccgccagcaaggagtgatatgaccgaccagaacaacagcacgaacgacgtcgatgacattgacgtcaccgatgcttccgatgttgccggcgttgccgaagtcgacgcgaccggtgaaacggagaatgtgaccaagcaggacgtgccgtatcgctccggattcgtggccgtggtcggccgcccgaacgtcggcaaatccacgttgatcaacgcgttgatcggcaagcagatcgccatcgcatcctctcgcccggaaaccacccgtaaggcgattcgcggcatcctgaccgccgaccacgcgcagctcgtgctcgtggacacgcccggtatccaccgcccgcgtacgttgcttggccagcgtctgaacgacgtggtcgacgaatccttggccgatgtggacgtggtggccttcctgctgcccgccgaccaggaaatcggccccggcgacaagcgtattctttcccgactgcgtaccgacttcgccaccaagcgtgaggacggtacgttcaagtggcgcatcccgctgattgccatcgtcaccaagatcgacgagcttggccgtcagcaactcatcaacaagctcatcgaaatcaacgatttcgccgatttctcggacatcgtgccggtgagcgccctgaagcacgacaatctggctgaagtgaagaacgtgctcattgagcacacgcccgagggcccgcagatgtacccggacgatcagatcagcgaggagcgtccggaagacaccatcgccgaactcgtgcgcggtgcgttccttgagaccctggacgacgagttgccgcattcgctggccgtggtggtcgattccatcgactatccggaagacaacgagaccggtcagggctatgacggcaaggcgcaggtcaacgtgtccatttacgtggagcgtgactcccagaagccgatcatcatcggcaagggcgcctcgaacctcacctacgtcaagaagaagctacgcaccccggtcaaccgcatcgtcggccaaaaagccaagctcgacctccacgtcaaggtagccaaaggctggcagtccgaccccaagcaactagaacgcctcggcttctaggaatcggccttcggccggttataacaaagggagattccaatggaatctcccttttgctgtactcgagtcctccttacttcttcttggtgtacatctgggtgttgaggagggtggagtagcgcttgatgaccttggggcgaatcaccttcatggaggcggtcatcagaccgttctcctgggtgaactcctcgggcaggatgatgaacttgcgtacggattcggcgcgggagactccctcgttggcccgatcgacccactgctgcacttcggcgcgcacggcggcgttccttgccgcgtcctcgagggacatgttctcgtcaagccccttggcggcgagccacgggcgcaacgacttctcgtccaacgtcaccagggcggagataaacgggcgtttgtcgcccagcaccaacgcctgggagacgatctcgcaacgctggatgacctcctcgatcgggccgggggagacgttcttgccgccggcggtgatgatcaggtccttcttgcgcccggtgatgtacaggaa

SEQ ID NO: 2687 - DNA, 9143 bp, Unknown
  R36_18m  MAG No. k141_6524
attttcgcgatcatcggcgaggagaccggattcgtcggttgcgccatcgtattgctgttcttcgcgattctcgcctggtgcatgatcgtcatcgcattgcaggtcaccgatcgttatgttgccatggtgctgatgtgcgtcaccatttggatcgtgggccaggccatggtcaacatcggcgtggtcgtgggtgtgttcccggtattgggcgtgcctatgccgttcgtctccgcaggtggctcatcaatgatcatgtgcttgacggcggccggactggttgtgggacttatgcgttctcaaccgcagataaaacagtcgcgtcagagcgcgtaagtagactcggtaatcatgaatcaaggcacaccacatatcgttcttgctggcggcggtaccgccggacatgtcaatccgctgctcgcggtcgccggagcgattcgcgacatcgaacccacggcacaggtcaccgtcatcggcactgcggtgggtttggagaaggatttggtgcctgaggccggctacgagctcgacaccatcgaaaaagtgccgttcccgcgtcgccctgacctgtacatgcttcgcttcccggcaaaatggaagcgagaaaccgccaaggtgcgctccattcttgaaacgcggcatgcggatgtcgtggccggattcggcgggtatgcttccgcccccgtctacgccaccgcacacaagatgggcattccgattgccatccatgagcagaatgcgcgtgccggcatggccaataaactgggcgctcgttgggccgatttcatcggtaccgtgtacgaaggcaccggtctcaaaccgcgtgccggagccgacgtcgagcgtgtcggtctgccgttgcgcccgaccatcgcctccctgaccaaacgcatcggtgacgatcgtgccgccgtacgccgtgaatcggccgcgcagcttggcgtcgatccgaaccgtccgctggtgctggtcactggcggatcgctgggagcgcaaagcctgaaccgcgccatcgcctcctccgccgcagacctgttggcccacgcacaaatcatccacttgaccgggcgaggcaaaatcagcgaagtacgcgaactggtcacggcctcggccggcgcggacgtgcttaccggcatcggccccgaatcggccggacaaggtgactaccataccgccgaatatctggaacgaatcgatctggccttcgcctgtgccgacttggtgatttgccgcgccggagccggatcggtatccgagctggctgcactgggtctgccggccatttacgtgccgctgccaatcggcaacggcgagcagcgtttcaatgccgagccagtggtgaacgccggcggcggccttctggtcgcagacaaggacctgaccccgcagtgggtgcatgagcatgtgcccgatctgctcgccgatcacgaacgacttgccgaattcggccgcaaggcatgggaatacggcatcagaaacgctgccgaaatcatggcccggcacgttctgcaattagccgaaccatccaaatagtattcagatatcatcccgtgcgcgatacagaccaatcccgtcccgcaacacgagatacggtcataatatagggtgctggaatccccaaaggagttttgaattgtctcaagatcagcccatcgtgcttgaccccacgtatgcctcgttcgatgctgcggcccgccccgcggatctcggcgccacccatttcatcggtatcggcggcgccggtatgagcgttctggccgaaatgctgcacgccgaaggagtcgcggtggacggctccgatcgcgcacacagcgccaaaaccgaccgacttgaaacgctgggcatcaccgttgaattcgggcagcgagccgaaaatgtcgcccaggccgagaccgtggtctactccagcgccatcaaaccggacaatccggaaatcgtcgcagcgcacgcggcaggcaagcgcattgtgcatcgcagtgacatcctcgccctgctcatgaacggcaaacgagccgtcaccgtggccggagcgcatggcaaaaccaccaccagctccatgctgtcccacattctggtgaacgccggtgctgatccaagctacgccatcggcggctttatccaaggcccggacggcaccacgctggacggtggacacgcgggcaaaggcgatattctggtggccgaagccgacgaatcggacggcagcttcgccaaataccatccgaccatcgccattatcaccaactgtgaagccgatcatctcgaccattacggcgacgaagcccactaccgtgccgcgttcgttgcccacgccggccgggccaccggtcacgtgatcatcagtatcgacgaccccgacggacttgccgtgctggaggccatgcccgccgacgtgaaatcccataccgttgcctacggcactaccgcgcgtgaatccctgcccgatttgggcggtgccgcgtatgtctggatcgcttcggaaagcgagaccgcaggcagcggcgtcgaacagctcaccctgcatctgccggccgcggtgacggcgggggagccggtgtctcagagcgttgccctgaaggttcctggcgtgcacaatgcgcgcaatgcggccgccgccatcagcgctgccgtgctgctgggcgtgagccccgcagacgcggccaaggcggccggcacattcctcggtgcggcacgccgcttccaggtgcgcggcacggtcaagcaggtcactgtagtggacgattacgcccaccatcccaccgaaatcgcggccctgctggatgcggcccgacgccggtaccccgattcgaccattcgtgtgatcttccagccacacctgttctcccgcaccaagttcttcgcgcaccagttcgccgaatccttggccaaagccgatgacgtcattatcaccggcatcttcccggcccgtgaaaagcagaccgatttcccggacatcggcccctccaccatcgtggacgcggctgagggactcaaggacgcttccgcaggcacgtggattcagccggtcgaggatatgtgcctggccgccaagatgatggccatgcgtgcccaccacggcgacgtgatcttcaccgtgggcgcgggcgacatcactgacatggatcaggtgctgctcaccgcacttgaggcccatcgggaaagctgcgagtgatgtccgggcgcacggtcagatccgggggcaatgacaacggctcacgtcgttcgtccggaagtccccgcaagccgcgcaccatcggttcacgcggaaacacgggtcactcgtcgaagtctcgcgctccccggtccgtgtcttccgggcatgagatcaacgagccggagatcatcgacgatgtgacggtagccaagggccaggccggtgccttcgtcgatgcacgacggctgcacagcgaggattacgttgccgaaacgctgcaccagaccaccggctccctaggagtcgtatcacgcccgaaagtggtgaatttcaccgaacgcgccaaagaacgcaagcgtgcgaacgtacgtgtcgttgcgttacgcgtgttgattgctgtcgtcagcgtggctgtagtgacggggctaacgtggctgctgctcttctcgtcggtgtttcgtctggaaaccagcgagatcggcgtatccggtgccaacgaatgggtgagcgcgcagaccatccatgccatcgccgataagcaggctggaaagtcgttgttcctggtctccacccatgaggtcacagagcaactcaagtccattcccggcgtcagcgaggccaaggtctccaaacagttccccaagtcgatgagcgtggaagtcaaggcgcaacggcctgcggccatgctgaaaagaggcgataccctgaccgcggtggattcccaggcgcgtgtgttgaactcggtgaagaacgccaacgtggatggcatcccggtgatcgaggtcaaggatatagacgccagtctcaagaaccgttcggtgaaggaggcgctggcgattctgggcgcattgccggaatcgatgcgtaagtccattaccaaggtcaccgctgagacgcaggattcggtgaccaccacgcttaacgacggtgaccgcgtaatcatttggggagactcctcgcaactgaagctgaagctggcggaagtcgaggaaatcgacaagaacatcaccgctggcacggctggctttgccggcaaacatcagattgatgtttccgcatcccagaagcccatcatcaagtgacggcgattcagttggttccgttggttccggggcggcgttcgctccgttggtcctgctgacaacgttggtcccgtcaatgccggggcgatgttcgctgccggcgatttgcgcgagtagcgccatagggtgtatgctgaaaagtccggccgaaaagccggaagcttgataactcaagattgggggcgatcggtttcgacggtgacctgttcgctgcagggaagcgtgccgagaacgccgggtccgctcgtggatgaccccggcaaaagaataagtgctaaatctaaccgcactgagttcgctctcgctgcctgatttttagtcaggattaaccagtgagcagccgctccgttcactcctcctcgtctttgggaggatgctgagcgtcgtttagaagacttgctgatgcagttgagcctcagggctgcatcgggactttaactgcggatatgctcgccatcagttgtctgcgacatcgatgggggcagaaaaatcgccaacttggccagcagactacgcacgtagaagactgtgggctcggtcatcggaccggggttcaattccccgcgcctccaccaatccgcctcggcggaaacaagccgcttggctttacgaaagtaaggctgagcggcttttcttattcccgtcgattccctcgtattctctcggtttcacgggataatgtgggcaaaatgtgggcaaaaatcgagcccgcgaagccctctgtcacaacgcgagaacggccccgaccggcaagtaggccgactcgggttgagtcgtctgcgatgccggacggggccgaactgtgcgtggtggtcatgcggcgaggtcgaggcgctgtttgatggcgctgacgccgatgagcgcgccggcgaggatgccgagcgcgttgagcgtggtcactatcgcgtccacgtgagtccagccccatgcggggccgaccgtactgacgaacagggcgagtgcgggcaggacgatgaggcccaaccatttgaggatgtcgtagacgcggctggggattgcgcggttggcttcgatccgacgacctgcggttttggagaccgccgctctaccagctgagctacgcgcataggcggtcatgccggttgattgccatggcacatgaccattgggtggatatgagtaaagcccctgaaccggttgattcagaggctttcacactaatcctgatacggagtgtgccacggggtggattcaccctactcccgcttgtgttttgtttttcaggcggcttggatggtgaggcgtccgccgagggcgtggattaccttggcgatggtttggaagctggggttgccgtccttgctgaggctcttgtagaggctttcgcgccccacgcccgcgtccttggcgatctgggtcatgccccgggccttggcgacgttgccgagcgcggcctgcatgagtgcggggtcgtcgtattcggctatggcgttgaggtaggcgatgatgtcctgttcgttttcgaggtattcgctggtgtcgtagtcggtgaattcggtgctcattgtcgttgttccttgtagtcgttgaggatgtcgtgggcttgtctgatgtcggtctgctgggtgcttttgtcgccgcctgcgagcagcagcatgagcacgttgccctgcatggcgaagtagacgcggtatccggccccggtgtggaaccgcatctcgctgaccgggcctcccgcgggtttgatgtcgccgaatggcctgcctgcgagcttgcaggcatcgagccgggcttggatggaggccttcgctttgtggtccctgagtttcttgaaccacttgcggtattcggcggattgcttgatttccacacctctattgtatcctacagactacatcatgtcaagccgaacggccgctggagcccatagccaacgcaagaatctcccgtatgttgaactcccggtagccgtcatcgacgggtctcgagctggggagtttgccccggttgagccagttgctgatccgcttacggctgacctcgtacccgtagtttcccttgagccattggctcatgcctgccggtgtcttggtcaggtgtattgcctcggcctcggcttggctttgctcgcgcagctcctgcacgttgatgggattgccgcacctgcacaggcgcagcgcctcgcccttcgcggccatcacttcgcgtctgcattcggggcagacgccgattatcctgcgggtgcgcggcctgcggtcaaccttggcagagcgtccatggtgcctcgacctgctggctgccgcagtattggcatggttcggtggtgatgactgcacacgttgtactgtagggaaccatgaaagtcgtattgcaacgagtgtccgaagcgtccgtggacgtggtcaatgaattgggcacgctggatcccacgttcgagccgcagcagattggcccgggattcatgattctggtgggcgtcaccgatgaggacggcgacaagcagatcgcctggctggcccataagattctgaatctcagggtgttcgaggatgcgcagggcaagatgaaccgttcgatccaggacatcggcggcgagattctctccatctcgcagttcacgctgttcgccgacgtgcacaagggcaatcgcccgagcttcatcaaggccggcaagcccgagcatgccgatttcatgtggatcaagttcgacgaggcgttgcgctccgggggagtgccggtgaaggaaggtcgtttcggtgcgcatatgcgggtcggactggtcaatgacgggccggtgaccatcgtcatcgacaccgagcatgacatgcctgacggaacacgctgaattgcgatagtaatttgacatcatatcccgttccctccaatatgttactaaagcgctttagtcttctgcgggcgagggcgcatgtcgatatgtttcccatgaacgggcagcacaatgatgtggccgcacaagcggcagagataaggggagtgaacagcagatgttcctgaaacctgaacagcaactggagcggtgcaagcgcatagtgcgccagcgcgtggaccctcatatccacccatcgatcgcacagcttgcggtggagtcctttgacattcccggagagccgatgcccactgacgagttcttcgagaagctcaatcgaggtgacatcgacttcaagccgtttacgctcggcggtgaatggggcaccacatggggcacagtctggttccgcctgaccggtaccgtgccggccggctacccgaaaggcaagccgctggagctcatcctcgacctcggctggtacccgcactcctgcggcggccatatcgagggcctcgtctaccgtgccgacggcaccgccatcaaagccgtacacccgctcaactattgggtgccgttcatggatgctgagggcaacgcgcaagtgccggtcgccgaagacggcagcttcaccctgtacctcgaagccgccagcaacccgctgctgctcggcgtgcctccgttcattgagaccgaactgggcgaccatgccaccggcaagccggacgagccgtacgtattcaagtccgccgatctggccgaattcgatgaacgctacgagaactactccgtcgatctcgacgtggtgagctccctgatggaattcgccgacaaacagtcgccgcgctactggcaactcgccaaagcattgcagcgttcgctgaacgcctacgacgagcgcaaccccgaatccgtggaagccgcgcgcgcagcactcgccggcgtactggccaagccggccaatgcctcggccatgaacgtcagcgccatcggccacgcgcatatcgactccgcatggctgtggccggtgcgcgagacccgccgcaaggtggcccgcaccgtatccaacgcattggcgctgatggacgccgaccccgacttcaaatacgcgatgagctccgcccagcagtacgcctggctggaagaggatcatccggacatcttcaagcgcatgaagcggcgcattgaagaaggccggttcatcccggtcggcggcatgtgggtggaagccgatggcatgttgcccgccggtgagtcactgatccgccagattgcatatggccgcaaatacttcaaggaacatctcggtgtggagcccaagggcgtatggctgccggacagcttcggctacaccggcgcatggccacagatcgcccgccgtgccgggtacgaatggttcctcacgcagaagatctcgtggaacgataccaccaagttcccgcaccactcgttcatgtgggaaggcatcgacggctcgcgcatcttcacccacttcccgccggcggatacttatgctgcttggtgcaaggtccaggaactcgactacgccgagaagaacttccaggacaaggatctctccgaccgctcgcttctgctcttcggtttcggtgatggcggtggcggccccacgcgcaacatgatggagcacctgcaccgctacgagaacctcgaaggcgtctccaaggtgagcatcgaagagccgaatgacttcttcgacaaggcgcatcagcagcttgcagagaacgccggcccagaaatgcccgtctggaagggcgagctgtatctcgaactgcaccgtggcaccttgacctcgcaacaggacatgaaacgcggctgccgccaagaggaatcgctgttgcgcacggtcgaatacctgggcgcagccgccgtgttgtccgatccggagtacgtctacccgcgcgaggagctggaccgcatatggaagacgctgctgctgaaccagttccacgacatcctgcccggctcggccatcgcatgggtgcaccgcgaagcccgcgaggactatcgccgcgacctgaagcgtctcgccgaaatcgcccaagacatgtgcgccgtgctgcgcaaggccaacccgcaggccgacctgctcgccgaagcccgc

SEQ ID NO: 2688 - DNA, 8635 bp, Unknown
  R36_18m  MAG No. k141_6531
gccgtgcggggcgggcacgtccatgacgatctggtcgagcaggtcggccacgccttcgccggttttgccggagacgcgcagcacgtcgctcggctcgcagccgatcagacctgcgatctcctcggcatgcttgtccggctcggcggacggcaggtcgatcttgttgagcacgggaatgatggccagatcatggtcgatggccatatacagattggacagggtctgcgcctcgatgccctgggtggcgtcgacgagcagcaccgcgccttcgcaggcggccagtgcgcgggacacctcataggtgaagtccacgtggccgggggtgtcgatcataccgagcgtgtattcggtgccgtcaaaggtccatggcacgcgcacggcctgggatttgatggtgatgccgcgctcctgctcgatatccatacggtcgaggaagcgatcgcgcatctcgcgctcgggcacaatgccgcttaactgcaggatgcggtcggccacggtcgacttgccgtggtcgatgtgcgcgatgatacagaagttgcgaatcaccgactgatccgtggaacccggctgattgtgttggacgaccaacgcattcctcctcttggcatatactcaaacttcacctagtgtagccgagggactgtattcggcgtggcattgcgcgggtttttccggggctcatgctatcctctaccttttgtatgtccttataacacacatcgtttggagtaaacgtggcaaacattaagtcgcagaagaagcgcgtgctcaccaatgagaaggcgcaccttcgcaacgtggctgtgaagtccggcctgaagaccgccatccgcgccacccgcgaagccatcgccgccggtgacaaggctgccgccgaggccgcctacaaggttgccgcccagaagctcgacaaggctgctggcgctggcgtgatccacaagaaccaggccgccaaccgcaagtccggcctcgctgttgcgatcaacgctctgtgagcataagcctcttaaggttttagcaagtcccgcaagtcatctggcttgcgggacttttttatatctccgttcaaagaggtacattggcggtcttgcgaaatgacatctccgttcagaaaggtaccgaatccgagaaagcccaagtataaacgccgtcattgcaacgcttatactcgacgtttcgtgcttcaggcacctctttgaaagcagttgtcattttgcagaaggccaaatgtacctctttgaaggcagttagccctgaggcggtcttgaatcatcctgaggcttgtcttcttcgtccttggtggtatcgccgggatcgacggtatcggcgtgcggatggatgaccgggcgcttgagatatcggctttcgctgggcaggtagacgcgatgacgctcgacggctccgggcaaggtgacgttgaagccgaccgagagcaggcgcagcgccaccacgatgatgacgatcagcacgtcgagcagcatttccgagcacatgtcgaaccaaccgtagtgcacaccacgccatacaagcacggtcagaatgcaaccgatgaacgagggcacggcatagaggtgtttgtctcgaataatcattggcacatcgccgatgaagatgtcacgaatgaggccgccggccagtgctgtgaacatgccaaggaatacggctgtcatgcctgaggaaccgtaggccagagcttttgcggtgccgctgactgcgaatagtccgaggcccagagcatcgatgacagtcatcgtccatttgagtttggtgatctccgggtgggccaccaccgcgatgacgccagagaacagcgtggtgagcacatagcctttgtcggtgatgccgaccggcggcagggcaccgagcatcacgtcgcgcacaagaccgccgccgagtgcggtaagccatccgcacagcatgatggtgaagatgtcgtagcccttgcgaatggcggcaagtccgcccgacaatccccaacacaggattgctaaatactcgatgaccacaaaaacgatgttgttctccaacaccacctgcatgagccgctcccctctggtaccgcttcggttcgtctcagtccgtcttcgttctgttcccgttcatccttattcggcgctacagcccgtcgtacccgagcctacaacaggccttgcctgacgcaattggactagagaacaaaccgaataaatgctattgccggttcgactccacacttttttcttacagcgtcgccagcgcgccaaactttgagcagccaccgacgttagtccttctcatttgtcggaggttggccaaagtttggcacggcaccgacgatcacgcgctccagtgtcgttgccgtgccaacttatgtacagctaacgacgctaagcccctttttaccgtcgtttgatcgccagaacttgacccgttaacgacgctaaggtgtctcagcgacgtcagcagtccaaaccttgaaccattactgacattgaacatcccccagcgtcgccagaagctcatgtcttgtctcaccaccgacgcaacgccgtcgctgcctctgccaccggcttcagtttcgagcaatgctcgaagcctgacggcaaacggtaggctgaagcatagtattccgtcatgtcactcatcttgctcataggtttgctcctgttctcatctggatgaaccataaccaacccccgcaacgtgcagaagacctaaatcatattatttgttgcgaaatgttgctaaatccatctgtacctctctagccaggaacatttccaatacgccaagaccccttggaattgttgacattctaaggggtcttagtcggaaacaaaaggtgctagttcagcacaccttccacatccagttgtgcgggtcctcgacttcgccgagctggatgccgagcagctcgtcgcgcagttcgcaggtgagcttgccggagccgccgtcggcgacggtgacatcgaacttctcggacttgaagcgaccgatcggggtgatgatggcggcggtaccgcaagcgaacacctcggtgacttcaccggacttgatgtcctcgagcagctggtcgagggcgatcatggtctcgaccacgtcgtggcccttgtcctgcagcagctgaatcagagagcgacgggtcacgcccggcagaatgttgccggtcagggacggggtctccacgtggccatccttgtgcacggccatcatgttcatgccaccgagctcttcaaggtaggtcttggtggcggcgtccacaaagcacacctgctcgcagccattctcaacacccttgtactcgccgagcagggaggcggcgtagttgccgccgcacttggcgaaaccagtgccgccagggccggtgcggaaccacttgtcttcaacccagatgctcaccggcttgacgccgcccgggaagtacgggccggacggggaggcgatcacgcagtagtcgacctcctgcggggcgcgcacgccgaggaacggctcggaagcgaacatgaacggacgcatgtacagcgtgtactcgcggcgggacggcacccagttggcgtcgcgcttgaccagcgcggccacggaaccgaggaagtcgtcaatcggcagctcaggcaggtacagacgcttggcggagttctggaaacgctcggcgttcgcatccgggcggaacagccaggtggagccgtcggcatgacggtaagccttgaggccctcgaagcactcctgtgcgtagtgcagcacggaagcacccggatccatcttgagcggtgcgtacggttcgacgcggcggtcggaccagccttcgcccttggtccaggtcatgtgggtcatgttgtcggagaacacctggccgaaagccggcttgtcgatgagggactggcgcttctcatcggatgcggggttgtcgttcggcagtacggtgaacggttcggtgagcttgtcgagtgctgccggatcgtggtgcgtgttttcagtcatcactagctacttcttcttgactttggcggcccgaaagccaccatatggggtgtgtgctgtgcgcttgtggcgcgaactctgttgcatacttttgcacacccatgtgttactcgtgtggcagagttcacatggtgaaaaaacgaagaagcccacaccgttctcaacggctgcgggcttccacgtttcagttatgttctgaattgttcgctatcgaagcgaccgactcacttggcgtcggcagccggagcagcggcggcgtcagccggggcggcagcagcttccggagcggtggtggactcggtggcatcctccggcacctcgacggtgacgacggactcttccggatcctcgacgtccagctcgacgccctcaggcaggacgacatccttggcgaacaccttggtgccgtcggtcaggccttcgacgctgaccacgatcttctcgggcaggttggtgacgtcggcgcggaccttgagctcctgaatgtcgacgaacgccacggcagcacccttcggggtgccttccacgaacaccggcacctcgacgtcgatcttctcgccggccttgacctcgaggaagtcgatgtgctcgatgatgcgcttgaccgggttcttctgcacgtccttgacgacggccatcttggtgttgccgtcgaaggcgatggtgaacagggcgttggtgtgacgcagggccagggtggtctcgcgcatcggcaaggtcacgaaggcgggctcttcgccgccggcgtagatggtggccggaatcttgttggcaacgcgcagacgacgagcaacgcccttgccgaactcggaacgggcctcgccctcaagcttaatggtggtagccataatggatactccttgtatcttcgtttcgtactgtctcgctcagacgccacgacgcgccgaaagacaccctacaaggagtgaaatacgccgagtcgataacggaatctgtgtcatgtgtcagcatgcacacttccctcgccaaagcaacaattgtcaagtatacgccaaccccggactttgcgtaatgatgcttcgatgacactgcatataggccgtcccagctacgtcaacgtacggtttccgcgaaataatccctaactttgtgaagaacgtacgcttacccgttctcatcatacggttttcacgaaatcgttcgccatttcgtgaaaaccgtacgctcagcgacactcagtgtacggtctttcacgaagttggggatgatttcgaaaaataacgtacgatggtgagtaccgtatcgggaggttgatatgactcgttcggacgacgtcatcaatgaggatggccatgacgtcatcgccgcacacactcgcgttgtcaggggtatggctgcggcacttgccgcgatagccgccaccggagccggcgtcacagccgcggccgccaacgtcatgttcatgttcgcgctggacaccaaggccaaacgttcgatgttcaacatgccgcacgaggagacgccgaaaggcatcgaattcgacatgtccgagcagcttgaggccggccggtggttcgaggaggccaagcaatcggtcacgctgcgcagccatgatggatggaaactccacggctggctgttggacccggattgttccgacccacagccgcatctatacgcgatctgctgccatggctataccggagagcccgcggaaatggccaaatgggcgcatcgctatgcgcaactcggttttacggtcctgctacccgcgcagcgcgcccatgaattgagcgaagggcgttacgtgggtatgggattgctggaaagcgacgatctgttgggctgggtttcgctgatcaccgcagctgatccggatgcacgcattctgttgcatggcaattcgatgggcgccgccacggtgatgatggcggccggcgatgcgcgactcccccgcaacgtcgtcgccgcgatttccgattgcggatacagttccgtggtctcgcagtttacggataatgccgaggcgatgttccgtttgccgcactcgttggccgtgctgctggtcaaagtggccagtcatgtgtctaaacgcaaggctggataccggtttgaggacgcctcctgtgtgaaggcattacggcacgcgactattccgatgatgttcagtcatggcggagcggatacgtttgtcaacccgaagtatctggacaccaattacaacgcctgcgccagcaccgaccgcgagaagctgctgattcccggcgccgaccacacgatgagcgccagcaccgatccggaccgctattggcgtcgcgttaacagctttgttaagcgggtgtttgggctgtagtagatatagaagcttggctcccctctgtgaggggagccaagaatggttacgcgagcagttccttgacggcggcgatgacggactgcagactcttcttcgcgtcaccgaacagcatctgggtgttgtcctcgaagtagagttcgttctggataccggcgtagcccatgccgcggccacgcttcatgaccacgacgttctgggacttgtcgacgtcgagaatcggcataccggaaaccggggtgccaggacggcgagcagccgggttggtcacatcgttggcgccgacgaccagagccacgttggcctgcgggaactgcgggttgatctcatcgagatccacgagctcctcgtagggcacgttggcctcggccagcagcacgttcatgtgaccaggcatacggcctgcgaccgggtgaatggcgtaggagacttccacgccatggcccttgagcagttcgccaaggtcagcgagctcgcgctgggcctgagcctgagccagaccgaagccgggcacgaagatgaccttctgcgcgtagacgagctgaacggccagatcgtccggcgtggtctccttcatggtgccttccggaccgtcgccagcagcggcggcgtcagcaccaccgccgaagccaccggccaagacggagagcagcggacggttcatggcctgagccatgaggatggacagggtcacacctgcggaaccgacgagtgcgccggccacgatcagggcaacgttgtcaatcgccagaccggacatggccacagccgtaccggtgcaggcgttgagcacagagatgacgacgggcatatcggcgccgccgattggaatcacgaagaccaagccgtagcacagggcgaacacggtggtcagaatcgaccacagcaggcgctgttcgggctggacgcacagcataaccagcgaagcgacggacagcacggcgaacagaatgttccatacgcccttgcccggcaggttcagcttcttgacccacttgataccctgcagcttgccggcggcgatgagcgaaccggtgaaggtcacagaaccgatgaggataccgagaccagcggtgatgagcaccacgatgtccggggtgccttccttggtcaggatgtcgttcagggccacgagtgcggcggcgccaccacccacggtattgaacacggagaccagctgcggcatatcggtcatcttcaccttcttggcggagacgacaccggccacggcaccgatcaggatgccgacgaccagcaccaccacggcgacaatgttcacgaagcccttggcgaaaagcacgatgaacgccatgagcacggccacgaccatgccgaacgcggagatctggttacccttgcgggcggtcttcggcgaattcatgaaatgcagaccgaccacaaacaggacggcagagaacaggtagacgaaccatgcgacgatgtcgatggcgccaacggttgcggaggtcattacttcgactcccccttcttctcgttcttgctggacttgaacatctcaagcatgcggtcggtgaccacgtagccaccaacgacgttcatggtgcccagcacagcggccaggaagatgaacacgtaggccagcgggctattggcttcggctgccacgatcacaacgccgacgatgacgatgccgtggatggagttcgcgccggacataagcggcgtgtgcagggtggcgggcaccttgccgatgacctcgataccgatgagcagcgcgaggacgaacagggtaatggaaacgacgagagtaggcatggtattccttcttccttacttctcggacttctcggcatcggcagcagctgccggggcggcggcgcggccggcaaccaccagcgcgtcgtcaagttcttcggtgagatcctggccgagcttgccgtcacgcacgaagtgcacgaggatgtcggccacattgcgcgaaagcaggttggatgcggtggtggcgacgccggaggccaggtagggagcgccaatcagcttgacaccgccctcggtgacctgctcgccgacggcggaaccctcgacgttgccgccgaggtcggatgctgcgcagtccacgatcacggcaccacgcttgagacccttgacgccggctgcggtgagcagcaccgggggcttacggcccgggaccttggcggtggtgatgatgatgtcaaagccggcggccttctcatcgacggcagcctgctgctgagcctgctcttcggcgctcagcgcacgggcataaccgccctcgccctggcccttggagaagtcaagtcccagatcaaggaacttcgcgccgagggactcgacctcgccctgggaggcgggacgcacgtcgtacgcggtgacgaccgcgcc

SEQ ID NO: 2689 - DNA, 6119 bp, Unknown
  R36_18m  MAG No. k141_6703
gcaggcggcgagtttgttgccgaaggcgagccgcagcgcaagcacggcgacaaggccagcaagaaggccgtgaagaagaaccgcaaccgtgcggaacgccgcgccggcatgagcaaccccgaggccgagcgccgcgactatctgttcgagcatggcgatgagcgtcgtggcaatcgacgcgaggatcgtgccgacactcgatatgaggatcgccgtcgcggtaagaaatctgatgaccgttatgatgaccgtcgcggcgataagtactccaagaacggcaagtccgatcggcgagacagattcgattacgatcgaagcgatgagttcggctcgcgtaagcatgaaggcagcaagcgtatccaccgcaagaacgagaaccgcatcgtgcgtgatgagcgttccgagggggccaagcgtcacgagcgccgtatgatcgccaaatacggcaatacacaaggcccgaagcgtcaccattccaagaagaacagctcgccattccgctcgtccggtacccgcaacggacgtcgatgacgttccttggctcccctcagggagggggccaagcgctggttaatattggtacgctacggagccgtcggcgttgtggatggtgaaggtgggggattgctcgatgttgaggtccacggttagggagtgttgggcgtcggcgctcactgagcgatagacgaaatgcttgttttccagttcgagtgcctcggtacgcgcgtcaatcagccatgggttgcggcggcgcagcgcgatcagcgcctgatgcaaccggtatattggctcacccaatgtggagagattggagggggagtcggggaacttcgggcgaatatcatcgtcgccaccgaaacgctcctgcttgacgcccacatagccttgttcgtcgccataatagatgctcggcacgccgccaaccgtcagcaacaccgccaccgccaacgccgccttggccgggcctatctgcgaggcgatacgcgtcacatcatgattgccgatgaacgtctgtggcacgaaggaatccaggaacgcattatgccgcttgagattccaatccaactcaaagaagttctccgtctccagcgcatgctggatcgacttccacagctcatactgcgtgactgaatccatcgtggattcctcgatgatgcgcgggtaatcgccatggatcacctcgccgaaaacccacgaatccggatgcgtggccttgacctgcggcaacactcgcgcccagaacgcgctcggcaccgcatacgcggcgtcaagtcgccaaccggcagccccgcgatccagccagtagttcatcacatgggccacatagtcaacggtcttatcggacgaatggtccagcgctaccagatcgtcgtgcccctcgaacacatccaaagtgggttcgccattatcgccgacatgcgtgcggaccagaccgtgccacgggttatcggccggatccaagcggccgacggcttcgtcaagcgacgcctgaacggcaggatgattgcggcttacatggttgaacacgccatccaatatcacttgcaaacccatatcccggcaggcagtgatcagccggtcgaatgcagcatctcctcccagccgaacatcgatgtgcatatggtcaagcgtgtcatacccgtgcgtcgccgattcgaatatcggaccgagcagcagaccggaagcgcccaagtcacgggcatattccagccaaggaatcagcgcgtcaaggccacggccatggaattcgcgcgggccggcgggacggatatcggcgccgcagaatcccaacgggtacacgtgccagaacaccccgtacttcacccaatcgggcattgtgcggctcgaatccgtgcttacaaccactgtgcacctcctgattgataccgtgtccattttcgcacacgcatgaccgaatcctcggtagatgacgatagttgtcgatgcaggcgccgaatcgaagcatacgactgtcccgctctgttttcacgaaaggatgcgcggcgcgcagcataacaacaccataaaacccgcgcgccatgggaactacgtagccattcttccgttacaatcagtgtgacggcttccgcccccgaagaagaaggtgttgattccctttggacgtctcactggcgcatttcctccaacaagtgctttccaacccggctctgaccgtcacaacgttgctgacgctgggagtcatcttcgtcaacggctggaccgacgcacccaacgccatcgccacctgcgtgaccacacgatgcatgcgcgtacgctccgccgtcatcatggcggccatcttcaacttcctcggcgtcttcatcatgacgcagctcaacgcttccgtggcctccaccatcagcaacatggtcgatttcggcggcgacacgaacgcggcgctcatcgccctatgcgcggcgctgttctccatcgtcgtatacagcgtgggcgcctcgctgctcggcatacccacctccgaaagccacagcctgatcgccggcctgtccggagcggccatcgccatccaaggcggcatcggcggcatcaacatgggcgaatgggtcaaggtgctctacggtctggtcgcaagcctcctgttcggcttcgccgtcggctggttggtatgcaaggccgtgaccctgatttgcgctggcatggaccgccgccgcaccaacgggttcttcacctacgcgcagatcgtgggcgcggcggccatgagcttcatgcatggcgcgcaggacggccagaagttcatcggcgtgctgttcctcggcatggcgttctgcaacggccaacccagcgtgaccggtgtgatgattccggtctggctcatgattctgtgcagcaccatcatgggcgtaggcacgtccgtcggcggtgaacgcatcatcaaatccgtgggccaggacatggtgaaactcgagaaataccaaggcttctcggccgatctgtcaagcgctctgtgcctgctcgtcatgaccgtgctcggcatccccgtctccacaacgcacaccaagaccagcgccatcatgggcgtgggcgcggtacgccgcctctccgccatcaacttcggcgtggtgcgcgacatgatgctcacctgggtgttcaccttccccggttgcggtctcatcagcttcgtaatggccaaactgttcatggtcgtgttctagaaaggaatccacccatcatggcgagacaaaaagacgtgttctacttcgacggattcctccgcagcgcggactacgcatgccaggccgcgaagctgctgtccgaggtcatgcacgacttcaatccggaccagctgcgcgaacgcatggacagcatgcacgcgattgagaagtcggcggacgaggtgcgccacgacatgatggacgaactggtgaccgcgttcatcacgccgttcgaccgtgaggacatcgacgagcttggccacgtgctcgacgatgtgaccgacagcatcgaaggcgtactcaaccgcatgtactacgacaatgtgaccgacatgcgcgacgatgcggtccagatgtcggatatggtggtgcgcgccacggaaagcatctgcgagctggtcaacgaactgccgcgattccggcattccaagacgttgcgcgaactggtgttcgccatcaacacgatcgaaacggacgccgaccacctgttcatcgagtcgatgcgcacgctgcacaccacctgcaccgatccgctgcaggtgttcgcctggcatgacgtgtaccgtcacctcgaacagtgctccgacgactgcgagcgcgtggccaacaccatcgacagtatcgtcatgaaaaacagctgaggttggtttttcacaacctccctctgatgagccgagccgtgaagaaaacgccggaggcgtttttaggcgagggtgagtgacaacgagcgaataagaggtcagctgcaagctgtcctgaatcgcgttcgaggtggcatcgcgaagcgatgacggagagagatctacttgaccaaaggcccctcaccgatgggcgttgagccagaggatggcgagttgggtgcggttggtcaggccgagcttgtccagtatcgcgctgatgcgattgcggaccgtgccttcgctcaggaacagtctggcggcgatgtcgcggttatcgaggccctcggcgaccagcgcggtgatctcacgttcgcgctcgccaagcaggccctcgatggaatcggcggtatctccggaatcgtcggaatcggcaggattcggagtccgttcggtgagcttgccgagcacttccgcgccgagcaccacctgaccggccatcaccgcctgcagcgcaggcccgaccgccgccacatcctgtttgatgagatagcccttggcgccaagccccatcgcctgcgcgatatacgactggtccgcaaacgtggtcaggaacagtatgcgcgcggccgggtccgtggccagaacctcgcgcgcggcatccaaaccgctggtgcagggcatctgaatatcgatcagcagcacgtccggtcggctcgccggcgtctcgaaataacggcgcatggcggcgtcgccgtcatttgccgtccatagcacctcggccgtgccggtggccgtcagaatcgtctccaacgactggcagacgatcggatcatcatccacgattgcgattctcatcaatccctcgattccatggtccaacgcttcttcggcacggatacgaacacacgccagccgtcctcatacggcccgcagaccgcggtgccgccaagggcgcgcacgcgcgattcgatatccgccaaacccatgccgcgcatcagctcatcggccgaaccacgcatatcggcaacgccgtcggcggcgagtcgcgagccgacgcgcgtggcgcacatcgcacacaggcgggcagcggccgtccgggacccatcggactcggacacggccggccccggatcctgaatgaccaactgccagaacgcggggaagtcgcgcaacgtcacgctcgcctcgcgcgccgcactatgatgcaccacgttcgacaatgcctctcgaatcacggtcgcgaaacagcgcgagaccggcgcgggcgccttggcgatgtcgttggccagcgtcacggcgaaaccgggggagatgccgtcgaacgacgtgacggcatcatcgatctgcgcggcgaaatcagtgccgtcatcctcaagatcatgcaccgaacggcgcaccatcgtcatcgcatcatccaacgtcgcacccaacgtggcgaacccttgcgcagcgaccgtatcgttcgtcgccttggccaccgttttgccggcctgcgcctgcatgatcgcgcgggtcagcagatggcccacattgtcgtggatctcccgggcgatacgcgtgcgctcgccgagggtcgccatgcgaatcgactgggcgcgttcctcatcgatgtcggcgatgcgcgaacgagtggcccgcgaggattcgcgcgccctgtcctgcgcgtgcagcaacgcgcgccgcgcctcgtccgaggaggcgcgggcccggcccagaacgaatccaagcagggcgaccagcgtcatcaccagcgtctggagacggtcggtgccacgggcgaaccagagcgcgatcagcggcaacacccatatccagcgcgcggcggccgaaagccacggggccgaacgcattgcatcggcaagggaacggcgagaggccgcggtccgcgagacactgggggagcggccacttgccgcagtccgcgccccagcccgggctccggtcgaggagagggccggcagccgtgcagtatcgtaggcgatgagcggcatgaacgcgcaccatgaaggcaccgccacggcgatgacgagatacgccgtacacaagacccaagaccattgcgcgggacgcagccattccaccaatccggcgacggaaacggccaacagcaggccggcgatgaacacgccatcgagccgcaccccgacaagccaggccaaagccaggcccaacacgagcagcaagcccttctcggccaacacgcgcatggcacctccccggctcgacgctcttccaccaccagtctagcggtgtgcggaacacaacgaacttgacgggcgtgcggaattattcgcatgacggtccaagacaacgggtctacacttcccga

SEQ ID NO: 2690 - DNA, 6558 bp, Unknown
  R36_18m  MAG No. k141_6902
catgagcacgattctcggcctcaacccgtactcgaccccctacgacctgtggttggagaagacgaaccgtcagcagccggaggatatcagcggcaagtgggcgatcgtcaagggcaacgccttggaggtcgaactgcgccgccggttccgccagctgcacccggagtaccaggtcatcgacggcaccgacatttccttggtatccaagcagcatccgttgatgcacgcctcgctggacggcttcgtctacgacgaggagagcgattcgtggggcattctcgagatcaagacggcgaacgcgaaccgtgggcgcaccgactggcacgacgagacgggcgagctcgtggccccgcagtactacatggcgcaggtcacgcattacatggccgtcaccggcttcacgtggggcgtgttctacgcggatatcggagagtcggaaccggtcgaggtgcggttcgagcgcgacgaggacgacattcacgctgtaatcaaagccgccgaggacttctggggtttcgtcacccgcgacgaaatgcccaccctcaccggcgcggacgtggacaaggcgcaatccatgccaccctacccggacggctacgagcaggtcgtggaccatgaattcgacgacctcgccgccatgtactccacgtacgcgcaggccgaatccaacgccaagaaagcgaaggagaagatcgccgaccaattgaaggcgatggtcggcgcggaacgcgagggcctgatcagcggcggatggaaggccggataccggaccgtccactacaaggagaagccagcgatcgaggcgaaacccgcatacgaccagagacgattcaccatcacccaactcaaaaccaagtaaggagaaccgatatgggacagttagcgacgcaggcgcagaacgcgcagatgcagacgatgaacccgcagaagaacatgaagagcctgctggagaggagctggccgcgcatcgcggccgtcatcggcaacaacctcagcccgcaacgcctctaccagatgtacgtgagcaccatcaaccgcgaaccgcagctcgccaactgcggcgtggaatcggtgctgtcctgcttcatgaaatgcgccgcattgggcttggaaccgtcgaacgtggacggattgggacgcgcctacatcctgccctacgggaacaagaactaccgcaccggacagaaggaagccacactcatcatcggctacaagggcatgatcgacctcgcacgccgcagcggccagatcagggacatcagcgcccgagcagtccatgagggcgacgaattcacctacagctatggcctgaacgaggacctgcggcacgtgccgtgcgcgaagcccggcaagctcacccatgtgtacatgatcgcgaacttcaaggacggcgggcattacttccaggtgatgaacgccgacgagatcgaggcggcggcgaaacgcagccccagctacggcaaggcggtcagcccgtggaagtccgactatgaggccatggcgaagaagacggtaatccgacgcgcgttcccctacctgccggtcagcgtggaggcccgcgacgcggccgcaagcgacgaccagacaccggattattccgacgtgttccgtccactgcccaccgtgactgcggacgattcgccggttgacgtgagcgtggacgaacccgaggaaccggaacagccgcagccgtctcccgtcgaggcgaagcgttctgagatgattcgacgcttccagaccttgggcgtggcttcggacgcggaggcgtgcgaaaccatctcgaagattctgaaccgtgaggtgaaggccagcgacgaactgtcggaggctgagcttgacaaggtgatcggccagttgaaggccggcgtgaaggaaggcgagtgaccatggcgggaagagcgaccatcatcatccagggcacggcgtggggcgtgcgagaaacgcagaacggcaaacggtatctgagcgtatcggtgtcgcccggctaccgtgaccggaacggcaactgggtcagccagccggaacagtactactcggtgtggcctgctggctacgcgaacctcaacccagtgttcgaccagatcgcccagctgcgtcagaatcaggaccagttcgtggacgtgaccatcgtgggcgaaatcagcggcctcgacgcctacacgaacaagaagggcgagcccgccgcaagctgcaacgtcaacgccagcgctgtggccatcaccaacgttcgccagaagaacggcggacagcagggttacggcacgcaggccggttacacgcagcagccgcaggggcaggcgcagcctccggcctccgacccatggtccagtgatccgagcttctgatgctgcatttgtatcacgatgagacgccgtcggacgtggaaccggtctgcccgacgcacgggtgcccgctgtatcccgcaagaccgattccctgccccatgtgcgcggaggaagccgacgaaatgtatgcggattacggattggagagatgatggcgaacccatcgaaaagcaaggggacaagccttgagacgtggacggtgcgttaccttgcgtgggcgttgcaggacacgcgcatcgaccgtatgccgttgcatggcaacgccgaccagggcgatctgatcggcgtcatgttccatggcgagccggtgtgcgtggaatgcaaggacacgaagatgccgaactatcgcaagcactggcgggagctcaaagtggagatggcgaacatggacactccctacggggtgctcatccagcatcgcaagggcgtgggcgtgaaaagcctcaagggcatggcccggcagatggccgtgttcgacatcgaaacgctcgaacggttcctcgccactcacatggggcacgtgttaggaccggactaccggattcgccgcgagctcgcgaaccggctgcgccgcgaatcgaagccggtgccatccaatccgacgctcgtgtggttgccgctcgaattgttcgcgctcctgctgaacgacggcttggcgttggggccggacgatggccaggattaaccctcatacctacatcggtggcagccgtcgcaccggtttgcgtggcggctaccaccgcaaacccaagaccaatggcgaggggctgaagcccagcgagataatcgccgccagccccgaactgctggcattgatagccgaataccaaagagacaagagaaaggaggcggactgatggccagacagggctacgggaagctgagtaacggcttccattcgaacacgaaagtgctgaagctacagcgtatgcgtccgagcgcacttggagtgtactgcatggccatttccttctgttccgacgtgctcaacgacggcgtgatgagcgaggacgacgtgatctaccagctcaacgcgaccgaagaggacatcgaagcgctgatcaaggtcggcatgttcgaacgttcggacgacggctcctaccgcatccacgattatctttcccatcagtccagccgcgaacaggtggagacgagggcggagggtgctcgcaaccgcaagcgcaagcagcgttccgaagccgatgtcacacccgagtcacgctgggacgaaacgaatgtcacaagcatgtcacgccgtgacaattcgaatgtcacacccgagtcacgctgggacgaaacgaatgtcacaagcatgtcacgccgtgacaattcgaatgtcacacccgagtcacgctgggactctttaaccaagaaccaagaaccaataaccaataaccaaaagaattcttctaacgaagaattctctctcccccaaaccccctcgcaagccgagggggccgcagagagcgccgacgaggattatcccatcgagttcgagcagttctggcagacctatccacgcaagaccggcaaacgcaaggcgtacgcggcttggcggaaggcgcggaggaaaaccaacaacacgttcctgatcgccaaggcgtcgaggtacgccgccgacccgaaccgggaacccggctacacgctcaccccggcgaactggctggacggcgaacactgggacgatgacccgctgccggccaaacccgagccgaccgcacgcccctcgccatcggcgtggaaccgttcgcaggccaaccaggacgcgaacgcggcactgatagcccactacgcggccgaggaagccgccgaaaaccaatcacgggaaggagtactgacatgctgacgctcaaggaaagcacgctcgtgctggcgaagattcgcgtccaccacggcaacgcggccatcaccaacttggaggctcgcacgttccacgaggagcttcgcgcggacatgacgctgggagaggcgttggaggcggtgaagcgcttctacgcggacaacagcacgggttgctggtgcggttccggcgatgtgaacgccatcgtgcgcaggatgcgcaacgagtcgaagccctctgaggcgcagatagcgcgcgaatgcgaggcgcggggcctatccgcggacgaggcgtggatgtaccgccgccagcggatgctcggcaacggcccggagcaggcgcagcagcaggcgttgaccatgcgcaacccactcgaactgcccgccgcgcagccgaagtcacgttccacggccagacggttcgcaggtgcccagaagctgggtgctgcctcactcggctcgattctgaggggcgcgtgatggccgaaaagttcccgaccccgcaggaacgtgcgatggcgtggctgttggaggccacggagattggcggcatgagccggccggagaccgcgctatacgcctatcaggccggtttcacggcggcgctcgacttgtgcatcgaaatcgaaacacgactcaacaaggaggaaaccgatgaccatgctgcttgatggtcgattgcgtgatctcgcgacgcagacccatctgctcgagacgaaggtgagctctcttggctggatggccgccaacggcccgcagacgttgaaatcaatgacccgcgcccaggcgcatctcatgctcgccgaatgcgatctgctggacgcgctcgaagcgaacgaaaagaaggagaaaaccaatgagcagtgagaaaccattctgggaaggcaagacccttatggagattcagaatctcgatcagcatctgtccgctttggtcttccggtgcggcggatgcaggtataagccgtatgctctcgcgttgaagtcgaagcccgcagtggagtgggagtggccgaaagacatgatgctcgccgccgccatccgtcgttggaatgcgatgtgcaacggggacaagcgttatcggttgatctacgagagtctgggaggcagacgatgagcactctggatattttgggtaacacgagcgagcaggcggattcgatacgtctgatgctcaaagtgcggggcatgaaggacggtcgtttcatcgacgccgacccgctcatcatcctcaaggccgacaatcatcaaggctccgacaggtgggacgtgtatgtcagcaagacggtgtatccgaccgccgaatcgtatggcacgctcgccggcatactgcgaatgctcgccaatgacgtggaaatcatggcacacgagaaggaaatgggaggcagacgatgaacggtgacgtgactgccatggacatcaattgcgcactcgcctcccgttaccggcgtgacggtgacgggtattggtcggagatttcggtcactgagccgaatgacacggtgctgcgtctggacggcgtggcgttgaaggtcaactggcgcggggacacatggatcagcggattcgaggtcaaggtgagtcgcggcgatttcctccgcgacgcgaaatacctgtgctacaagaattacgtggacgatctcaccctcgtctgccccgcccgcatgatcgaccgcagcgaggtgcccgagccggttggcctcatgtactacgacccgtccaaacgcacgttgagataccggcgcaaacccaacccaagtcatggtgacacccggcaggtcgaacaccggctgctgaaaaaggtcgccgccagcgaacggccggaccggtacgggcattacgagaccgccgccgagtatgtcgcacagcgagaggcgatgaaaggcataggccgtgcgctcgggacgaagatggcgttgcggctccaacagctcgaacagttgcaggaacccaccgaggcacgacgtatacaggcacagtccaaggcgttcgaacgggtgtgcgacatcctcagccgccacggctaccagatcagccggtggacccgcaccgaggatcttgagaccagactgaaggaactggacgaggcgctttcgagcgtggtgcccaccggcaaggtggaccgcgagaccctgtacgccatcagctgcctgcaacagttgagaacgactctgggactccaagaccgaaaggagcacggacgatgagctataaggcgaggacattcacccgtgaggagtttcgagaggtcgtcgcagccgccatctacgactacgaacaagcgcccgcgaaatgcctctacacgaccaaggatgcggcagaccaactctacggcgagtacggcgaggaaaccgaggtggaggaatgaaaccac

SEQ ID NO: 2691 - DNA, 11366 bp, Unknown
  R36_18m  MAG No. k141_7038
ccggcttgttggcaacgacggcctcggtggtcaggaacagaccagcgatggaggcggcgttctgcagagcggagcgggtcaccttgaccgggtcggtcacaccggcggccagcaggtcttcgtaggtgtcggtggcggcgttgaagccttcgccatcaggcagggagcggacggtgttgatgaccacgtcaccggacacgccggcgttctcggcgatttgcttgatcggggcttcgatggcgcggaacacgatggcggcaccggtagcctcttcgccggtcagggaggcgacggcctcggccttctcggctttggcagcagcctgaacgagggccacaccaccgccgggcagcaggccttcctcgatggcggccttggcgttacgcacggcatcttcgatgcggtgcttgcgctccttggcctcaacctcggtggcagcgccgaccttgatgacagccacgccgccggccagcttggccagacgctcctgcagcttctcacggtcgtaatcggagtcggtgttctcgatctcagcgcggatctgggccacgcgagcgtcgatgtcttccttggagccagcgccctgaacgatggtggtctcgtccttggagacgatgaccttcttggcgtggccgagcacggaggtgtcgacggactcgagcttcaggcccagttcgtcggagacaacctgagcaccggtcaggatggccatatcctgcagcatggccttgcgacggtcgccaaagcccggggccttgacggcgcaggacttgaaggtgccacggatgttgttcaggatcagggtcggcagtgcttcgccgtcgacgtcctcagcgatgatcagcagcggcttgccggtcttcatgaccagctcggccacgtgcacgatgtcctgctgggaggagaccttgccggaggtcagcagaatgtacggatcttcgagcactgcggtctggtcgtcagcgttggtgacgaagtacggggcgatgtagcccttgtcgaaacgcatgccctcggtgaagtcgaggtccaggccgaagcggttgttgtcttcaacggtcacaacgccgtcctggccgaccttgtccagagcctcagcgatcttctcgccgacctcagggtcggcggcggagatggtggcggtagcagcgatctggtccttggtctcgacgtccttggcggcggcgacgagttccttgacgatgacctcggtggccttctcgatgccgcgacgcagggcgatcgggttggagccggcgaccacgttcttcagaccctcgtgaaccagggactgagcaagcacggtcgcagtggtggtgccgtcaccggcgacgtcgtcggtcttcttggcgacttccttgaccagctcggcgccgatgcgctcgtacgggtcttcaaggtcgatttccttggcgatggacacaccatcgttggtgatggtcggagcgccgtaggtcttgtcgagtacgacgttgcggcccttcgggcccaaggtgaccttgacggtgttggcgagcttgtcaaggccctccagcatgccctgacgggcttcctcatcataagagatgatctttgccatggttgcgtattcctccaaatggctaggtataccggttatcactcgcaagcgtcgagtcgtgacgaccagccgtcagctgccgattatcactctcgacctccgagtgctaacccagacattagcactcgcgaccgccgagtgccaacatcatcggcggcgattgcgctttgggcatgaaaaggccccaaccgtcgaaacggtcagggccttcaatgcacatccttgcgtgcgtgttgctcactcggagcgggcttcacccgaagacagcttgacaacatcctttgcctgcgtgcctttgccggacgaagcgggcgtatactccacgcgatcgccctcgtacagcatcttgaacttattggtgctgccgtcgtccttgatttccgcgtagtgcacgaaaacgtcctcgctgccgtcgtccggctggatgaacccgaaccccttcttggcaaggaagaacttcacggtaccttgtgccatatctgatctttcctttgttcccttaggcgtcgcgacacaaaacctatagggaacgtagaaagaaccgcatcgcgctcccctacctcgcgactagatgacgattgtacagtgacgagggaacaatcccaaccgcagtggcacattttcggtacgaattatttcatagacgtgagaacgctcacagttttcgatgtattccacgccgatatcaggggcgcatcaacaacgctagttgagcagcaccaccgtaatgggaacggcgagtccttgcacctgctccacagccgaaatgccaagcgtggtcgccacatcttcggcggtggctttatcggcttcattctgataccataccacggaagaagccggcaatgtgccgcgcggattggtcgcctcgacgctggtgtaaccggcggtctgcagcacatcggcctgctgacctgcatatccttggattcctgtggcgttgaccacacgcacctgcgtggccttattcacagtcgcggtggctccggactgctgagactgctgatcggagtcttgattctcattcgaggatgtcgtatcactgttggtatcggattttgccgaatccgaagtcgagtccttggacggatcggtcgaagtggacgaggaatcatccttggtgctgtttttggtctcagccttgctggacgaatcggacttggaagcagtcccggacgtggtcgcagtctgggacgatcctcctattgcattcctgtattccccggaaatccatgcccagaccccgacaccgcacagtgcggccaccagaataacgacgatgaacgggcagaggcgggccactgccgaacgagcgccacggtgaactcccaccggtcccttcggaggattgtcgaaggaatccggttcataggattcgtaggtcatcatgtcgcgtgccataatcgccctttcttcctgtcaaaactacccatgagtgtaatcggcaaacaactcatcagtccaccacaccacgcctcgtgcaccggatatgcacgtttgactacagtggtgagtcatgatcaaaccattgagcgaactggtagagccggggtgggcccatgccttggccgacgtggagcccgccatccaccatatgggcgattttcttcgtgcggaaaacgccgccgggcgcccgtggctgccggcaagccacaatattctgcgcgcgttcaccatcccgttcgattccatcaaggtgctgattgtcggccaggacccctacccgaccccgggtcacccggtgggtttgagcttctgcgtggcgccgaatgttcacccgctgccgaaaagcctggtcaatatttataaggaattggttgacgaccttggggtgcccatgcccaccaacggcgatctgacaccgtggacggaacgtgaggtgatgttgctcaacagatgtctgaccgtcggcgtcgggcggccgaattcgcatcagggcaaaggctgggaggaagtcaccgaggccgcgattcgtgcgttgaacgcgcgcacggacgccgacggcaagcccaagccgctggtggcgattctctgggggcgtaatgcgcaaagcctcgagccattgctgaccaatgccttcattatcaaatcgcctcatccgagtccgctgtccgcttcccgcggattcttcggctccaaaccattctccagagccaatcaagccctagtcaccatgggtgccgacccggtggattggactctttagacagaccaacagtcattgtgagtagttacagtgagggcatgactttgttccccacgcaaccgaacataccttcgccgaccaccgccgcacgaccggtcaccgttcccgcgcccggcgtgtcggctccgctgggtgccgatgacgccaaacgcgcacgtatcctggccgacgccattcgggcgaggttcgcccagacactggtgggtcaggataatctacgcgaatcgcttatcgtgaccttggtggccggcgggcatattcttatcgaatccgtgccgggcttggccaagaccacggccgcccagacgctcgccacctgcgtatccggctcgttcaaacgcgtgcagtgcactcctgatctcatgccatccgatctggtgggcacgcaggtcttcgattttgcgtcgcagaagttcaccacgcagatcggcccgattcacgccaatttcgtactgctggacgagatcaaccgttcgaatgccaaaacccagtccgccatgcttgaggccatggccgagggtgccacgaccatcggcgggcagcgtatcgccttgcccaagccgttcatggtgatcgccaccgagaatccgattgaggaggagggcacgttcaacctgcccgaagcccagatggatcgtttcatgatgaaggccgtcatgacctatccttcgcccgacgaagaggctcgcatgctggccatgctcacccaccgtggctccgatatgatcggtcccgacaccatcaccggcgaacgcatttccgtgtctgacgttgattttctgcgcaaggcggcacgccgcgtgcatgtttccgacgcgatcatgcgttatgcggtcgatatcaccgccacgtcacgaggtgccggctcccgccccatcaagggactgtcgtccttggtgcgtttgggtgcctcgccgcgcgccaccatcgccttgacccgtatcggccaggcgaaggcgttgctgtccgggcgcgactatgtggtgcccgaggacctcaaggcgttcgctcatgaggtgctgcgccaccgtattatgctgacgttcgaggcactggccgatggcgtggtcagcgatcagatcgtcgacaagatcgtcgaaacggttcctgttccgtgagttccgattccgttcgcaagaaaatcgaggcccttggcactcagctgagcctgcctaccgtaaggaaggctttgggcgtgctggagggcgaacacgcatccgggcgtcgtggcggcagcggcgatgcgatggatgtgcatgcctatgagccaggcgacgaatcccgtcttatcgattggaagaccagcgcccgccaaggccgccccatggtggtcgagcgcgagcgcctgtcgacgtcacgggtctggttgctgatggacgttggcctggagatgactggcgtatgcccttccggagaacacgcatggcaggttgccgccaatgcactgcgtatgttcgccgcactgtcgttgcgccggtcggacgatatttcgctggtgttcggcgatgagtccagcatcacccgcgtgccgttcaacggtgggttcgcgcagttcgaacgcacgctggacaaggcgcttgatcgtgattgggatcatcaccgtaatatcgacgcgctgctggaatatgcgcgccgtatcaaggatcgtgaggcattgatcgtattggccaccgatgagcatgcgatggaggagcggcatatcaccacgatccgtcgtattacccgcacccatccgatggtgctgatcgatgtggcgacgatgaatccgttcaaggccgtctcatcccgccacgctcccgccgacggcttgagtgcacggcgtgtgccggcattcctgcgcaacgccaaggcagcggccgaggtcgatactcatcgcgcgtatatggccgcggctttggaacaggagctcacccgtgccggttcccatatcattcgagccgcatccagcgaatccatgttcgatcgtttcgtcgccctggtgtcccgggcattggcccgcaccacacgcaatagactgggcactgcacccgaactggtcggactgactttggcgggtgatctatgatgcacagcatgttccccatcatcccgctcgccactgatcccggcgatctcaggcccgtggagtcgttggccttgaccactcccctggtgatggccatcatcgcatgcctgttgctggcggtaggtctgatcgcgttgatcatcatgctggctcgccccgcacgcaaacctcggaacagcgaccgtgcgcgtggcactcatagcaatgccagctccaaggccgagtggcgtgcccgcatcgacgatgtggtggcccgtcatgaatccggagcactgccccggcatgaggctttcgtcgaattggccgtcatcgcccgtgatttcgccggtgccgcatcaggcaaggagcttagttccagtacgctgaccgatttggcgtacctgaatcgcacgcccgcgaatcgccaaggattggacgcattgaagcagaccattagcgcgttgtatccaccggaatttgccgatgatgcccgcaaccgaatcgcccagacgaccagcgtgcagcaggccgccgaatgggtggcgaatctggtggaaaggtggcgttcatgatgctggcatggcattggccttgggccgctctggccggcgtcttggcagcgctggcgattatcgtgctgattgtcgtgttcgcccgccgtaacgccgccgacgacacccctgtattctcgatggacgacgatctcaataccgagcacgcttcccgtctgttccgtcaatggcgcgctttgggccgtctcgccatcagcgtgctggtgcttgcgctggcgctggccattgtgctggtggctcgccccagccaagtggatgccggtgacgaacgcgcttccagccgagatatcgtcctgtgtctggatgtgtcggggtccacgctcccctatgatcgcgaggtcatcgatacctatttggaactggtcaagcatttcgagggggaacgtatcggtttgagtatcttcaactcgacctcacgcacggtgttcccgctgaccgacgactacgaactggtcaccaaacagttgacctccgccagcaaggcgctgaaaggcgtcgagtcgcaggatgacatcgataagatgtccgatgccgaatatcaggacatcgccaattggctcgaaggcacgcagaaccgcaaggacgccacctccttgattggcgacggcgtggtgtcttgcgcggcgatgctccccggtttcgcttatggcgaagccaatcatgcgaatgccgaccgtcagcgtgcggcatccatcgtgctggccaccgacaacgtcgtgtcaggcaaacccacctattcgctgaccgaagcgttggacttgacccagcagaccaaaatcaccgtggacggcctgtattccgggccgaaagccagtgaatcggaccaaaccacaacggatatgaagtccgcgatcgagtcgcatggaggcatcttcctcacccaatcgaacggcgcgtcgatagatgagctggtacgggatattcagtcgcgtagagatacggatgtggagaacaaggcgaaatcctcaatggtggacgctcccggtctgtggacgcttgctctggccgtgatactcattatctggatcgtatgtgcatggaggttgaggcgatgaacggattcaccttctcccccgccttgggctgggtcgccggcggactgctggcggccgggctcgccgtactggccattctcgaaatcgtattgtttgttcgccgccgtgcttccagtgacgagaccgtgtgggcttgcatacgacgtacgcttatgctgctcattgtcgcggtgatggtactgactcccagcgtggtatcgtctaccacctcacaggtcatcaatgccaccgacgtcatcgtggcggtggataccaccgggtcgatggcggtggctgatgccacatacgggtccgagaagaccattacccgcatcgatgccgcgcgtcaggccgtgcatgatgtgaccgctgcttacccggacgccagtttcgcggcgttacggttcggtgcttcgggaacacttgatgtgccgctgaccccggatgcgccggccatcgataattgggccaacacgttggcggtggaagccacatccgtgtcggcgggatccagtctggatgctccgatcgatcaattgctgctgaccgcgaagtcgattcgtgaagcacacccggatgatgcgattgtgctgtacctcatcactgacggcgaacagacctcgaatgtgacgcgtcgtacgttctcgtcactgcgacagtatctcaatgatgggtttaccgtgggcgtcggctcgaccgagggcggcaagattcccgtcatcgccgatggcgtcagtgccggcgattccaacaccacggaccactgggtggtcgacccggataccggcgaacccggcatctccaagatggatgagaagaaccttaaagacattgccgacgagatcagcggcacatatgtggccgtggacgcttcacagactttggcggattcggtttcggccaggtcgtcgaagcagtggcgcatgaccaccacggtcaaggaacgcacacgcaccacgccggtggtatggccgttggccattgcgttggcgatattgcttgccatggaagtcggtgcatggatcgcgacctcaaggaggctgctgtgaggaacagtaacgaaatccacgagaacgatggctcggcgaatattcggatgcgggcgaaatgcccgctttgggcacgtatcgtcctggcttgtggcaccgtattgctgctgctggttgccggcgtggcggcagtacacctgtccgcttcgattacgttcaatcaggccaccgcatcattgaatgccaatatcaaagcggctcaggatgagtccacggatatcaccacgctcaaggcgcaacagcagcagaccgatgcgcaattcgccgaggccgggcgaatgcgtacgcttctgttgccgcaagtcaaggacgccatcgacaccaatgcttcgatttcttccgagctgacgaagatcaccctgaaacaggccgaggcgcagaacagcggttccgattccgggcaagcccaatcggcgcagcaatccgagagttcctcagccaatgccaaaaagggcggcgcgttgaccgacgagcagaagaagcaggtcgaggagctgatgaaggccaatcagcaatccaccgatacccagtcgaacaccacccaatccgagcagaaggcgacgcagaacaagggtaccggggccaccaagccgtggtaagcagtcgttcacggttgctctttttctcacatcctcacgggtcatggccttatcgcggctgtttcccggtttcggctgtcggctttggcgtttgtctgatcccgatagcccatggctgatccaaggtgtgcccaaacaggctatttgtggataatcgttacggctatacacaacacttgtgaataacttcgcccaaaatcggcaagctagaaccacattggtcgttccggctggacaagcatgagtcctgtccttttagctggatatatgaatacctacaccagcaccccagcacccatcgatcccgccggcggctttgccggcaatacggtgacgccgttcgattacggcacttgcccttgccatgcggcggtacagcgtagtcgcgacctcgtgtccgtccaacgtgcggccacactggcgcaatcggaccagatggcggtggccgtgaaccgctctcgcaacatcgtgtggaccggtaaagccgccgacctattccgatcgcggctcagtcgcaccgcacagtattcggccagtctcgcgcaagacatggagaccacccaccgattggcttgggggtcatcatgagcgagcacgattactggcaggtggaatcgtccgtttacggcggagtgggatatgcgccagccactcttgaagaatatgccgccatagccaaggctctcgatgacgaggcggaaggatttgcggccatagccacggcttgggaatcggccgcattacagttgcagtcacatcggcatagtgcgccgatgtgcgtcaccttgcagtcgggcgatccgagcgccgttgttcccggccatgtcactgcaccatatgccgcgctgggcaatcggtgttatgaccatgcaacggcatgtcagcggttgagcgatgatctgcgtggcgcggccgatctgctgattcgcgcacactctctgtattctcaggcggagatgacggctcggcgcatgtttaccgaattattgcaggccggtacacaggccaaaccgggatatgccgcggtgggtgttgccgctgtggcggcgggcggctttctggccggctgggctattgacggcaaaccgaacccagcatggatgtccacgttcacctatccgttccaggaaggagtgctcagcggcgcaggcggaatcattggcggcgtacctatcggcaagagcattgcgcacaccgatgaggtcaacaaggctgcggggaaaatcgccaatttctccggcccggcgaaagacgtcgtccaaggcaatcatctgaacgtgcgcgaggtgcaggcgaatgccgacgtcgtccgtgcaagcggatcggtggccgagtcaatggagaatctgcgcaggctcgccgaagaacggctcggcaaaatcgagctgaacagcggactcgaatatgggaccatcgccattcaacgctatgaacgggctgatggaaccaactcctggctggtcaccatcccgggtaccgatggacaacctgactcaccattcggctgggcgcagaacgtggaactgatgagcgccgatcaggagcgccgcaggaaagcggacagcgctcgcatggttgccgaggcgatgcgtcaggcaggcatcggcaaggatgagcccgtggcgctgatcggccattcccagggtggtatcgttgccgccacgcttgcctcggattgggcggaggaatataccatcgagcatgtggtgacagccggatcgccggtggccaatcatccgattccgcaacgcacgtgggtcaccagcgtggagatcgatgatgaactggtcgccgcgctggatggtgccgccaacccggtcaccgataattggctcaccgtgcaagggcatgtatcgcccgcgcccgcggcaacaccatccacagtgcattcggacgtctcatgcactcccggcgcaacgcccatcaacggtctgaccccatatgacgccgcatccgtggctggttcgaccaacggcagggagttgtcgcattggctcaaataccatcaggccgcttatcagaacgccaccgacctcggctcccctgccgtgcagcgccacgaagcgcattttcaggaagtcatcaacggagaactcaaggaaacccgctattaccaaggccgcatgacccagtccacaaccattgctcccggcgagcgcaccaccgagttcagcacgttcggcggttaaaagtaaataccacacttgacagagttgtcaagaaaggagttaacaatataatgacgagtaggagatggctcatcaaactgatgaagcaagcggc

SEQ ID NO: 2692 - DNA, 18060 bp, Unknown
  R36_18m  MAG No. k141_7145
acacagccaaacctgatcggcagtttcggaacgaacaacgacgtcagccccaccgtcgtcagtgaagtacagccctgggcgagtggcgtaacgatgcaacggtgggtttttcatacctccattgtagacgtgttgtcacttttggtggaagcccttgatttcctgccgcgttccgcagcaccgcagatgccgtcgagataattctcggcgaaccgcaacgcggcaccgatgatgttctgatcttcggcgcagtagctcttgcgcagattgaaatggtcggtgccgaacgggctgcgtgcgatgacgcgcgtcttcagatcctcgatgtcgctgtcttcaagatgctgggctgcttcaccgccgacaatcacgtcgcccgcgatgatggatcgcgcgttgacgatggcctgcgccacgtaatccagccattcgtccatgcgctcgcgatgatgccgttcaccctgctcaagcacgctgaagaagccgggaatactttcgtaatcctcgggcaaggtctccggcgagcagtaggtgtccatgcaaccgcgctggccgcagtagcattcgcggccgcccggcaccagcgtcatgtgttcgatggcgccattgcacatattcggaccctgatacagcttgccgcccacgatcaccgcgccgcccgggcgtcgctccagatagacgcacaccgcatcggtgagcgtggagtcgaaccatagctcgaccatggcggaggcatcggaatcgtggatcatcatgcacgggtaatggaccgactggctgatggtttcgagcgtaagccccgtgttgcccataatggtgccgaaggtgatggtggtggcgtcgggggagaggatgccttggatggcgaacgagacgccgagcactttgccgtgcttcttttcgacgtcggaggcgaagttgttgatgatgccgccgatacgctggtagtaaacgttggtgttgcggtaaggcagggcatcgttgcgtttttcgatgacgttgccgtacaggttaatcgcgcacaggcgcagttcgttggaccgcatcactacgccgatggcagtgcgatgatcgggattgaactcataattttgcgccttgcgcccgccggtggaatcctgcagttcgcctttgcggatgagtccgtcatcttctagggcgcgcagattttgggtgatggtgggcaggctgaggccgagttcgcgttccagttcctgcttggtgacatggctatggccatacagatactgggtcatggcactgcggttgtgcgctttcactgcggtcgatggcattgccctcatatttacccctttgtgcgatgagatatatgtaagtatactttatgaaagtggctttcatgtgcctcgacgcggagattatgaggcaacaatcgtatatttgtaggcgattttgggcacttttttaaaccaattttctagaaatgtggggaaaatgagtacttttggaaacttgatttaagaaagttgtcggattgcgttgtctgcaagcatgtgattttcggtaaaaagtgaacaaaaagtaccaaatcgccgaataaagtgaggatttgttcgatatttcgcacaactcttaacaaaaactgttcaatatcgcacgtgaaacgccgtcgattttgtgcgtatgcatcgcgccggaccgttcggtatattgtgactcaagtcacatatgcaatgtgacaacgcatcaccggccattttcggttactgaggcggtatcccgctggtgcaactgaggtgacgaggcgatggcccagaactttgccatataccccaagaagatcgaggaggaccccaagtggcagaagcaaagaagaaagtcgaagctgccaatccgaccccagaagagaagcaggccgcagctgaggccgaagttgacgcgctggttgcccgcgccaagaaggctctcgacgaattcgagaacctcgaccagaagcaagttgatcgtatcgtcgccaaggcctccatcgccgctctgaacaagcacctcgttctcgccaagatggccgtcgacgagaccggccgtggtctcgtggaagacaaggccaccaagaacatcttcgcctgtgagcacgtcaccaactacctggccggccagaagaccgtcggcatcatccgcgaagacgacgtgatgggcatcgatgaggtcgccgagcccgtcggcgtggtcgccggtgtcaccccggttaccaacccgacctccaccgccatcttcaagtccctcatcgccctgaagacacgctgcccgatcgtcttcggcttccaccccggcgcgcagaagtgctccgtcgaggccgccaagatcgtgcgcgacgccgccatcgaggccggtgctcccgagaactgtatccagtggatcgagcacccgtccatccaggccaccggcgcgctgatgcagcacccgggcgtggccacgatcctcgccaccggcggtccgggcatggtcaaggccgcttactcctccggcaagcccgccctcggcgtgggtgccggcaacgccccggcctatgttgattccgatgtggacatcgtccgtgccgccaacgatctggtgctctccaagcacttcgattacggcatgatctgcgccaccgagcaggccatcatcgcccacaaggacgtctacgaccagctcatcaaggagctcaaggtccgtaaggcctacttcgtcaacgccgaagagaaggccaagctggagcagtacatgttcggctgcaccgccggttccggcgtcaagcccgtgctgaactccgtggtgccgggcaagtccccgcagttcatcgccaaggctgctggcttcgagattccggccgacgccaccattctggccgccgagtgcaaggaagtctccgacgacgagccgctgacccacgagaagctcgctccggtgcaggccgtgctcaaggccgacaacaaggagcaggccttcgagatgtgcgagaagatgctcaagctgggtgccggccacaccgccgccatccacaccaacaaccaggagctcgtgcgtgagtacggcgtccgtatgcacgcctgccgcatcatctggaaccagccttcctcccttggcggcatcggcgacatctacaatgccatcgccccgtcgctgaccctgggctgcggctcctacggcggcaactcggtgtccggcaacgtgcaggccgtgaatctcgtcaacatcaagcgcattgctcggaggaacaacaacatgcagtggttcaagatcccggccaagacctacttcgagccgaacgccatcaagtacctgcgcgacatgtacggcatcgagaaggccgtcatcgtgtgcgataaggtcatggagcagctcggcattgtcgacaaggtcatcgaccagctgcgcgcccgctccaaccgtgtgaccttccgcatcatcgactacgtcgagccggagccctccgtcgagaccgtcgaaaagggcgcggagatgatgcgcgaggagttcgagccggacacgatcatcgcggttggcggcggctccccgatggatgcctccaagatcatgtggctgctctacgagcacccggaaatcgccttctccgacgtgcgcgagaagttcttcgatatccgtaagcgcgccttcaagatcccgccgctgggcaagaaggccaagctcgtgtgcatcccgacctcctccggcaccggttccgaggtcaccccgttcgccgtgatcaccgatcacaagaccggctacaagtacccgatcaccgactacgcgctgaccccgtccgtggccatcgtggacccggtgctggctcgcacccagccgcgcaagctggcctccgacgccggcttcgacgccctgacccactcgatggaagcatacgtgtccgtgtacgcgaacgacttcaccgacggcatggccctgcacgcggccaagctcatctgggacaacctggctgagtccgtcaacggcgagcccggcctggccaagaccgacgctcaggagaagatgcacaacgccgccaccatggccggcatggcattcggctccgcgttcctcggcatgtgccacggcatggcccacaccatcggtgccctgtgccacatcgcccacggccgtaccaactccatcctgctgccgtacgtgattcgctacaacggccagattcctgaggagcccacctcttggccgaagtacaacaagtacatcgccccggagcgctaccaggacatcgcccgcaacctcggcatcgacaccggcaagaccccggccgaagccgtggagaacctggcgaaggctgtcgaggactaccgcgataacaagctcggtatgaacaagagcttccaggattgcggcgtggacgaggattacttctggtccgtgctcgatcagatcggcatgcgcgcctacgaggaccagtgcaccccggccaacccgcgcatcccgctgatcaacgacatgaaggacatcgccgtcggtgcttactacggcgtctcccaggcggaaggccacaagctacgcatcgagcgcgagggtgaggccgccactgaggaagcctccgagcgctgattgcaggcggttggcggctgctggcaccagcagtagccaccaaccgcggtgttgcagcttagtggctgcatagcggacacaaggagcccgaccccattacaggggccgggctcctttgcatatgtggcgctccctcagccggcaggtgcctccatggggcggtaacctactcatggggcggtaacctactcatggggcggtaacttgcccatggggcggtgaaaaccccatggggcggtgtacgaaaacggctctattctgcggaaggtaaaattttaccgtccgccccatgggctaattatcgccccatgagggaattaccgccccatggaatcgctgagcgtcgctaaatcaccaataatgcagccaaaagcaataaagctggcaaacgcctcggtaatgccggtcaccacgggcttcaaggttgtgcgccgtgtaaccaccggcaacgcaacggcgcgggccaacagcagcacagtcatcgcaatcagatacgggctgcgtccagccggcacggcggctagcagcaatagcgccacatgccatacccacgaagccgccacgtacgaacgcttcccgcgttcccggatcatggttttgaccaccagaaccgacccatactgcgtcagcgcaaacagcacggtggcaatcagcccgttcacgggcaatgaacccgcaggccaccaggcgtgaaggtcgaatatctggctcaaatccggcatattccgaatcgcggcgcgtgcggcggtgacatcagcggctgcgcacgaggcatgtgctgcgttgatgggaataacacatgccgtctcaacagcgttgccaaacgacgcgatcaccgtggccatggccgatgcggcaatcaccgacacggcattgccccacagcgagcgctccttcctcagccacgaggacagcatcgacagcgcaaccagcactatatataaaggagcccaacgcagtatgccggtatgcgtaatcaggaatggcaagccgatgacgatgagcgctacggcataagtgagcatcggcggcagataacggcgtgaaaagtgtgctttgaaccagtgcgcggcgctgaactgcacgcaatagcacacggcccacgtcgccaacagccaaagcgtatcaagattaggcccgccgataaagaagccagccacagcgggcagcataaccattacccatgcgccaggttggttgtcgaaccaatcgcgtttaagagtcttgcggcgggaagccatatctgtcatgatatcgcagcgaatggttctcaataagaaagatgtgagacctgcattgcgacaatcgaacataggaagtgcgagaagccagtgcttccgccattatgcaacgtgtgcgattgttcggaaatgttcatttggctcacattgtgtttatgtgagactaatctcgttgagtatcgccctcggcgctggaaatggcctcggctatcggatcttggctgaagtcgtggttgcgataatcagggtcgtccaccggcagatgctgcaccaaggtatcgaacacctgactgtagattttgccgcgctcgagcaccgcatcgagcacatggccgccgaacgtcttgtcgtcggacaggaagtgctcgtggaatccggccacagccgcgccgtgaaacatcacgggggagaagtacccgagcatggtgcccttgacgtcgtggcgcaggaacacggcctgccggtcggccacctctaccagcgtggggtagggggcctgctgcttgatgaccgcgcgtgtcttgatgaagctgaacgtgccgcgcacaattaccgaaaagaacgtgttcgcgcggccgttcgccttgacgatcttttcgttgagctcttctaggccgatatcatgacgctcgcactggtactggaaggccgcgcgatggctattagcgaatggcatggtgaagtcgtccggcacgcgttcggccacaccggattggcctatcttgtatgccacgccatccaggatgatgagctcgccgtccaagccctcgccggtgccgatgccggtgtcgccatgcttgagcaattcgccgatggtggtggtgccttccagcagccccggcacgagtaaggccaaagtgccgtgctgatataacacgttggcgccgtgctcacgaataggtttgatgttctttgccagtgattgtgtcacgagccttaagagtaattcgcgttaccgtccaactcaattaatcaatccatattcgccaacgtgagctgtgccactatatataggtaagtctcagaaggatgttggtaggcgacgccgagcggctatgccgcgaggtaatacgaacggcatgagcgcgacacgcgcgaattcctccgcgctgtcccacctcaatgcttgaataaacaagttgcctgatttgggctcgcaaattggaattaaaaaagcgagcgcgggccgggagacacttcaagtgaagtgacagccggaaaccgcgcactgatgtcggatgaccgccagaggacgtatgtccaagggaggccatgcgcgccggtgccctagaagcaggttggtaaacagtacaacgaacatcgctagaaagggcggacggcaatggcgggacagaaaatccgcatcaggcttaagtcctatgaccacgaggtcatcgaccaatcggcgaagaagatcgtcgaaacggtgacgaacgcgggcgcaactgttgttggccccgttccgctgccgaccgagaagaacgtcttctgtgttatccgttctcctcacaagtacaaggattctcgcgagcacttcgagatgcgcactcacaagcgcctcatcgacatcgtggacccgacccccaaggccgtggactccctgatgcacatcgatctgcctgcggacgtcaacatcgaaatcaagctgtaagggaggaggaagcattatgtctaatcgcaaggctctgctgggcaagaagctcggcatgtcccaggtgtgggacgagaacggcttcttcgtgcccgtcactcttgtcgacgtgtccaccaacgtggtgaccgccgtgaagaccgaggaatctgacggctacaaggccgtccagctcggctacggcgccatcgaccccaccaaggtgaccaagccgctggctggtcactttgccaaggccggtgtcaccccgcgtcgccacctcgtcgaggtgcgcaccgacgacgtcgatcagttcgaggctggccaggaactggccgctgacctgttcgaagagggtgctgaggtcgacgtgaccggcaccaccaagggtaagggcttcgccggtaccatcaagcgttggggcttcaagtcctaccgccgtactcacggttctcacaagaacgagcgccgtcccggttctgtgggcgcatgcgccactccgagccgtattctcaagggcaagcgtatggccggccgcatgggtcatgtgaccgccactacccagaacctgaccgtcgtctccgctgatgtcgagaacggcatcctcgccatcaagggtgccattcctggccccaagggcggcatcgttctcgtccgctcggctgtgaagggagcctgataaaccatggcaaacgttactctgaacgtcaccgacgccaagggccaggccaccggcaccgttgaagctcctgaggctctcttcggcgtttccgccgaggatgtccaggctcacatcccgctgatccaccaggttgtcaccgctcagctcgctgctgctcgtcagggcacccacgccaccaagactcgtggcatggtttccggcggcggcaagaagccgtggaagcagaagggcaccggtcgtgctcgtcagggctccatccgtgcaccgcagtggtaccacggcggcaccgtgttcggcccgcagccgcgtgactactctcagcgcacccccaagaagatgaaggccgcagctctgcgctacgccctgtccgatcgcgccaacgccggtcgcgttgccgtggtggagttcggtatcaccgagccgtccaccaaggccgctgtcgccgctctggccccgatcaccgcggacaagttcaccacggtcgtcttcactcgcgacaacatcaacgagtggctctccgtgcgcaacatcccgaccgttcacccgattttcgtcgatcagctcaacacgtacgacgtgattacctcgcagtacgtggtcttcaccaaggaagccttcgaggctttcgtggctgccaagaccgagccgaaggaggcctgatttagatggtcgctattcacaagcccgctcacgacgtgattcttaagcccgtcgtctccgagaagagctacgccgcttccgaccgtggccagtacaccttcgtggtggctccggatgcgaacaaggtgcagatcaagcaggcaatcgaagagatcttcaaggtcaaggtgacgaacgtcaacaccctcaaccgcgctggcaagaagcagcgcactcgcaccggtttcggccagcgcgcttcccagaagcgtgcgatcgtgaccgtcgccgagggccagacgatcgacatctttggtaactgaaggctagccgagaaaagttaaaggaagaactacattatggctatccgcgtttataagccgacgaccgcaggccgccgcaacgcgtccgtctcggatttctccgagctgactcgttctacgcctgagaagtcgctggttcgcaagaagtccaagaccggcggtcgtaactcttacggccgtatcacctcccgtcatcgcggcggcggccacaagcgccagtaccgtctcatcgatttcaagcgttgggacaaggacggcgtgcccgccaaggttgccgagatcgagtacgatccgaaccgctccgcccgtatcgccctcctgcacttcgcagatggcgagaagcgctacatcatcgcgccgaagggcatcaagcagggcgacgtcatcgagaccggtgctcaggctgatatcaagccgggcaacaacctgccgctgaagaacatcccgaccggtaccgtggttcacgccctcgagctccgcccgctgggtggcgccaagatcgctcgttccgctggtgctgccgttcagctcgtcgccaaggatggcgcctacgctcagctgcgtatgccgtccggcgaaatccgcaacgtcgacgcgcgctgccgcgctaccgtcggcgaggtcggcaacgaggaccacgccaacattcagctcggcaaggctggccgcgcccgctggatcggccgccgtccgatcacccgtggtgagtccatgaacccggtcgaccacccgcacggcggtcgtacccgcggtggtaagccgccggtctccccgtggggcaagggcgaggttcgtactcgtcgtccgaagaaggcttcgaacaagatgattgttcgtcgccgtccgtccggcaagaaccgcaagtaagggagtatcgagaagatgactcgtagcatcaagaagggccccttcgtcgacgcccacttgcagaagaaagtcgacgagcagaacgagaagggcaccaagaacgtcatcaagacgtggtcccgtcgttcgatgatcacccctgatttcatcggacacaccttcgccgttcatgatggtcgcaagcatgtcccggtgttcgtcaccgaggccatggttggtcacaagctgggtgagttcgcccccacgaagaccttcaagggtcacgtgaaggacgacaagaaggcccgtcgctaaggataaggaatagaacatggaagctaaagcaatcgctcgtcacgtccgcgtgacgccgcgcaaggctcgccgcatggtcgacctcatccgcggcaagaaggcgaccgaagccgtcaccattttgaagttcgcccctcaggctgcggccctgccggtccgcaagaccctggagagcgccatcgccaacgctcgcgtgaaggccgacaaggccggcgagccgttccgcgagaacgacctgtacatcaaggagacctacgttgacgaaggtgtgaccctcaagcgcttccgcgctcgtgcccagggccgcgccgctcgtatcaacaagcgcacctcccacatcacggtcgtcgtggctaacaaggaaggagcccgctaaagatgggtcagaagatcaatccgtttggctaccgtctgggcatcactgagaaccaccgctccaagtggttctccgactccaacaaggccggcgaacgctaccgcgacttcgtgcttgaggatgatcagatccgcaaggagatgagcaaggacctcgagcgcgctggcgtgtcccgcatcgtcatcgagcgcacccgcgaccgcgtccgcgtcgacattcacaccgcccgtccgggcatcgtgatcggtcgtcgtggcgccgaggccgagcgcgtccgcgccaagctcgagaagctgaccggcaagcaggtccagctcaacatcttcgaggtcaagaacgccgcgctggacgcccagctcgtcgctcagggcatcgctgagcagctgaccaaccgcgtcaccttccgtcgtgccatgcgcaaggcccagcaggacgccatgcgcgccggtgccaagggtatccgcatcaagctctccggccgcctcggcggtgcggaaatgagccgttccgagttctaccgtgagggccgcgttccgctgcagaccctccgcgccctcatcgattacggcttcttcgaggccaagaccacgtacggccgtatcggcgtcaaggtctggatctacaagggcgacatgaccgaatccgagttcgaagagcagcaggctcagcagaacaaccgtccgggccgtcgtggtggcgatcgccgcccgcgccgtggcaaccgttccgccgccccgcaggccgtcgaagcccccaaggctgaggctcccgccgaggccgctccggctgcagaaacgaaggagtgagcaagaatgcttatccccaagaggactaagtaccgcaagcagcaccgccctgtgcgttctggcatgtccaagggcggcaacgagatcaacttcggtgatttcggcatccagtccctcgccccggcctacgtgaccaaccgtcagatcgaagccgcgcgtatcgccatgacccgctacatcaagcgtggtggccgcgtgtggatcacgatcttcccggatcgtccgctgaccaagcacccgctcggtgcccgaatgggttccggtaagggtgccccggagttctggattgcgaacgtgcgccctggtcgcgtgatgttcgaaatcggtggtgtgtccgaggacgtcgctaaggaagccctccgccgcgctatcgacaagctcccgatgaagtgccgcattatcgcacgtgaaggtggtgatatctgatggcagtcggtaccgctgattactccatcaagaatctcaacgagaagaccaacgtggaaatcgaaggcttcctgaagaagtccaaggaagagctgttcaacctgcgcttccagcacgccaccggtcagctcgagaacaccgcccgtctcaaggctgtcaagagcgacatcgcccgcatgtacaccgtgcttcgcgagcgtgagcttggcatcagccaggagccggccgccaccgaatccaaggagaagtgattatggctgaagagcgtaacttccgtaaggttcgccgcggctacgtcgtgtccgacaagatggacaagacgattaccgtcgagctcgagcagcgttcgacccacccgctgtacggcaaggtcgttcgttccaccagcaaggtcaaggcccatgatgaacacaacgacgcccacattggcgacctcgtgagtattatggaaactcggcctctgagcaagaccaagcgctggcgtctcgaatccattatcgagcgcgccaagtaagtaaagttcggcaaggctcgccatttaccggggcattatgggcaaccacgatgccccggtaaatggggagaaccagctcggctaaggagaatcaatgattcagcaggaaacgcggcttcatgtcgccgacaacacgggtgcgaaggaactcctcgccatccgcgtgctcggcggatcgaagcgacgctatgccggcatcggcgacgtgatcgtcgcctccgtcaaggacgccattcctggcgggtcggtcaagaagggcgacgtggttaaggccgttgtcgtccgtaccgtcaaggaatcccgccgtgcggatggttcctacatcaagttcgacgagaacgccgccgtcattctcggctccggccgtgaaccgaagggcactcgtatcttcggaccggtcggtcgtgaactgcgcgagcacaagttcatgaagatcgtgtccctcgccccggaggtgatctgacatggcagccaagatcaagagcggcgacctggtcaaggtcatccgcggcaaggaccgcggcaaggaaggcaccgtcaagcaggtgctctccaacgatcgactgatcgtcgaaggcgtgcagatcgtcaagaagcacgtgcgtgcaacgcagcagggccagcaggctggcatcgtctccactgaggctccgatccatcgctccaacgtgatggtcatcgacccggagaccaagcagccgacccgcgttggcatcaccgttaaggaagaggcgcgtgacggcaaggtgaagaccgtgcgcgtgcgcgtcgccaagaagtccggaaaggagctggcatgaccgatactactgtcgaagcgccggccaccccgcgcttgaaggtcaagtacaacgagcagatcattcctgagctcgagaaggagttcaagtactccaacccgatgcaggttgcccgtgtccagaaggtcgtcgtctccatgggtgttggtgccgctgcccgcgactccaagctcatcgaaggtgccgtcaaggacctcaccctgatcaccggccagaagccgaagatcaccaaggccaagaagtccgtcgcgcagttccacctgcgtgaaggccaggccatcggtgcgtacgtcaccctgcgtggcgaccgcatgtgggagttcctggaccgtctgctgaccctcgcgctgccccgtatccgcgacttccgcggcatcaacggccaccagttcgatggccagggcaactacaactttggtctcaccgagcagtccatgttccacgagatcgatcctgattcgatcgatcacgtgcgcggtatggacatcactgtggtgacctccaccaaggacgacaaggaagcttacgcgctgctgaagcacctcggcttccccttcaaggagaactgatatggcaaaaaccgctcttaagaacaaggcggccggcaagccgaagttcaaggtccgcgcttacacgcgctgccaggtctgcggtcgtccccactccgtctaccgcaagttcggcctgtgccgcatctgccttcgtgagaaggctcaccgcggtgaactgcccggcgttacgaagtccagttggtaaacatcgacgctgaaggtccgcggcccgaacgcttctagaagaagcgtgagggcggcggaaaccatagcgagaaagggcaacaagcccaaatgacaatgacagatccgatcgcagacatgcttacgcgtctgcgtaatgcgagcgcggccaagcacgaaaccgtggatatgccgtactccaagttcaaggcgaacatcgccgagatcctgaagcgcgaaggctacatcaaggacttcaccgctaaggaagccaaggtcggccagactcttgaggtcaccctcaagtacggtccgaacggtgagcgttccattcagggcatcaagcgcatctccaagccgggccttcgtcgttacgcgaagtccgactccctgccgatgccgctcggtggcctgggtatcgccatcatctcgacttcttcgggactgctgactcagaaggaatgcctcgaccgaggcattggcggcgaaattgtcgccttcgtgtggtgagaaaggagagctgaaacatggcatcgcatattggtaagctccccatcgccatccctgctggcgttgaagtcaagattgaaggccagaacttctccgccaagggcgctaagggttctgactcctacgtggttccggaaggcatcaccgctgccgttgaaggcaacgagatcgtcctgaccgccgctgatgacctgcgtccgacccgtgccaagcacggtctggcccgctccatcatggccggcatggtcaagggtgttcacgatggctactccaagactcttgagatcgtcggcaccggttaccgcgccgtcgccaagggcaagggcatcgaattcttcctcggctactcccacaccatcaccgtcaacccgcccgaaggcatcaccctgaaggtgaccgacgccaaccacgtggttgtcgaaggcaccgacaagcaggtcgtgggccaggttgccgccaacatccgcaagctgcgcgctccggaaccctacaagggcaagggcatcaagtatgccgatgaacgcatcctgcgcaaggctggaaaggctggtaagtgatatgagcgttgctattctcggaaaaggcaagaaggtagctctcaagcgccgtcacgcgcgtatccgcaagcgcatctccggtacccccgagcgtccgcgcctggtggtcacccgctccaaccgtcacatggttgctcaggtggtcgacgataccaagggtattaccttggtgtccgcctccacccttcaggccgacttcgccggtttcgaaggcaccaagactgaggccgccaagaaggtcggcgagctgatcgccgagaaggccaaggctgccggcatcaccgcagtcgtgttcgaccgcggtggcaacaagtacaccggtcgcgtcgcagccgttgctgatggcgcccgcgagggaggtcttgcactgtgagcgacaacgaaacgaaggaaacccaagtggctgaagaaactcagaacactgtggcgaccgaatccaacaacgaggaccgcaagggtcgtcgtggccagcgcggtgaaggccgtcgcggcgagcgtcgtaaccgtcgtgaagaaaaccacggcgacgagctgctcgatcgcgtggtgaccatcaaccgtgtgtccaagacccacaagggtggccgtaccttcagcttcgctgcactggttgtggtcggcgacggcaacggcaccgtgggtgtcggctacggcaagtcccgtgaagtcccggccgccatcgccaagggccagctggacgccaagaagcacatgttctctgtgcctcgcgtccgcggcaccatcacccacccggttcagggtcacgacgctgctggcaccgtcctgctgcgtccggccgccccgggtaccggtgtaatcgccggtggctccgtgcgcgccgtcatggaatgcgcaggcatcaccgacgtcctgaccaagtcgatgggctccgccaccgccgttaatgtggtgcgcgctaccgtcgacgccctcaagcagctcgaagagcccgaggagatcgccgcccgtcgtggcctggcgctcgacgaggttgctcccgatgctctgctgcgcgcccgtgccgccggcattgccgaggctcgcaaggctcgcgaagaggctgctgccgctaaggccgccgaagagaaggatggtgagtgatactcatggctaagaacctgaagattaccctgcaccacggcatcgtgaaccgtaccccggctcagcgcgccaccgtcaagaccctcggcctcaacaagatcggtaagaccgttgtccgcgaggacaccccggccaaccgtggtctggtgaacgccgtgcgtcacctggtcaccgttgaggaggttgactgattatggcagataacgaaatcctgcagatgcacgacctgaagcccgccccgggcgccaagaaggaccgcacccgtgtgggccgcggtgaaggctccaagggtaagacctccggtcgtggcgccaagggccagacgaagcgtaaccacgtgcgtccgggctttgaaggcggccagttgccgctgtacatgcgcctgccgaagcttcgtggcttcaagaacccgttcaaggtcgagttccaggtcatcaacatcgctcgtctcgtggagctcttccccgagggtggcgaggttgctgtggccgacctgatcgccaagggcgctgttcgtgacaacgctccggtgaaggttctgggcgacggcgagaccaccgtggctttcaccctcaagggtgttaaggcttcggcttccgccaagtccaagatcgaggccgccggcggttccgtttccgaggactgattagtcctacggggagcgcaataggctgtacaacccccgcccgccaataggtggacgggggttcccttttctcaaaaattgttgttctgagcgcagagaagcagtctcaacacaatgatcgttttgagtatgcttcccccgttcagtacgacggagcataattcaggtaacattcgcgagacatgaagtggccgaagtaggcactttagactatgctcattcgttagtttgtgtatttcgcgtgagtggcgcgctattgggaggaaatctaggtgaggacactaatccaggccctgaagaccaaagagttgaggaagaagattctcttcgtcctgttcatcatcatcgtctaccgcatcggttcgttcattccgacccctggcgtggactacaacgtggtgaacaagtgcatggccactatcggcagcgcctcccaggagaacttcatcggactggtgaacctcttctccggtggcgctatgctccagctgtccatcttcgcgctgggcgtcatgccgtacatcaccgcgtccatcgtggtgcagctgctgcgcgtggtcatcccgcgcttcgaggccctgcataaggagggccagtccggagaggccaagctcacccagtacacgcgttacctgaccatcggcctggccgtgctgcagtccaccaccatcctggtcaccgcccgctccggtgccctgttcaactaccgctgcgaccaggtcatcccggacggctccgtgtggaacctcgtggtcatggtcctcatcatgaccggcggcaccggcctgatcatgtggatggccgagctcgtgaccgacaagggcatcggccagggcatgtccatcttgatcttcatgtccatctgctccggcttcctgccgcagctgtgggagatcggctacggcaccaacggcaagaacggcgactggaccaagttcggcatcgtcgtgggcgtgctcgtggtcatcctcatcttcgtcgacttcgtcgaactgtgccagcgccgcgtcccggtgcagtacacgcgccgcatgatcggccgtaagatgtacggcggctcctccacctacctgccgctgaagatcaacatgtccggcgtcatcccgccgatcttcgcctcctcgatcctcgccatcccgaccctgatcgcccagttcggcaagtccgaccagtcctgggtcaagtggatcaacgccaacctggcgaacaccacatccgtgtggtacatcgccctgtacgcgctgatgatcgtgttcttctgcttcttctacacctcgatcacgttcaacccggacgagaccgcggacaacatgaagcagtacggcggcttcatccccggcatccgcgccggcaacgccaccagccg

SEQ ID NO: 2693 - DNA, 2698 bp, Unknown
  R36_18m  MAG No. k141_7328
gatgatcacggccgggccggcgtggaaggcggcggcctgcgcgcccaccgagaagatgccggcacccacggctacggccacgcccatgattgacagatcccaccaagtcaggttgcgcttgagcttgcggccctcttcacccgtttcggcaatggtctgttcgacggatttcgtacggaacagttgcatagtgctcttctttttctctgttgtttgcgcaccgaatgcgcacaataccgacaatcgagtatagaagagcccgcgtgtcttgtctattaataagacttagagtccgcaatatatgggattaatatccaactccatcgatcaatagcgcgattacagcacgccgacgcagaccggttcgggcaccaagtccactccgaacgcgctcttgaccgcctgctgaaccgcacgcgccaaagctgcgatatcggccgcgctcgctcccccacgattggtcaaggccagcgtgtgctgcgtggatagactggccggcgcgtccgcatcgaccttatatcccttatggcagccggcatggtcgatgagccaggcggcggacgtcttggtgccgggagtgccgtcaggcagagtcgcgtcgaacttcggcgcatcttcgggcagggccgccgcttggccggcggtcagaatcggattcataaagaacgagccgcagctgtggcgattgtagtcgggagcaggcaggccgtcatcgccaacgggaacgccggcggcctcattgagggaggccagacgctccagatcggtcaggatattggcctcgcgcttggcggtggccatgtcgggcaaggcgtagcgagtgggatcctcaagcatgcccttggcggcacgtactgcgagcacggctttgcggatgtcggcggtggccatacggtcgcccacttcgacgccaagcgctttggcaagctgtccgtaacctaccgtgccttcggccgagtgggtcagggcaaaggtgacggagagcaccacgtaacgtggcgtcgggaagaatcggtcggccggccggccgggaccggcgtacatgctggccttcagtgcggagtatcgatagccgaatcgaagatcggcgggtgtgaggtcgcgcgttgttttggtgtctcgatcccagacttccaccgattcgaccgaagtggcgacttcctgtccgtaggcaccgatgttctgcaccacggaagcgccgactgtgccgggaatgccggacagtccctcgacgccctcgagcccgagctctacggtgaaggccacgaaatcatcccaattggcaccggcctcggcattgacatgcacggtgcgatcctcgccctctaccggtgcagcctcgtccggcacagtgatgaggcgtcgggcgtctcgaaccaccacgccgtcaaaaggcttatcggaaacaagcaggttggagccgccaccgataacgaccaagggcaggcctttggaatcggcatcctccacggcttcgatgagccccacgcgcgtggtcggctcgatgaaatgggcgatggggccgcccacgcccatggtggtgatgtctgcaaagcttgtcatgacttcctatcttagtggcgcaggtgcgatatcggggcaatcatcggctgaaacggcagaacgcccgcgaggggttcgttcagacgcgggatttctgccgtttctcacgcgatgcggatactgattccgcaccctaccactcggctctggagtcaatacgcaaaaacccggccgaatgagccgggttttgtaaagctgtgatgcttgcgatcaacgagtctcgcggtgcacggtctgcttgccgcagcgcgggcagaacttcttgagctcaagacggtcgggcgtattacgacggttcttagtcgtaatgtagttacgctccttgcactcggtgcaggccagcgtgatgcccggacggatgtcggcgctcttagccattgtcattcacctctgtgttcttaggtatagtgcgcgcccaccggttagcgggcgcgatttgtagcgaggaagaggctcgaactcttgaccttacgattatgagtcgtacgctctagccagctgagctaccccgccagagagccccgagtgagaattggactcacgacctcttccttaccaaggaagtgctctaccactgagctatcggggcgtggcggatagtggattcgaaccactgaagcacgaagcggctgatttacagtcagctccctttgaccgcttgggaaatccgccagtctgtttcccgccgcggtgtttgacctcaacaggcaacttggctatataaccacatattttccaagtacgcaaatcgacctctacgcgaaccttgttttaccgcggaattctgcggttttatcggcgtgtctcacagcgtggtttcagggtccgcttcggccctgcaaacagccccgaccaaggccgcaccccgcacttctaccaatcatttttcttatatggtgttccagaaccttgcaatggcgcggttttcgagcggtgtcgcctgtttgcggcggcacagcgcatgccggcatgctgggcgcatggcttctgatcctgtacatcacggacaatcattcgacgaccagccgctcggattcggcacgctggccattcacctcggcaacggggtcgacgccgaaaccggcgcgatccgtcgccccatcacgctggcgaacacctacgcgctgccctacga

SEQ ID NO: 2694 - DNA, 16385 bp, Unknown
  R36_18m  MAG No. k141_7373
ccaccgatggtggcggactcccacagcgggacttcggagtcgccgtgctcgccggcgatgtaggcgtgcacgttcttgacgttgacgccggtctgctgggcaatcaggaagcgcagacgagcggagtccaggttggtgccggaaccgaagacctggttctcgggcagaccggtgagcttctgagccacgtgggtagcgatgtcgaccgggttggtgatgagcatgtagatggcgttcggagccaccttgaccaagttcggcatgatggccttgaggatgttgacggtagcgccaacgagctcaagacgagactgacccggcttctgacgcggaccagcggtgatgacgaccatgtcggcgtcgcggcagatctcaggatcgtcggaaccgtcgatggacacggtcgggtagaagctggagccgtgctgcatgtcgagcacttcggcttccacgcgctccttggcgatgtcttcaagcacgatctcgcgagcgacgccacgctgggcagcggcgaaggcgagggtggagccaacggcaccggcaccaataacagcaagcttcgtgggcttaacggtagtttccgccatgatggatgaacctctcttcaaaggcggtctgctgatgaatggcaggccttgtaactaacggttttcactctataaacccgctaagacgttttgctaccagcacaccaccctgtctgataacggtatggtaatgtttccaacggttgttagcgctcacaaacaaactgtgatgtttatcacgttagtcaatggactgttcgaccacctgagcggcaagatgggcgtcgacgtccgcttcaagctgtatgccatcatcgcggtactccaccttgtccaccttgccgtattcgcgtacacgagagatcagggagccagcggtatacggcagcagagcgttgacatgcacatgcgggaccggcagcagactttcgaccgcggtacgcagctcgtccaatccctcaccggtataggcggagacgatgaacgcatccggctgcagtgcggcgagtcgttcacgtgtcgcctcgtccgcctgatcggccttgttgaatacgagaatacgcggaatcgaggccgtgccttcgatgtccgccaacacgtcattgaccgcgtcgacctgagagaacgggtcagggtgggagccatcgaccacgtgcaggatcacgtcggcctcggccacctcttccagggtggatttgaacgcctcgatcagctgggtgggcaggcggcgcacgaagccgaccgtgtccacgtaggcgtaagcgcgtccgtcgcgggttttggcgcggcgcacggccgtgtccaatgtggcgaacagcgcgttttccaccagttcggccgaaccggtcagacggttggtcaacgaggatttgccggcgttcgtgtagccgaccacggccactgtgggcaggccgaagcgacggcgtgaaccgcgcttgacctcacgtgccggagccatctcacgaatctgacggcgcagtctggcgatacgcgtgcgaattacacgacggtccatttcgattttggtctcgcccgggcctcgcgatccgatgcccgcatccgcgcctgccgcgcgaccgccggcctgacgggacagcgaaccaccccaaccacgcagtcggggcagcatgtattcgagctgcgccaactccacctgcgccttaccttcacgcgaggtggcgtgctgggcgaagatgtccagaatcaccgcggtgcgatccaccaccttgactttggctgcgtcctccaatgcacggcgctgtgacggcggcaggtcgtcgtccacgataatcgtatcggcttcctcacgcgccacgatgtcggcaatctccttggctttgccggaaccaacgtacgtggctgcatccggcttggagcgatgctgcagcaaaccatcgcacaccaccgcaccggcggtttcggcgagcgccgccaactccctcaacgattcctcggccttggcttgcgtggtgacggcggacgaccagacgccgacgagcaccacacgttccagtcgcaccttgcggtattcgacttcggtgacgtcctgcagctcgccgagaccggcgacatgcttgagctcgttgcgggcctcgcgctcctcccattcctggttggcgtcctcgtgccagccggtcgcgcgctggctgtcgtcgagcagcacttcggactgcccggccagcacaccttcaggggtaacgtcgttgttgccgcggtcgatgtcggtgtactgggtgttgtcggtcaagtgcgcctcgtttggttggaatggttcacgattcttctatggtcccttattatcatcacatgaggtgacatgctggcatagatcggcacgtaccggcataggccggctgatacaggtcggcatacgagagcggcgaatcccgcagaaatggagcgaccatggcagaacagtatttctctgcggaacccgcgtcgaaagatgtgcgccgcacattgaacgtaacgttgcgcggtcatgaggcgaccgctcaggtgtcgaacggcgtgttctccggctcgcgcgtggacctcggtacatcggtattgctgaagcatgcgcccgagccgccgcttaccggcgatttcctggatttgggctgcggctggggccctatcgccctgacattggcgtttgagtcgcccgaagcgaacgtgtgggcggtggatgtcaacgagcgcgcgctggacctgacccatgccaacgcacaggcgaacggccgcacgaacattcatgcggctcaggtggacgagtccagcactcccctgcccgccgagaaccagccggcgttctgcgagacggtgccgggcgacctcacgtttgatgcgatttggtcgaatccaccgattcgaatcggcaaggaagcgctgcatacattgcttatggcttggctgccgaagctcaaggtgggcggcgccgcctatctcgtagtgcagaagaatctcggctccgattcgctgatcccctggctggacgatgcgctcggcgaggggttcactgcgagcaaatacgcgagctccaagggcttccgtatcattgaagttcgtcatgaaatatgagtatcctgcagaacttcccgtatctgccgcgcgtgatgagatagccagcgcggtcaaacgttcccaagtcgttattgtgtccggccagaccggttcgggcaaaaccacacagctgccgaagatcctgcttgagcttggccgtggcacgcacggcaagcagatcgtgcacacccagcctcgccgtatcgccgcgcgcacggtggccgaacgtatcgcctcggagatgggcgtgaagctcggtgacgaggtcggctatcaggtgcgtttcaccgacgaaagctcgcccagcacgcgattgagagtcgtgaccgacggtattctgctcgcccagatccagcgcgatccgaaactcacccaatacgatacgatcatcatcgacgaggcgcatgagcgtagtcttaacatcgactttctgctcggctatctgacggcactgctgcctcagcgccgcgatctgaagctcatcatcacctccgcgaccatcgattcggtcaagttccaggagcatttcgagcacgccttgcatgagaaggtgccggtaatcgaggtttccggccgcaccttccccgtgcaggtggtctatgagccgcttggcaccgcgcccgcgttgatgcgcgaagtgccgggattcgcggtgggcgcccgccccggcgacgccgattacgacgagctggccagcgccatcgcggaatccgattccgaccggccccacggccggtccggcgactcctatgccgatgacggcatcaccgatatgcccacggccgtggctcgagcctgcgccgaactggtgatccactcctcccatgagcgcggtccccgcgatattctggtcttcgcttccggcgagcgcgacatccacgagttcgaggccgcactgcggcatcattacggtccgcgcgccgacgacatgcgccgaccggacgccatcgagatcatgccgctgttcgcgcgattgtccgccgccgaccagcacaaggtgttcgaatcgcatttgcatcagcgcatcgtcatcgccaccaatgtggctgagacctcgctgaccgtgcccggtatccgctacgtggtggaccccggttccgcccgtatctcccggtattcgaagaccgcaaaggtccagcgtctgccgatcgagccgatcagccaggccagtgccgaccagaggtccggccgatgcggccgcgtggccgacggcatcgcgatccgcctgtattcgcgtgaggattacgagacccgaccgcgcttcaccgagccggaaatcctgcgtacctcgctgggtgccgtggtgcttcacatgctgtcggtgggcgtggcccgcacggccgaggacgtcacgaacttcgggttcatcgatccgccggatatgaaggccgtgtcggacggtttcaatgagctcaccgagctcaaggccatcggccgaaagcgcggcgaggtgacgctcacccataccggccgtcagctggcgcgcatccccatcgacgtgcgtctgggacgtatggttatcgaggccgcgaaaaccggttcgccgaatcttctggcccaggtgctcgtggtcgtggcgttcttgagcttgcaggacccacgtgaacgcccggacgacaagcgtgaggatgccgaccgtatccacaaccgatatgcggatgagacttccgatttcctgacggccctgaacatctgggatcgcgtgttccaagcggacggcgacccgagcaacaacgcgctgcgccgtatctgcaaaaccgagtatctcagctggctgaggatacgccagtggaaagatctcgtctcccagctacgccagatgtgcaaggagctgaagttcaaggtcggcgacccgttgcccgcctcccgcccaggcttggagattcgccagctgccgttgaatcagcaggccgcgcattcgctgtgctgctcgtgggatgcggatggcatccacaagtcgatgctcgccggattgctgtcgatgatgggcatgcaggtggtgcgtgagcccaaggcctccgatttcgcggggctgaccggttcggcgcgcgcccgtgcgatgaaacgcgcccagaagcagtcgaagaacgattatcagggcgcacgcggcacccgtttcgccctgttccccgcttccgccgtggccaagaagaccccgtcatgggtgatgagcaccgaactggtggagacctctcgcctgtgggcccgctattcggcggccatcgacccggcgtgggccgaaccgttggccggccaattgacccgcaccacgtatgcggagccgcactggtcgggttcgcgtggctcggctgtggccaccgcgcgcgtgctgctgtatggtctgccgatcgtacaggaccgtgccgtgcagtggggacgcatcaatccgcttgaggcgcgcgacttcctgattcgccagggtctggtcgagggcgatattcagcagcgcttcagttacgacgactttgtgggcaaaaaccgtgacattctcgaggatgccgccgatgacgcgagccgcacccgccagctggcggacaccgtgtccgacgaggatctgttcgacttctacaacgcggtcattcccaacgatgtgaccagcgtggccgatctggcgaaatggtggaagtccgagcatgaccgtcagccgaatctgcttgatttcgacccggccaaggtggagcgtctggcatccagcgattcggtgagtctggacgattaccccgaccattggcatacgaccggatcggacggccaacccatcgacctgcgtttgagctacgtatacgatccggccgacccggccgacggcgtcaccgtgcatgtgccgttgaaggcgctctcgcgtatcacgcccgaccagttcacatggaatgtgccgggcctgttggatgagctgattctgtcgatgatcaaggcgctgcccaagcagctgcgcgtccagttcgtgccggccccggatgccgcgcgtgcgattcgtgactggatcgacgagcattacccggatctgccgggctcgggctcgcagcagaagccgaatctgccgccggtggatgaggatggcacgaccgttggctggcccgatctggcacatgtgttcaccaaggcggccatcgccaccaagggtgcgcagattcatcccgaagtgttggggccggaactggtcgagcgtctttccccgtatctcagggtcacgttctcggtggagcagcaactgccggccggcaagcaccctcgtggacgccggcatgcgcgcggccccgtcaaggtgctgggtgtgtccaaggatctgaaggcgctgcaacgcaagttcgccgcgcaggcggaggcgtcggcccgtcaaatggtcaagaagcaggccgatcaggctggagaacagggcaagctggtcagtcaggcgaacctgttgcataaggcgggtgccaccaccgagtcccgggccacgatgctctggcgtggcgcattggatgcgctgcggttgccggccgaacgcatttcgtcgcgctggctgggtaccgaggcgttgatgctggcttctgctccgtacaagttcaccaaggatctggtcgaagacctgcagctggccacggtcaaacggctgatgccgaatgtcgacaggctctcggacgatgaggcgttggccaatgcggtgctcgatgtgcgcgaagtgtacgaggacaccgtctatcaggtggcgcatgacgtgatcgccgtgctcaaggcttatgccgaagtcgacaaggccactggcggcaaggctgatctgccgatgctttcggtgttgcagtcggtgcgcgagcacatcgccacgctggtgttccccggattcgtcggcgccgctcccccggacgcgctggcgaacatctcccgatacctgcaggccgatctcatgcgcctggccaaggcgaagaccgacaagaaccgcgacgtgcgatgggcgtgggaggccgacgaggcccgcacgctggtcgacaaggcgatggccaaggccaaggcggagccggccggcccccgccacgagacgctgatgaagcaggcgaccgccgcccgctggatgctcgaggaattctacgtgtccctgtgggcgcaggagcttggcaccgccaagccggtgagcctgcagcgcatcaagaaggcactggcgtagcgatggcgacgacgcaacggcgcaagccggccaatccgcgcggcagggcgaacgtgattgtcgcggggcggggcgtgtcaggaggcaatcgcaaacgtcgcccgggcaaacgcccgcgcaatcgcaggtatccgctcagcccggcgcgctggtggaagcgggccgggttggcgcagcgcgtcgcggctgtgctggtcaccgtggtggcggccgcatgcgtggtcgcgctggtcgtgggcactgtgcgggtcgtccagtggcgtcgcgacgtgcaggaggccgaggcccgccagctgcagctgacgcagcaatacgacttcaatcccggcgacatcatctcggacggccagttcttcaacgccaatgcgatgagcgaggccgaggtccagtcgttcctcgacaagcagggcgcggcgtgcagcggttcccggtgcctgaaaaccatgaccttcgacaccgaggaccaggcggcgaacgagtattgcgcggcgtacgagggcgcgagaaaggagaccgcggccgcgatcgtcgacaagtcggcgcgcgcgtgcggcatcagccagaaggtgctgctcaccgtgatgcagaaggagcagcacctggtcacggccgtcgatccgacggacttccagtacaaggccgccatggggctgagctgcccggacaacgcgaactgcgatccggcctatgccggcttcttcagacaggtgtacggggcggcgcaccgctaccaatactacgtggcgcatgaaagcgcctacggctatcacgccaacgcgctgaactacatccagtaccacccggatgccgggtgcggcggcaccaacgtgtacatcgagaacaaggcgaccgcgctgctctacatctacacgccctaccagccgaacgacgcctcgctggcggccgggttcggcgagggcgactcatgctccagctacggcaaccgcaacttcgccctcatatacaccaactggttcggtgccgcgcgccgataggggcgggaacggcaaaaaaccgaaaccacggtaaggctaggtgtcatccgcgccgtcgccgccccgccgcacggccggagaaccggccggatgacgggcggcacggctcacaggtcgatcttcggggaggcgtcgagcagggtacgcgtgtactcggccttgggatggttgagcacgcggccggtctccccgctctccacgacgcgcccgtggcgcagcaccgtgatcacatcggacatctcctgcacgatgcccaggtcatgggtgatgaacaggcatgcgaaaccgtgctcgcgctgcagccggcgcagcaggtcgagcaccttgcgctgcacggtcacgtccagcgacgacgtcggctcgtcggcgatgagcagcgacgggttgagcgccaaggcgcgcgcgatgccgacgcgctggcgctggccgcccgacagctggtgcgggaaccggccggccacatcggcgggcagctccacctgatcaagcaattcaaggacgcgcttgcgccggtccgtctcgctgagcccgccctgcacgagcatcggctcgccgatgctccatgccacagacttgcgcgggttgagcgccgatccgctgtcctggaacacatagcccatatgcttcaggatctcgcgcttgcgcctgccatgcgccttggcgagatcctccccctcgatgagcaccgtgcccgaggttggcgcgagctggccggagatcaccttggcgatcgtggtcttgccggctcccgattcgcccaccagcgcgcgggtcctgccggccaccagatcgaacgagatgtccttgacggcgaagctgccggccttgtacgacacggccacgtcgttcacctgcgtgatgcgcctgccgccgccgggcgcgtcactttccgtgatgcgttcgccgccggccgcatgttcgccgtctgccgcatgctcgtcgatgcgcaggcgcggcacggcgtcgagcagcatccgcgtgtagtcgtcggacgggtggcggaagacctgcgcgacgctcccctgctcgacgatcacgccgttgtgcatcacgtacacgtcctgcgcggcctgccacaccacgcccatgtcgtgggtgatgagcagcacggccagatcgaggtcgaccgccagcgaggagatcagggcgagaatcgccttctgcgtggtcacgtcgagcgcggtggtcggctcgtcggcgatgagtaccttgggtcggttgatgatcgccatggcgatcatcacgcgctgcagctggccgcccgacagctcatgcgggtacgacgaccacacgcgttcggcgtcgtcgagcccgacctcgcgcagctgttcgagcaccttggccttgcgctcggcggcgctgagctgcttctggtggtatttgagcgattccgcgacctgtacgccgagcgtgaacaccggattgaacgcggtggacggttcctggaacaccgtgccgatgtattcgccgcggatgcgttgcagcggcgcgtcggcggccagcagatcgatgccgcggccggcggcgtccttgccgtcgccgcccggaccggagtccggcccgtcatccacaagggcgtcgtcgaggtacgcgtggcccttcacgctggccaccgacggatcgagacggggcagcgccatcgccgtcaccgacttgccggagccggattcgccgaccagagcggtgatgcgccccgggaacagcctgaggctgacgccgtgggtcacctcccgctcgtcgaagcttacggccagaccgtccacggtcacgatcgcgcgtggttcactcattggaagctccttggatgcacaagcgttggaatgcgtccggcgcgcgcgccagcggaccatgccgccggcgcgcgccggatgcggatgccggctcagttcgcgctggcgagcgagacctgcgtgtagtccgggtacgccgggaagttgccgatgacgaagttggtcacgttcgatccgtggatgaacgtgttcttcgaatagatcagcggcacgaccggcgcgtcggccatgatcgtcttgtcggcctcggcccagatcttgccggcctcggtctgatcgatggtctcggtggccttcttgatcagctcgtcgaccttcgggttcgcgtaacgggccaggttgtagttgccgtggccgatctgcgaggagtcgaacagcggggagatgttggcgtagggcgacgggaagtcgggctgccacgagctgatggccagatcgtagtcgcccttgtcgttggtcagcgtatcggaatacacatcgtcgttgagtgtctggatgtccaccttgacgccggcccgcttgaggctcgtctggatcgaggaggcggtttcggcctgagcggaggtggcgatgagcttgagggtcggggcctgctcgcccgactccttgatcagctgcttggccttgtccacgtcgccggtcggatcggccttgtacaggtcgtagtcctcgcggccctcgatgccgggcgtgatgagcgtggtggcgaagttgccggcgatctcgccgccggaagccgtctggtaggccttcttgtcgaccgcgtactgcagcgcttggcgaatcttcgcgttcttcacgtgttgggtgttgatggcgaggtattccagcgcgccgtcgccgctggtggtcagcagcttcttgtagttcgggttggcctgcgcctgcgcgagctgcgcggccggcacgaatccggacaggaacgagttcttgccttcaccggtgccctgcatgatcgactgggcggccaccgaggtgtcctgtcccatcttgaacacgatcttgtcggggcccgcggtgcgcaccggatcggtcttcttgtcccagtaggtgttgcgcacgaagacggcctgcttgccagcctcgttcgactcgaccttgtacgggccggaggccaccggcagcttgccgtagccggacgccgggcccttgccgtcgggcacgggggtgaacgcggcgagcgagacgacccacggccagtcgccgaacggcgcgttgaggtggaagatgatggtcttgtcgttcggcgtctcgatggagctgagctcctggccgtcgaacgggccgtggtagtcctgcgcgccctcgagcagcgtcttgtggtagctcaggccgccggtcagcgagtcggcgaaggaacgctccagcccgtacttgacgtccttggaggtgatgggcgtgccgtcggagaacttgagcccgttcttgagcgtgtacgtccacgtcttgccgtcgtcgctcgacttgccggtgtcggtggccagatcgggcacgaccttcgtctcgcccttgtcggtgatcttccacgcggtcaggcggcggaagatgttgccgttcgtggtggtcggcagaccctggctcttggccgggtccagatccatctccgtgctggacagcagcacgttcagcgtgccgcccttgacggtggtgccgctcgccgagccggtggcggcgttgtcgttggacgcgccgcagccggacagcgccagtaccgcggcacaagcccccgccgcgaatacgcgccatgcgttgttcttcatgatggttttcctctctatcggtgccggtccgtggagcagaccggcaagtatcgcgtgttgcggccgcagccgcactacttcgtgccgagcgcgaccctggggtcgagcaggctgtagcagatgtccacgatcaggttggcgacgatgaccagcacggcggcgaacatcgtcgcgccgaccagcacctgcaggtcgaggttcgacacggaatcgagcagcagcgagccgagcccctgcatcgagaacaccttctcggtgagcaccgcgccgccgagcagcccgcccagatcgaggccgaacatggtcatcacgggcagcagcgcgttgcgcagcgcgtgcttgaagatgatcaccgattcgggcacgcccttggagcgggcggtgcggatgtagtcctggctcagctcgccgatcatctgcgtgcgggtgaccctggtgtagccggcggcgctgagcacggccagcaccagccacggcagcagcagatgcgtgaaccagccgacagggtcgtcgtggaagttcacgtacccgccgctggggaatatctgcagcaccagcgaaaaggcgatcaccgtcagcaggccgatcaggtatgacggtgccgaaacgcccacgatcgacagcccgagcagcgtgcggtcgatcagcgtatcgcgcttgagggccgcccacacgccggtcgccacgccgatgaccagccacagcacggccgcgccgaccgcgatcgacgcggtgatcgggaagcggtcgaggatcagctggctcaccgattcgttgagacggaacgaatacccgaggcatggtgccgagcagaccacggcgccgccgccgctgccgaaggtgcgcccgacgaagatgcccgccacgtaattgcccatctgctcgtaccacggcttatcggtgcccatgaaggcggagacccgctgcagctgctcgggcgtgcatggcttgccgcacgacagctgcgccggattggtcggcagcaggaagaagatcaggaacagcgccagcgtgatgagcaggatgacgacgatcgagctcgccacgcgctcgccgatgtattgcaggattctcatgcacgcacccccttgcgcgggtcgatggcgtcgctcaggccatcgccaagcaggttgaagccgaaggtcagcaggaacagggcggcgcccgggaagatcagatacatcgggtcgaccagggcccactgcacggcgtcggagatggaccggccccatgagggcgtcggcgggttcatgccgacgccgaggaacgacaggcccgcctcggcgccgatgcgcccgggaatcgacagcgtgatgttgacgatgagcagcggcatgaggttcggcaggatctgatgccacagcacatgggcaggcgaggcgcccatcaccttggacgcgacggcgaaattgcgcttgctcagcgtcagcgtctgcccccggacaagacgcgcgatgccgggccatccgaagaatccgagcactagcgtcagcagcaccggcctcgggaagccctgcggcaccaccgccgacagcgcgatcgcgaagatcaggaacgggaagccgaagaagacgtccatcgtgcgcgagatcagcgcatcgaccaacccggggaaatagccggccagcagcccgagcgccacgccgatgaccagcgagatgaccgacgagacgacgccgatgcccagcgagatccgtgagccgtacgccacgatggagaacaggtcgacgccgcgcagcggggtgacgccgaaccagtgccgggcactgatgccgccgccgaatccggccggcaccgacccggcacccaaggcctcgggatgctcggcgtacgggtcgttgccggtgatggccgacaacggcccggccagcggcgccagcagcacgaagaacagcacgatggcgccgccgaccactatcgatgagcgagcgccggaacggagaacgcgccgccgtctttccgccttcggcgcggctttcgccgtcgcatccgtcatattgtcatccccattttcacgctgaacataccgataatcatcaatccgcgcaggtgggcgcccgtgagccgggtccccctgcagccggtgtcctaacattaaggtttcgcagcaggatgacatgctgtggccttatcggttatttggatagcaggttatcaatggacggcaatcggcggataaggcatgccgcggggacatgcgggaaaaacccttcgttcccgcgcgtcacgccacccgtcattccccgaccgggctgacgtacggacgcagcagggtcgtggtgccgaccgcgagcagcgcgaaaatcgcgccgaacgggccgagccaggtcaggccaaggaggtcgttgaccaggccgccgaccgcggagccgatggcgatgccgatgttgaacgacatggaattcagggaggcggccagattcaccgaaccgggatgggattggtaggccacatccatatacagcacctgggaagcggaattctgcagatacatgagcatgccaagcgccaccagcagcagtgcgccgccggccggcaccagcgaggcgaaagccagcaggcacaggcagacggcctgcacgcagtagatcggtcgaatgtgggtcagcggctcgacccccctgccccgatcggccagcttgcctccgtacaggttgctccacaggcaggcacagccgtagaccaccaagccgacgctgatatagcgttcgggcacaccgatttcgtcgcgcatgatcggcgagagatacgtgtagaagacgtaggaggcggctgcgccaaagaccacatccgccacgccgagctggatgcggcggtcgaagaacagacggaattgcctcaggaaaccgatcttcgccggatgtgagttgcgtggcagagacactgccatcgatgccatcagcacggcggtgagcaccgaaaccaaggcaaaggtgacacgccagccgaaagtattggccacccaagtgccggccggtacgccgaccacagaggcgatggagaaacccgagaatacccaggcaatgaacttggtgcggtatttgtcggtggtcacgtcgggcgcgaaggtcatggagatggccaccagcgtgccggacaccgaggcgatgagcagtcgggcgatgagcagcaccggatagttcggcgcgaaggcgcacaggatattgccgacgaggaacacgcccatcaacgtcagataggtgagaaagcgcgggaatcgggcggataatgcggatccgagcggcgtgcagggcgcgtacacgaatgcgaagatggccaccagattacccacggtcacttcggagaccttaagtccggatgcgatgtccggcaggatgcccactaccacgaattcgctcatgcccagcatgaagctggcgaagatcaggatggtgaccggcagattgaagaagcggtcggtgcgcgcggtgttcgcaggtgtgtccgtcatgggtgctctcttgagtgctctcgctcgtactacaagctgattcgtcggttacgtcaatcgtttttcgtatcaactcagcgacaacactattcccacctctgcccgctacccaccaccacgacacgctataaaaaccccgccgatgaccaatcatcgacggggttcggcacatgtgcaacgcttgcgattacagcttcggcagatacttcttcagctcgtaaggcgtgacctgctggttgtactcctcccattcctggtgcttgttgtccaggaagtagccgaaggcgtgttcgccgagcacgtcggccacgaagtcggatttctccatgatcttcagcgcctcgtccagcgagcgcggcagcggctgaatgcccatagcctgacgttcgccgtcggtgagctcccacacgtcatcactggtgggttcgcccagctgcatctgcttatcgatgccatcgagaccggcggccagcagcaccgagtaggcaaggtatgggttggccaccgggtcgagcgcacggaactccatgcgcgcggagttgcccttgcccggcttgtactgcgggatgcgcagcagcgcggaacggttgttgtggccccagcagatgtagcttggtgcctcattgccgccccacaggcgcttgtacgagttgacgtactggtcggtgaccgcgcagatttcggccgcatggtacaggatgccggcggcgaactggcgggcggtcagggacatgttgaactcctgaccggcctcgtagaaggcgttggaatcgccttcgaacaggctcaggtgcgtgtgcatgccggaaccaggcgcgtcggccaggggcttgggcatgaagctggcgtgaatgccacgctccaaggaaatctccttgaccaccgtacggaatgtcatgatgttgtcggccatggtgagcgcgtccgcgtatcgcagatcgatctcgttctggcctggccccgcctcatggtgcgagtattccaccgagatgcccatttgctcgagcatgttcacggtggcgcggcggaagtccatgcctgggctgcgcggcacatggtcgaagtagccgccctcgtcgatcggggtcggggccttggaccagtcgtcctggctttcgaacaggtagaactcgatttccggatgcacgtagaacgtgaagcccttgtccttggc

SEQ ID NO: 2695 - DNA, 7571 bp, Unknown
  R36_18m  MAG No. k141_7440
tgtgtccacgccggcgagcgcagctaggtagatgatggagttccaaccaacatgctgccagacttcggaaatccaatagaccgcggtgatggcgctggtggaacccatcagtgattcgtcgccgaagaagcgaccgagaattccggtgccaggagtcaggaagatgttgagcatggagacgatgaccaccacggagatgaagtgcggcatgtaggtaatcgtctgcacgaaacctttgattttcttagaaccgatctggttgatcagcagggccaggataatcgggaagatgaagcccataaccaatgtccacagggaaatgcggatggtgttggtcataatctcaccaaacagcgggttgtggaagaattccaggaagtatttgaaaccgacgaatttgccgccggtcaggcctttggtcggatcgaactcgcggaaggcgagctggatgccccacatcggcacgtaggagaacagtcccacgaagaacaatgccggagcggaaagaatccacaactgccagtagcgacgtaaatggtcggcgatgcgatcgagcagacctggtttcttgcggtcgggagccgcttccatcgccacggtccgtgcagcaacgccttgcgatgtttgtgcactcatgttggtctccaatttaggatgattgctagggaacaaaaatgcggggtccggcggcagtcacgggagagaaacgaacccgtgcgatggaccccgcggtattacttggctacttggtgtacttgtcgtaccacttctgccaaatcttgatgttggcgtcgaggccgagggtcggttcggacaccttcttcacgtaggcatcccattccttgtcgatgccgcccttctggacccacttcgcgatctggttgttcgcgtagttggagatggcggtgttgttgttctgcagggtgttggaatcctcggtattcgggcgcacgtaaatcggtacgacatccttgacgccgtcgacgcggttgcgcgcctcacgaatggccaagtcggacgcagtgacctggtcggcgttggtgtcgttgaccatcttcacatcgtcgcggatccagccaccgaagcggtcctgcagggcgacggcgcgggtatcaggatattcggcgtaggctttagccttgtcgatggtgtactggtggtcgccgtcatcggagacgatatccggaatagagccgaagaaaccggccacggaaagcttctcgccatacatggcgtcgatgaccttgtagatggcgtcttggttggcggcgttcgggttgacggtcaggccagaaccggagtaggcccagcggcaggcgtcctgggaataatcccacttgacctgggagtcgggcgtggaggcgtccttcttcagcggcggcagggtgacgtactggtcgccgagcttgtcgccgtattcggcgtagttggaccaaccgaaggagacgccggtcagcgcggtcttgccgtcactgacggtctgcgaagcgtattgcgaggcgtcgcgggtgagcacatccttcgggataagtcccttggccatgagtccgtgcaggtaggagacgacgtccttgagcgcgtcggaggtgtaatagctcttaaccttgccgttgtccacatagtagccctgttcggaagcgccgccgcccatgaaggaggtgaccacgccttcggagttcatcagcgtcagggggctccacaggccgaagccgaggctgcggatgttcatcggcacctcatcagccttgccattgccgttcggatcctgggtcttgaatgcatcgagcacgttctcgagctcgtcccaagtggtcggcatctggagtcccagcttgtccagccaagtcttgttgatgaacatgtgagtgccggaaacctcgtaacccttgccgcggtcggagggcagcatggcgatcttggtgccatcggtaacgtacttcgcggcacccggctgggccttgaggaacttcttgacgttcggcatcttgtccagatgcggcttgagatcctcgaaataggtgctgtacttggccgcatccaccatgctgaacaagctcaagccaatgtccgggaattcaccggcggccatcttggcgctcttctgctgaccccaagcgttgtcggagacttcctgccacttgatggtgcaatcgcaggcggcttccagatccttggtgtactgggtgtcctgcatcggatggtcggtcacgttgcgacgaaccagaatgttgacaatcggcttgccattctcatctgtggtggcctgcttgttgccgcaggcggcaagcgccgtggccatagtcgcaaccgcagcgattgatgccaacaggcgaacactccttcgtgccatgattaggctccttcttccttgatgtttcctcctcgtaccgatgtaagacgcacctgtacgagcccgtcagccacttgctttgtgactgtttctttgcggtggtcaacactataaatcgttaatcgtttaatgtcaaacgttaatcgtttatctcaatagttaacactctcattgaccagtccacccagcgccgcaaacgtaaacttcggctccatactgccgttctcgcagaacaccggaatcacccacatcgcgacacgccgttactcgtataacgtatctttttccatcaaatacacgtacaacccgtccgttgtacgcacaaaagcgtagccgaacatgacggccaccaagtcggccgctacttacaaaaggtgctcccctccttcaggaggaagaagaagcgcacggatacgatcagacagcaccaaaccaaacagtagccgcacctgggagccaggatgaagcattcggcatcgtacctgctggtcatcgccgtgggatacgctgtgcgccatctggttcacaagtaaatcgtgcaaaaatgcgcgttggcgcacgtccttttttatgggcgtgcgccaacgcgcatttttgcatcggcttctgcgatcaagcctcgcggctcgcggaagccgcagcgaacgccggcaaggcgcgaggtgcgttgaaaccttccttttcgaagcggtcagcaatcttctgtgcaatctcgtggccctgacccttgtccaccaacgcgatgatggagccaccgaagccgccgccggtcatacgcgcaccgtaggcgccgttcttgcgggccacgtccacggcgatgtccagctcggggacggtgacctcgtagtcggcggccagcgaatcgtgggaagcgttgaacagacggcccgcagccttgatgtcgccctgagcgaaggcacgcacgaaggaacgcacgcgctcgatctcggtgaccacatggcgcacgcgcttcttcatggtctcgtcaggcagggcgtcaagcgtttccttgagggcctggaactggtcatcggccttggagatgccgtcggcggtcacacgcaggttggccacaccaagaatcttggcggcttcctcgcaggtggcgcgacgctgagcgtactggccatcgttgagctggtgcggagcctgggtatcgaccacaagcagctcgaggttgtacttgtcgaggtcgaactcctgctgggagacgttctccagcggggtcaactccgggcggcagtcaagcagcagcgcatggccggcggtgcaacgcatggaagcgttctggtcaagaccgccggtggaggcaccggccatctcgttctcggacttgatggcggcgttgatgagggtcacacggccggcgtcggaatcgccgtagccaaggccgtacacgtcgtccagagccagagcggtggagcaggtcatggcggcggaggagctcaggccggagcccagcggcacgcaggagacgaaggcggcgtcaaagcccttgaccttgtcgaaaccagcctgacgcagcgcccaggccacaccggtcgggtaggcggaccagccgtccacgccacgggccttgaggccatcgagatcagcttcggcgaccttgtcgggagccacgtcggagacgacgcgaaccttggtgtcttcgcgcggcttcagggcgatgaaagtgcggtgcggcagagcgatcggcaggcacaggccggcgttgtaatcggtgtgctcaccgatcaggttcacacggcccggagcagcccacacgccctcgggcgcagcgccgtaggtatcgacgaacagcttggtggcttgcgagacgccttcctcatgggtcagcggctcaatgaattcaacagcagtcattgatgttttctttctatcagtcggcgatgtcgatggagccgagctcgtggaagcgcttggcgatgagttccggcgtggtgtcggagatccaggcggccatgccggattcggagccagcgaggtacttgatcttgttggcggcacgacggaaggagaagaactgcaggttcaggcggtagttctcgcggcgggcgtcgtggatcggggcctggtgccaggcggcgatgtacggcagatccatgcccttgccgtcgcccttgtcgaagaaggcgttgccgcgcttcaggaggtgcgagtacatggaggcgaggtcccagcgttcttcgtcgttgagctggtcgagggtgagcacgtcgcgcaccggagccacgtggacctcgaggggccaacgggcggcggccggcacgtaggcgacccagctgtggttgcgcatcacgatgcgttcgccggcttcgagctcggcgttcatgatgtccttaagcaggttgccgccggtcttctcgtggtaggcctcggtgtgctggagttccttctccatcttcggggcgatgaacgggtagcagtagacctggccgtgcgggtgagcgagggagacgccgatttcctggccgtggttctcgaacgggaagatctgctcgatgccttccatcttggagatttcggcggtacggaaggcccaagcctcaaccacggtgcgcaggcgggagaccggcagatcggccggcaggccgtcctcgttcgggtcgaagcagatgacctcgcagcggccggcggcgagcttcttctcccacagcgggttgccgtcaacgtaggtcacgtcctcggagacgccgggcacgcgcaccatggaggggaagcggttctcgaacacgacgacgttgtagtcggtgtccggcacttcgccgtcctggtacgggtcaccgggcttgcgggcggccagcgggttgcccttggcggtagcgccggggccggcggtgatcgggcggttcatacgggcggtggccatcgggatccagtcgccggtcagcgggtcgcggcgcatctgcggggcggcgtacggcacttcgttgccgtcggcgtccaggtgcggggcgaaacggtagtccagcgggcgcgggtccttgagctcgcgggtcttggcaccggagacgaactcggggtcgtcgtccaggtagaagaagtcacgaccgtcggcaagcgtcgtcggcgtgatgcggatgtgctccttcgcatactccccgggggtgtagttggcgaaatcagccatgggtttactcactttcctcaatgatctcgctctggtgggccagcacgagttcctttaccaaatccttggttttggcggcggagtcgggatcgagcccgtcgtcagtaatgaccgtgtccacctggtcgaagcgcgcaaacagcgacagcgatgtgcagctccacttggtgtgatcggtcaaaactatggtacgatcggcgatgtccatcatcgccatatcggttgcggcttccagcgaattcggcatcaggaagccacggggaatcgacaccgagtgggtgccgaggaatacggtgttgacacgcagcgaggcgacgaccttgtccgcgatcggaccgacaagcgagttcgatcgggtgatcacgccgccggtgacgatcacctccacgtccttggattcgagggcctggaccagttcggccacgggaatcgaattggtgaggatggtgatgccgctggactgctgcgattcgagcagatgctgggcgaagacataggccgtggtgccgccgccgatggcgatcacatcgccgggagccacatatttgatggcttcctgggcgatggcgtccttcaggccgagatccatctgggacttgacagagaacaggggttcgctgagcaaggtactggtagtcaccgcgccgccatggacgcgcttcagcagtcccttgtcggcaagttcggcgatatcgcggcggatggtcatcgctgacacacccagttccttcgatagcgccgtaatgcgcactgccccgcgcgtgcgcaacctgctcaagatgaggtgctgacgttgtgacgaaatcatgtgaacattatcgcacacaaaagctcacaaaccaaaccggcttgagcgttttggggacaatctctcgaaaattccgggcaattcaggtgttcatttccacaaaaccgcgcaaaatcgcacattgtgcgaaccgatattctcgcagcgaccactagcgcgatgactcacgaccgacgactctcccgagcgcgttgctcagcggcgagtcacgcctgatacctggtgcatcccgattcatgtatcttctgccgagccgacgcctgcgtgcgcctcgacacgcggtagccccttccccaattcgcctaggcaggaatcgcctagccgcaccagcccaagcgtgagacaataggcggtatgacttacgtttctgaaagcttctggcacgacgccgtcaacaaagccaccaccgatctgttcaccttcggctacaagcacatcatcaaaccgaacttcgtgttcaaccaccgccccgatgaggcacacgatcagatgatcgagttctgccacgtcgtcaagaacgtcccgccgctgctgctcgccgagcagctgatgctcgactacaccgaccccattctggaaacgaatgtgatgggcgtcgatttcaccaacccgttcggcctgtccgccggcctcgacaagaactgcgacatgcccgtggtgctggaccatgccggcttcggttttgaaaccgtaggctccaccacctcgcgtccctgcccgggcaacgccaagccgtggttccaccgtctgcctgaatacgattcgatgatggtgcacgtcggcctcgccaacatcggttcggacaaggtcatcgagcgcgccgagaaggcttggactcaggcccgccagatgcagctgtccgtgtcgatcgcccgcaccaacgacgaccagtgcggcgatttggacgaaggcattgaggattactgcatttcgatgcgccgcgccgccggccgcaccgcgatggtggaggtcaacgtctcctgcccgaacacgcacgtcggcgaaccgttcaccgcgactccggaagcgctcgaccgtctgtttacggcgctcgacaagatcgaccgcccgcagcccacgctggtcaagatgccgttgaacaagccgtggggcgagtacaaggaactgctcgatgtgctggccgagcacaatgtgcaggggctgtccatcgccaatctgcagaaggaccgcaccggcctcgagattccgcgcgattgggagggcggcctgtccggcggcccgtgcaccaacgccagcaccgagctgattcgcaaggtgtataa

SEQ ID NO: 2696 - DNA, 7153 bp, Unknown
  R36_18m  MAG No. k141_7489
aatcaggcgaggaatgaactggcaatcattgactataaagaagtagtacaaacacgctcttgagttctcaaaccaccaccactcacccacctcgcagctccccggaggagaaccactcgctgagcggcagcaaggaaataacttacacgcattcacggactcgcgcaaatcgggcgcacgaagataagcccaaatcgttgaaacgacaggcttcgctcggcgtgtcgaaatcagcttgaatcacgccgttatcatcaggatacgccggctttttatgggctcacgtaacgaaatcagatgttcaccggcgtgtcgcaacaattcattccacgttcaactcccctcagtccgatcacgcggacagctcacccgcaattacggacgagcaaagctcgcgcccttatggctcgactatcgtctcgccttcgtctaaaaaaacagtccaccggactgttttttaaacgacccagcatcaaagagggaagccaaaaggggattagaaggtcaggcgcatttggtgccagaccacgtcaccgtgagtggaatcggaaatgccctcgtcctcatatccgaatcgcgcatagaatccgaccaaccgatctttgcaggtgagcaccaggcctttacggccggctgcacgagtgtcttcaatgactttcctcatgagtgtactggcgcaaccgcgatgctgatacttcggcgcagtatccacgccgaaaatcatttgccagtcaccttgagggttgtgctgcgcggcatcctcgtacatgtcatcggtcaagtcgcgccgatcggtcacaaaaccgttgatgaacgccatgacgatctcgccatcaatcaatagccagaaacattccggataggtctcgattcgggcgcgcagggacgagcggtcggcggcctcggcggccgggaagcattcgaattccatggcggccagcgcgtccagatcgtcgatggtggcgtggcggattaactggggatcagaatcagtcatgtttttgtctttctcttaacactccgttgtgagcaactcccccagtcacgcttcgcgtgcgggctcccctcaccttgaggggagccggatggatgtcagattacgtggtattcgcgtagcagggtggcaatatcggtgccgtcgagtttcttgagcaccttcttgaccacggccttttcaatgaagttgagcttcatatcggtgaccggtgcaccgtcacgcaatttgacggtggcgttgagcaggttgcgcacgtcatagacactgccccacacttcaggcacgccgcggtccacgccgagcaacgtgtagacagcttccataccggtgcgcatcgagtactcggtggtgaagatcgtgtcacgcggggtctcggcgaactggccaaggaatgcgaagttcacggcaccatcgggcaccacgtccgggcggtcgccggccgcacgcggcatgaagaacgcggtgatgtacggcatcatgaccggcacggtgttggcgtgatgcttggcgagcgcctcgatcttgtcggtcggcacgcccatgtggtaaagccactcctcgcaaatctcttcaccggtgcattcggtcatcggcttcttcacatagttgccgggcttgtccgggaacaggccgtagacccatacgcacagctggtccttgggctggtcgcggaactgctgctggcggttcagggtccaactcatgagccagttggagtcctgcacagtgacgatgccgccggtgacgaccttgccggagaacgggtcgcgcttgcaaatcttctggatgtacggcggaatctcgccgtccagggtggtgatggtggcgctcatccacttggtggcattcggatcggagcagaacttctccggatggccaaagctcgggtcctggtcggcgatacgcttccacatatcccagccgccgccgggcttcaggtctgggttccatgcggcgggcgagttctgggaacccatggtggagttctccacgcaaccgccgttggtgatgaacaccagatcgttctcggtcaggtcgatggaggatttatcaccctcgtgatccacgtcgatgcgcacggcaagcttcttggtgggcgtgctggcagggttgcgcttgaagaaaccggaggtggcctgaatcttttggatggtgtcctggcctacgccggtgtgctcgcgcttggggccggctcccccgccaatcgcgaattccacgttctcaaccttggtgttgtagcggaattcgacgccatgcgattccagatacttgaccatcggcagaatcatcgactcgtactggttgtagcgggtgaaacgcagcgcggaaaagtccggcaggcctccgatgtgatgaatgtagcgcttgatgtacagcttcatttccagcgcggagtgccagttttcgaaggcgaacatggtgcgccagtacagccagaagttggagttcagcacctcatcatcgaagaaatcggtgatcggcttgtcatacaggtcttcgtccggggtgaagaacagcttcatgatttccatcgaagccttgtcggacaggccgaacttgcccttgagccccgcgtccttgccgaggtccttggtggcgcggcacagcgagtagttcgggtcctccttgttgagccagtagtactcgtcgagtacgctgacgccctcggtttcgatggagggaatcgagcggaacagatcccacatgacctcgaaatgattgtccatttcgcggccgccacgcatcacatagccgaggccgggaatatcaagaccgtcacaggcgccgccgggtaccgggtccttctcaaggatgtggatgttctcgccaggcatctgaccatcacgcaccagataacaggctgcagacaatgccgccagtccggtaccgatgatgtatgcatgcttgttgtccacgtcggacggcttcttcgggcgtgcgaaagcctcataattgccgctgctgtagtacatattccgcctccttggggtagagttgacgcttcgtcaactcttcttgaatagacatcatgtcacattattgccgaacacgccataggcaacgttcggcgttctgccgtattcgccaataccttgcgtctacggttttcgaggcctgtgttggctgttggctcataactattgaaggtatacaggcatactgaggatgcggggtgcttcaccgaaccggatgattgataaggtcccgctcaatccatgccatgaccaaatcggcaagtcggtttacctccgcttcggtgagttcacggcctttgggcagatgatgccatttttcgatgcatccgcggcagcatgtggcggtagcatgctgagcggtgaataccggatggccgcgccatggcgtctgcctgccgtcgttcttcggttcggctgcgcctatgcggtctcgcaacatttctcgcgcatgacgatcgatggtcgccttgcctttggtgcgggcataggctcggtctttgtcggtcaaagcgaatttggcgcggaactgcgaatgagacagccgttccagcatcgcggcaatccattgtcgctcgtcatcgttgttaccagtatccgccatctccatgcccatacgttccacaatagtcgcgcacatcgtatggtggcacatgccttagccccctctgatgaaggagccctcccccagcaaagccaggtgagggagaggccaggggcgaaaccagccaatcaggcggcaggcaagcagctggggccaaacagaatcttgatctcagcaaacaacgaagtatcccgcttgacgcggaaacgatcgccaaacgtgagcacctgagcgttacccttctcatccagcaccgcaagatgtacttcgcagtaaccaggatgattagcgagcacctgaccgagttgcatcatgcgttggcgctccaacgccaccggcggcaacgtgatgaccaacggacgttcatcctcggcttccaaggtcggaatctgcatttccgtggctctcagagaaacggtttcgtcgcgcaactccacttgaccacgaatctgtacgatggcgtccacggcaagttcggcggcggccgcttcatagaccttgccgaagaacatgcattggatggagctttccatgtcttcgatggtcacgatggcccaggggttgcccttcttggatacgcgccggtccacattggtgaccaaaccagccaacgtgacctgctgtccttcacccatcgttttggctcgatcaaccagatgcgcgatggacatttcacgcagggacgcgagaatcgactgcataccggagagcggatgatcagacacatacaggcccaacatttcgcgttcgaagttaagcttggtcttcttgtcccattcctcaagatcgggtacggtcacggaagcgtcgcccatggcctccgctcccccatcctcggcatcggagaacaaatcgaactggccctccgcctgtttgcgcttcagactcaccaccgagtcgatggcggcctcgtgcacggtgaacagcgcgcgacggttcgggtcaatcgagtcgaaggcaccggccttgatcaacgattcgaccaatcgccggttcagcgcggtcaggggcacgcggcggatgaagtccatgaagttcacgaacttgccgcgcgggccttcgcgttcggcgatgatatcggccacggccttgtcacccacgttacggatggcaccaagaccgaatcggacgacgtcgccgactgccgagtactcgtacaccgattcgttgacgtccggcgagagcacctggatgcccatgcggcgggcctcgcccaagtacagtgcggtcttgtctttgttggtggcggcaccttgcaacagggcggccatgaattcgaccgggtagtgcgtcttcagatatgcggtccagtaggagatcagaccgtatgcggcggagtgcgctttgttgaaagcgtagccggagaacggcaccagaatatcccacacggcctgggaggcctcttcggagtatccatgctccttcataccggcgaagaacggcaccttctccttggccagcacttcgggcttcttcttacccatggctcgacgcagcacgtctgccttgcccagcgaatagccggcgaggattcgggcggcggactgcacctgctcctggtagatgatcagaccataggtctcgtcaagcacctgcttcagaggttcctcaagctcagggtggattggcgtgatcttctgcaggccattcttgcgcttggcgtagttggtgtgcgaatccatactcatcgggcccggtcggtacagagcgataagtgcggaaatatcgttgaagttatcgggcttcagggttttcagcagtgaacgcatgccgtcggaatcgagctggaacacgccgagcgtgtctcctcgggacatgagtttgtaggtttcggcgtcatcgagcggaatcttggtgtagtcgatggcgggtttgccgttggcctcgatgttcttcagggtgtcgtggatgatcgtcaagttggacaggccaaggaagtccatcttgaccaaccccaacgtttcgcacgtgtggtattcgaaggtggtggtgatggtgccatcggtgcgttccagcaacggcgaggtgtcggtgatgggcgcgctacccatgatggtggcgcaggcatgtacaccggtctgtcggatcaggccttcgatacccttggcttcttcggtgatgcgcttggcgtccgggtcggaatcgtagagttctcggaattccctggcctcggcgtagcgtttggctgtcgggtcgaagatgtcatgcaggctgatatccttgccgccggtggccgcgggaggcagcgccttggtgactttttcaccgaccgagaactcgtagcccatgatgcgggcggagtccttcaaggcctgcttggttttgatggtgccatagatcacgcactgggcgaccttatcggtgccgtatttttcgccgcagtattcgatgactcgcgcacgaccttcagggtcgaagtcgacatcgatatcaggaaggctcactcgctcagggttcaggaacctctcgaaaatcaggccatgcttgagcggatcgagctcggtaatgcccatggaataggcgaccatggcgcctgcggccgaaccacggcccggacccaccataatgccgtggtccttggcccactgaatgtagtcggcgaccacgaggaagtatccgcagaactgcatctggcagatcacaccacattcgtagtcggcctgcttcaatacgtcgagcggcgggttgccgtcgtaacgcttctccagaccttcctcgacttttttaaggaacagggaggtctcatcccagccttcggggcaggggaatttcggcatgaacgcgccgtcttcgtggtcgtcgaacatcacgttgcagcgttcggcgatggcgagggtgttgtcgcaggcgtccggatggtccttgaacagttcgcgcatctcttcggcggttttgatgtagtagccggtgccgtcgaatttgaatcggtccggatcgtcaagacgggaaccggagttgatgcagagcatggcgtcctgtgcctgggcatcttcggcgtgtacgtagtgggaatcgttagtggccagcagtggtgcgttgagtttcttggctatggtcagcaggtcaccggtcacctgagtttcgatgggcagaccgtgatccatgagttcgatgaagaagttgtctttgccgaagatgtcctggaattcgccagcggcgcgcagggcctcatcgaactgaccgagacgcagacgggtctggatgatgcccgaggggcagccggaggatgcgatcacgcctttggaataggtggcgagcacctccttatccatacgcggataacgcatgacgcgaccttcgaggttggccacggacgaagctttgatgaggttgaccaggccttcgtcgttttcagcccacatggtcaagtgggtgataagaccaccaccggagacgtcgtcacggcgctgggcttcggtgccccaatgcacgcgggatttgtcttgacgtgcggtttccggggtcacataagcttcgatgccgatgatgggcttgacgccattggccacgcagttggtgtacatctcgtaggcgccatgcatgttgccatggtcggtgatgccgaccgcaggcatgcca

SEQ ID NO: 2697 - DNA, 5409 bp, Unknown
  R36_18m  MAG No. k141_7598
aactggcaatcattgactataaagaagtagtacaaacacgctcttgagttctcaaaccaccaccacaccagcaagacaggaaaccaaccagaagaaggaacccgccgcgctgagcggcaacaggtgaataacttacacgcaaccacgccacaacgcaaatcaaagcgcacaagaacccaaggaatcggcataacagcgcggttccttcggcgtgtcgcacagagcccaatttgctctgatagggctagcgtaacccctcgaatgtttccggaaaacatcgaatccattattcggctggcgtgtcgcacgagttttcggactgtcagctccatgttcatcgttcggcaaccacaccaccggcgcacaatcaatgcatggcaacaacgctccatcatcggatttcgttcatgaatcacgggtatacctgtagttatgaccaagaagattgctgtattaaccggggcgggcatttccacgtccgctggcatccctgatttccgcggtccggacggtgtgtggaccaagcatcctgatcaaatgagcgtttacgacatcgatctgtttctgcgtaacaaagaagaccgtgagtactcctggcgctggcagaaggaatcaccagtatggaacgcacagcccggcaccgcgcataaggcgctggtcaagctggaacaagccggcatgttgacgctgctggccacgcagaacttcgatgcgctgcatgagaaggccggcaacagcgacagcgtcatcgtgaacctgcacggcaccatcggcacctcgcattgcatgaagtgccatcaggaatatgccacggcggacatcatggcccgtttggatgaagaacccgatccacattgccatcgcaaactgaagtatcgtggcgatatgccatgcaatggcattatcaaaaccgatgtggtgtatttcggtgaggcactgccggacggagcgatggagaagtcgtacagcttggccaccaaagccgacgaactatgggtaatcggatcgacccttgaggtgtacccggcagcgagcattgtgccggtggccgcgcaggcgggcgtgcccatcaccatcatgaatatgggtcacacgcaatatgaccatcttgcgagccgcttgattcatgaggatatcgccgtcgcgctgccgaagttggtggacgagacgattgcggagaacaagtagtcctcagcataacgaaagcgccggtgggtggttaagcaactgatgattgttggttaaccacccaccggcgctttcgcgccacctcccgctagcgggaggtattggagcacacttctgcgcggcctcccgccagcggtattggaatcagtagatgcgcttgggctggaatccagcttccctgagtgccacgaggatgcggtcgatgtgctcggggccgttggtctcgaccgtgacgccgagagacaccgcgttggtgtagtggccggatgccttgaactggtcgtggtcaagctgaatgacgttggcgcgctgctcggcaagcagggtggccaccttgacgagctggcccggagtatccggcagctcgacctcgaagttcatgatgcgaccgcgggcgatcatacctttctgaatcaccgcacccatggtcacggtgtcgatattgccgccggacataatcggcaccaccacgtgcgggccggtggcggcggcgaacttgcgcgaacgcaggttcaggtgttccagcgcggccagcgaaacggcgccggccgcctcgaccaccagcttgtgcttctcgagcatgagcagaatcatttcgttgatgtcgcgctcggtgacggtgaccagatcgtccaggaactcgttgatcagagcgaagggcaggtcgccggggcgcttgactgcaacaccttcggcggaggtgaccacatggtcagccggagacacacgacccgcggccagcgagtccttccaggccggggagccctccggaatcgcaccgattacgcgcacttcaggcttgaacgtcttgatggcgagcgccacgccggcacccaagccaccaccaccgagcggcacgaccacgtcagtgacgttcggcacgtcttcgaggatctccagaccgatggtgccttggccgcagatgacttcgtaatcgtcgaacggcggcacgtaaatcatgccttccttgtcggcgagctcagcagcgtgggcggcggattcgtcgaacacatcgccgtacagcaccacatcggcgccgtaggccttggtggcatcgaccttcagcggcggggtgatctgcggcatgcagatggtggccttcgcaccacgctcacgggccgcataggccacgccctgggcatggttgcctgcggatgcggtgacgatgccacgggcgatctgctcttcggtgagcgatgcgatcttgttgtacgcgccgcgaatcttgaaggaaccggtgacctgcaggttttccggcttcaggagaatctcatgaccggtcatctcgctcaataccggcgaagggataatttccgtatgacgggcagtccctttgagacgtttggcggccagcttcagttcggctgcatgatcacgctgcagcgccttcaaaacatccttttgttccatagctttccattgtaagcaccacaatgccgagagacaccggctatctcgcttcacagaggtacattcggcctcttgcagacagctatctgcttttcacaggggtaccgagcatcgaaaaccccgagtataagccttgatttttcaacgcttatactcggggttttgacgttacggtacctctttcaaggcggatagcatttcgcaatagcccggaagtatctctgtgaacggagaaaggtactcaatccgctacaatcgctccaatcgctacagctgaatgacggcggcctcccaaggatcgagctcacggttggcgagggagaccacggcgtgcggggcatcatacgtgctgattaccacgttcgactcggtgattccggcggcggccagttcggcggtttcgcgcggtagatcaacggttcggccggacatgttgaccacgaccagcagcttctcatcgccgagggtgcgggtgaaggcgtagacatgcgcgtcatccgcatcgagcagatgccagtcgccggccgccacgacaggcatgtcgtggcgcagcgcgatgagctgcttgtagaaggcatacaccgaatccggatcgtcgaattcgccggccgcgttgatcgccgcatggttgggattgacggagatccatggctccttagcggcatccggcgcagtgaaaccggcatagacagagccgtcccattgcatcggggtacgcgaattatcacgaccgcgcgcggcgatacccgccaacatcgattcgggcgactgcactttggcttcctcaaccctttgacggtaagcgttcagggactcgaggtcacggtactggtctaggcgcgtgaagtgggcgtcggtcatgcctagctcttcgccctgatatatgtacggggtgccgcgatgcatgtgcagcatcaggccaagtgccttggccgaacgcacacgagattcctccgaggagtcatcaccccaacgagaaacgacgcgaggctggtcgtggttaccagtaaacaggcttgcccagcctgcattcttcacggccgcttgataaccggccataatgctcttgagcttcggcaggtcaagtggcagtggcttccatttgacgccttcgcagtcaaaatcaacgtgctcgaataggaagagcatgtccagctcgccgttggcggggtcggtgatgtattcgttgcgctgtgcggtaacgccgggagcctcgcccacggtgaggaagccctcacggccttcgaacacttcacggcgcatttcggccaggaattcgtcttggcgagggccgtccgcgcagaacggattcgggttggaatagccttcctcacccacgggcagatcgtccagctcggaaccgtactcgccgggcagcttgccagacaggtccgtgcgcttggaaatcagcgtaatcacatccatgcggaagccgtcaacgccgcggtcaagccaccagttcatcatgtcgtataccgcgcggcgcacagccggattttcccagttgaggtccggctgcttcttcgagaactgatgcaggtagtattcgccacgctcagggcaatactcccatgcagaaccgccaaagtaggagccccactggttgggctcggcaccgggctcgccggcagtggtgccgggacgggcgggacgccaccaataccagtcggcgtgctcatcatccttgtttttggacgcttcaaaccaggcgtgttcatcggaagtgtgattgacaacaagatccatcacgatcttgagcccgcgcttgtgggcctcggccagcagctcatccatgtcgtcgagtgtgccgaacagaggatcaatgtcctgatagtcggaaatatcgtagccattatcgtcttgcggagacttgtataccggggatagccacagcacatccacgccgaggtcggccagatagtcgagccgtgacgtaatgcccttgagatcgccgaggccgtcgccgttggtgtcttggaaggaacgcgggtaaatctggtaaacgaccgcattggaccaccacggatttggggtggcaccgttggtgcggatggaatctggaattactgtgcgttgtgaagtggtcatcgttggctcctccattatttatggtctacattgcctgttgctcatagtctaaaaagcgctgaattacatttccattggggaactgcgttggtgtgccggaaacaaaaactgcaaagagccggaaggcactgctacggctcaattctcataagctgcacatgctatttagcaacatatgggccctttcgctgtttgtggtgggtgactgtgccgtggggtgatgttggtcgggtaggttggaggcatggatgcctctcacctgttcaccgccgcgcttcggctgcggtcgccttggagggtcgggtctgcggacttccgtgacgccgacggcgacgggcgggagccgcacatcacgatcggcttcgagcccggcagagggttcatgctcctgttcgaggcgtgggtgtggctatatcgcctgtgctcgtggatgatgcactcgaggctcgaacctatgaaggagctcgcccgcttgttccgccgccacttcgccaccataatctacctgacctgcggcagctcacatattaacggttcttctgattgcgacgcgcaagagcaacttcgggcgcgcttggattgcctgcttgaacccactggtgcggggatagatgatttagttgacacgcctgcgggaatctggtggggatttcgctggcacaccggatttcaagcaaaccccgcctcgggaaccgctccggacttcggcgttggcccggttcg

SEQ ID NO: 2698 - DNA, 4194 bp, Unknown
  R36_18m  MAG No. k141_7631
aagggcatcaacctgccgggcgtcgccgtctccctgccggccctgaccgagaaggatgaggctgacctgcgttgggccatccgcaccggtgccgacatcatcgccatgtccttcgtacgtttcgccaccgacatcgaccgcgcccacgagatcatggacgaggaaggccgtcgcatcccgatcgttgccaagatcgagaagccgcaggctctggagaacctcgaagagatcgtcaagaccttcgacggtgtcatggccgcccgtggcgacatggccgttgagtgcccgctggaagaggtcccgctggccaccaagcgcatcatcgagctggcccgccagtatgccaagccggtcatcgtggccaccgaagtcctcggctccatggtgaactccccggtcccgacccgtgcagaggcctccgactgcgctaacgccgtcctcgacggctccgacgccaccatgacctccaacgagaccgccgtcggcaagtacccggatgtgaccgtggccaccatgtcgcgcatctccggctacgccaccgaccacggcttcgaccgcatcccggagctcaagaacctcgacatgtcctccaccggcgccgtctcctccgccgccgtggacctggccgacaagctcaacgccaaggccatcgtcgcctacacccagaccggcgccaccgtgcaccgcgtctcccgtgagcgtccggccgccccgatctacggcctgaccagcaacgagcacacctaccactggctggctctgtcctggggcaccgaagccttcctgctcaaggaggactaccacgacaagtcccgcaaggatctgatgatctacacggacaagatcctcaaggacgccggcaaggttgctgacggcgacaagatcgtcatcctgagctctgctcagggcgatcaccagccgggccgcaccgactccatctacgtgcacaccgttggcgcttgcgactgatttcaggccgctggtagctgctgacagctagcacatagcacgcgaaagccccccatccagaaagtggatggggggctttcgttatccgttatgttgcgattgtgcggtgattgcaatggcacgtagtcaccgcgatgatcgagcgtggtgactagtcgttgagatgatcgagcgtgccgctcttcagacgcagaatggcgaccatggtcttggcatccacaatcgtgccattgaccaccatctcataggcatcgtccaccgacaccatacgcacgtcggaacgcggagtctccgggccgatttcctgacgggaagccggggtaagtccggtggcgaagaagattgcggtgtgctgggtggaatagctcggcgtgttcataaaacgggtgaactgcgtaagcttggaggcatcgaaaccagcctcttcggccagcttgcgcttagccacatcggtcgggcgttcggacgggttgttggcgtggcctgccggaatctccaacgtccaacgatggttggcgatgcgatactgctcgaccagcggaatcatgccgtcatcggtgacggccagcacagccacagtgtcgccattgttctcctgaacaaagtagcgttcaaacgaaccgatttgattcgactcataggagacgtgatcgacattgaaataatgcgtctccacaatctgtctacgggaaatctccttgaccggagaggggcgccagggatcgaactgacggtaagtttcgttgctcataagccctcctaacaaaagcgatacatcgaaactacagcccattgtaagcggtgaaaccacgcaggagaacgggcaacacacgggtgcgccgtccgcgatatcgacgtgtttcgcctgtttcaccggggggaatggaggattggcgcgtgtcttgtgtcgcaagagtcgaattggtatgctactctcttcagagtgctttggcacgccctcgtatcccaattggtagaggaagcagcctcaaaatctgcgcagtgtgggttcgagtcccaccgagggcactttagctaggagttcgctgaaattattacgaaccccattgttgggtaattcaagaaagaggttggcatggctgcaaggaagaagtccgaagaaccgagtatcaacgtcgatgaggtgctgaccgacgaagaactcaaggccgtagccgatgaaagcgaacctgctgagcgcaaggccgtggccgaggatggtccgcgtaccgtcgtcgtggccgaggatgaagccgtgaaccgcatggatctggtcgccatgctggaagacaacggttatgaggtcgttggtcaggccgccaacggcgaggaagccgtggaactgacccgcaagtatcgccctgatgtggtgtgcatggatgtcaagatgccgcgtatggacggcatcgccgctgccggcattatctgcgatgagaacatcgcccctgtcgtcatgctcaccgcattctcccagaccgatctggtgaagaaggccaccggtgccggcgccatggcatacgtcaccaagccgtacgaggaatccaagttgctgccgaccctcgaggtggccatgggccgtttcgccgagatcaacgatctgctggacaacgtggagcgcagcgaacgcaaactcaaggaaaccaccgaccagctcaaggaaaccgaagagaagctcaagaaggccgaagacacgcttgaggagcgcaagctcgtcgaccgcgccaagggtctgctgatggacaaggctgacttctccgagcagggtgccttccgttggattcagaagacctccatggaccagcgcatccccaagaagcgcctggctcaggccatcatcgccaagtacggcgatccgaagccttctgattcgggcgaacgctgattatcggcgtcgccgtactgagtcgtaaagcaacacaaacacactatgggagaggccagcgtgaccgtacccaccaatgaaacattgctggtggtggacggccactcgctggccttccgtgcatttttcgccctgccggtcgacaacttcagtacttccagcggccaggccaccaacgccgtctggggttttgccaccatgctcgcgcaggtgatcgatgcggagaaccccgaccatctgggcgtcgccttcgatgtgaagggcggcacattccgcaatgagatgcttccgcaatacaaaggcacccgtgaggcggctcccgaagagctgctcacccagctgccattgattcaacgcatgctcacggccctcggcgtcacctacatcgagaagccgggattcgaaggcgacgacgtgatcgccaccctcgccaccatgggagacaaggccggctaccacacactggtattgtccggagaccgagacgccttccagctggtggatgacaacgtcaccgtgttgtacccgggtcatcacttcaaagacctgaagcatatgacgccgcagtccatcatcgacaaatacaaagtcactcccgcacaatatccggatctggcggcgctccgcggcgaaaccgccgacaatattcccggtgtgcccggtgtaggcgatggctttgcggccaagtggatcaaccaattcggttccctcgacggcatttgcgagcacgccgatgaaatcggcggcaaaaaaggcgaatcactgcgggccaatatcgaccaggtcaagctcaatcgcaaagtcaacgcactggtacgagacgtcgatctaggcgtcgatatcgaggatctgacattcggcaccgtggacgtggcacaaatcgacgccctgttcaaggagcttgaattcggacctcgcaccaagagtcgcgtgctgaaaaccttcaataccggggccaaggtttccaacacatccggagccggcgagtctacgaataatgaacaggacgagcaggataacagtctcgatctgaacctgccggaacccacgagcatcacctcttcggagcagttcgacgaatgggtcaaggcccatcgcgtcgagatcaatgttcccggtgaaatcgccgatttcacggtttccgactatggcgatggatcgcagcggcatgccgtctgcggcgacgcggtcggccacgcttggaccgtggccgcatggggcgacgaaaggccggggcgtgccacggcacaaaccattgccgtggccacggcaacatcagcggccatagtgccccttccaatcaccgataccctgcgagcacagcttgcgcggttcctgaaaag

SEQ ID NO: 2699 - DNA, 17398 bp, Unknown
  R36_18m  MAG No. k141_7806
acggcaccatcctcaacgtgatcggcgacgccgtcggcgccggatggttcgggctcggccccgtctacccggccacgggaggcatcctcgcggtcaccggcacgcccgccaacgcggccatatccctgatcgcgcagctcgccgtcgccatgctgctcatggcgttgggtggatggtgctcggcacacccgcgcacaacgcgctgaacggcaccggcggaacccccaccgaaaaaacatcacacggaaagaagacgtcatgttcatctccatcaaccacctgaccaaggacttcctgaggaagccccgcgcgctggacgacgtgacctgcgacctgccgcacggcatggtcggtctgatcgggccgaacggcgcaggcaagaccacgctcatgcgcatcctcgccggcatcatccgccccacatcgggccaggtactcatggacggccacgatctgaaggacgagaggacccgccgtgcgctcaaacgcacgctcggctacctgccgcaggacatcgaaccctacccgcagctcaccccgctcgaattcctcgactacgtgggcgtcctcaaaggcatcgacgacacgcgaaagcgcatgcgccaggcgcacgagctcatcgaacgggtcgggctcacggacgtggccgaccggcgcatcggcggcttctccggaggcatgcgccgccgcgtcggcatcgcccaggccctcatggcggatccccggctcatcatcgtggacgaacccaccgccggactcgaccccgaggaacgcatgcgtttccgcacgctgctcgccggcctcggcggcgaccgcaccgtgatcctgtccacccacatcctcgacgacatcgcccagacttgcccatacgtgttcgtcctgcgccaaggccgcatccgctacgacgggccgaccgaacacctcaccgaacacgccacgggccgtgtctggctcacccagccatccaacaccccgccaccggccggcatgatcgtcgccaacgccgtcaccaccgcacgcggcgtacgctaccgcgtcatcaccgacaccccgcccgccgacgcgcatcccatggaccccacattggaggacggctacatggtcctcatcgaggaacaccccgaccagcattgacggcagacgaacaagcaccccgaccaccaccgaacacgacaaaggaaaccagcatgaccaacacgacacacgccatccaaaccatcaccgccacaagcctcgccgccatcatgaccctggggctgaccgcctgcatggacggcatcgaacaccccgaaaactaccctaccaacggcagcaagaaaatcaccgcgaccagcaacccacaggacatcagcgccgaccagctcggccacacatggcccctcaccgtcgaccacggcaccgtcagctgcacgcacaacagcaaaggcgatcccgtcatgcgcttcaccgcgcccgacggcacccaatacgccctcaaccagaccagcgacaacaaggacctgcccgacatcaatcagctcctcgccgacggcaaatccaccggcaccctcaccagcttcgccttcaccgtctgcgacgtgaaataatcatgcgcccgctgccggcggccgtgtcgatgtcgaccaccgtgcgcataccgcgagaatcctgtgacgctgacggttcatcatcgtcttgcagtcaggaccggcgcggttccgccgccgttttctccgtaacaatcgcgtatagcaccagtgcgaccagcacgacgagccgggtccaatcggaattacggatgagcagcccgacgagaatcaggacgtcgtagaacagcgtgcgcgcccaccgccacgggtattccttacggacgcgcatcgtctccgccaatccccagatcagggcgcagacggcgatgataccgttgaaccacagcactatgggcctgccctgcggatcggtgtccggcatagcgagattgctgaagaacatcaccagagcacccgtatatacggcctcgggcgcgaccgacaatcttccgccttcaacgcgaggatctgacatgattacctccttattgggggatccgtcaacgctaacgaatcatgcgaaaaaccattatatttgaatggtatgagcggggctcaagcattcacaacatgctgtcaagcaatcgtatgacaagaatcatccgtttacggcatcgccgccggatgaccacaccagcagggcacccgcgagggagacgacgatgacgccgatcacggccaccgcggtgatggtctgtcgcaatatcagcgcggcgataatcacgctcatggcggggtcgatggagaacagcgtgccgaccacgcgcgccgacgtgatacgcccggacaacgtgtccatcgtgtagggaatcgcaactcccagcaccgccgaggctgcgatgacgccccactgggcggccgacacatgcggcgcgcgagtgatggataccggcgaagtggccagcgccgcaaccgtgaccgacagggcgagcccgtcgagcccggtgcctgccttgccgacccggtcggcgaagagcgtgtacaggccgaagcacacggccgagcccagcgcgaacaggtagccggccggattgaagtagccgcccggcgtaaacgagatcaagcccacacccaccagcgcgaccaccgcgcacaggccctcgcgccagtgatgcgaaccggccagggcgaccacgcagggtccgaggaattccagggtgacggccacgcccatcggaatgcggtcgatggccgagtacaggcagacgttcatcgccgccatcgcaagcccgtagattacgatgcccagccattcgcctttcgaccggccagccagtttcgggcgggtgagtgcgagaatgacgatcgcggcgaccagcatgcgcatcgaactgaccggaattggtcccaacgcgccgaacaacgacgccgacagggacgacgacgtctggatacccaacgaccccaccatcaccatgccggccgccgccatcacacggccacgcgccgaacgcggcgcccgaagcttgcccaatacccctcccctgtcacggccattcccacacgacctctgcgccaccaatgatagtgttcggcgaagactcgcgacgtgcggagtcgactttgtatggcgggatcagcggaaagcggcaggctcactcccgcaacggaatacggtgagaaagctggctgccggacgattacgatccgaaacagtgcacccgtatacggcttcggtcagacacgtttcaccgccttgaacagcagacatgcgcttatcgcggcgatggcgacgccgaccggaatcacgtaaccggcgaatttcaccccgttcaacacccatgtggttggtatgacggcgtacagcatcggcgcgtcctcgaacatgccggaactcaccgtaagtccggcgacgatgaagaaggcgacgacgttccaggcgacgagaggactggcatagagtcgcagaacgaagcatgccagggaaaggacgacggcggtgaacgcaagcatcagaatggtacgcgacgaaagcggctcgttgacgacgagcccgacggcaagcccgtacagcaaagtcaggcagacgttgatcacgacgccgagcgacagcgacttcacgctgaagcgaagcaggagccggtcgtggatgctgaaggaacggtacgaggagggcaccctcgcatgggagaagacgagaccggccgcggttacgggaagcgccatcaccatcgccgactgcaccaccgcacccgtgttcccgtaacgcaaaaagaacaacggaaacagcagcacggccacgaaggcgagcgtcgaccagcggatcaccgccacacgctcaatacgcaatagggacttcatttcctctccactccttcgcgacggaaccggctcaacagcacataggcaaccaaaagcaccacgatcgggacgacgaccatcacggggccgacggacgctcgactcgccgcttccgccggcgacatcacggtgccgttcaggttcagcccgacggtccgtagggcgttcgcgacgtagggcgtcgcatagtcgggaaggtcgcccggcaggagaatccatgcatagcaaaggatggccgagacgattccggcggttctgggatcggcggcgatctcgacgatcgagtagatcagggaggtcgcaaggctctgcagcacgacgaagcacaggacagctgccagatgcgggtgcattccggtacccgtcaggaccatgatggcgtcgaagcacagtacgccaatcaggttcgcggaggtcaggatcagggcccggaacacggccctgagcgagcatggcgtccacgcggaatacacgtggcgcggcaggccaccgtagtgcgccttcgcgaccctggcatcgcatgcgaagagcagcgaaagacagatcaacggctgggtggcggtgaaatagacgcaataccctccggttatcggggttccgttcgccgcgcttgagatccacgcacccagcagaagggacgagacggccccaaacaccgcggcgaggaaataccacgtgttccagtagtaggcgaccaacgcgcgaacaggggaaacggcgttcaagaccctacctcccctgatacagatccgcgaggttcaccccggtcagatccgtgacctgcacggcccggccgtgacgaatcatgatgcactcgtccgggacgccctggatctcatgaagcagatgcgtggagatgacgacgcagttccccttgtcccggtaggcgcgaagcgtttcggacaaggaggctatgccatcggggtccagaccgttctgcggctcgtcgaggaacaggaacctcggatgcggcacaagggcgaggcacagctccagacgctctttcatgcccgtcgagtagtccttcgccttccgcccatacaccgcgcgattgatgcccacaccgtccaacgccgcctccgggtccacatccagaccccagaacgcggagaccacctcgacgttctctctaccactcaggtaaggaaagaaactgggatggtctatcgccgcggacatctcattgatattcgtccctgtgtacgtgacctctccgctcacgggctttatccgtccgagtagcgtcttcatcaacgtggttttgcccgcgccgtttgccccaagcagacagatgatcctacccgtgctcaaccgcaggttaatgttgctgacgattggggaacccttgtacccgatcgagagattcgtagccgatataactggcataatcacccttcacgaaaggcgggcctgaaggcaaaggtaggatgccttgcccagacccgcgcgttgcaatgtcgccgccatttcacccttcagcggccacaaacgtaacatcatgtcaggcaatcgcatgacggttgctccatgctccctcgatttgccgaaactatccatcggccaaaggaatgaacctgcgcatcatccgcaaggacgatgcatccgactcccatcgcacacttgccgccaccggtctccccccccccaaaaaaaaatggcgaagggcgggttccagtgatcgtcgcaacgcctggctgactgatgggagggccaggtggacaggtgggtgttcgagggcgtggagtacgcgacgcgtggcgagatgtgcgcggcgcggcggcgccgctacgccgagctgctggaggcgggcatgaacttcacgcaggccgcgcgggcggtgggcgtgtccaaacgcaccggcaaggtgtggcgcaacggaaggacacgatcgaacggcaggaacgagaagccatcggtggactggtatcgttccaccgtggacattccccaaaagatcagttcgaggtatctgagccaggacgagcgcatcagcatcgccgactggcggaaggccggcatgagcgtgcgcgggatcgcgcgcacgctcaatcgtctcgcgtcgaccgccagccgcgagctggtgcgcaacacgaatcccgcgaccggcatgtacgagccgtaccggccccagcagatgagcgcggacggcccagacgacccaagcccgcgaagatccatacggtgcccggcctgctcgcatacattcgtgcaggattgcgggcgcattggagtcccgagcagatcgcggggcacctgcgcgccgatttcccggataatgatgctatgcatgtgtgcgcggagacgatctaccaggccatctacgtccaggccaaaggcgaactgaaaaaggacgtcatcaaggccctgaggagcgggcgcgcccaacgccggccgcacgggcaggcgggttcgcgcaggcccgtttccgcgagcccatgatcatgatcagcgagcggcccgccgaagtcgaggaccgggcgatacccggtcattgggaaggcgacctgatctgcagcgcggccaacaaaagcgcgatcggcacgctcgtggaacgctcgacacggttcacgatcctcctgaacctgcccgacgggcacgacgccaaacacgtccggcaggccgtcatccggaaaatgcaatacctgcccaagctcctgaggaactcgctgacctgggaccagggaagcgagctcaccctgcacaaacgcatctcgaccacgctggacatgcaggtgtatttccgcgacccgcattcaccctggcagcgcggcaccaacgagaacaccaacgggctcctgcgccaatacttccccaagggcaccgacctgagcgcataccccgaggactacctcgacgcggtcgccgaggaactcaacgaccggccccgcaaaacactcggctacaggaaaccatccgagaaaatactcgaactcatcaacacagcatgatacgatcgcaccaatccaagaccgccatcaagagcggcaaaacacacaggtgttgcaaccaccactaaaatccgccaagcccaccttgccgaatggggtgtcgaacatggaatccgtcttgggggggggcgtgcggtagtcgcattcgtaacaacaatccgcttgaatgagctgctgagcaaatagcaggtctacatgcctgctttgaaccagccgatggcgatttgagtgcgattgcgcaggcccaaagttgcgaggatacgggtcacggcacgtttgacggaggcaggttcgacggtgagttgattggcgatttcctcgttgatgagcccttcggagatgagtgcgcagatttcacgctggcgaggggtgagtgcgtcgaaagctttgcgcatttcttgctggcgctggctgctggtgggatgcggaacgcctcgttcaagcacttgtctggtgattcgtggggtgagtattgcgtcaccgttggcgatggcgtgaaccgcgtcgatgaggttgtgcttggtgacgtccttgagcaggaagccgctggctccggcgtcgagaccgccaaaggcgtaatcgtcctcgtcgtacgtggtaaggatgagaatgctgatggtgggccagcgtctggtgatgcggcgagtggcttcgatgccgtccataccgggcatccgcacatccatgaggattacattcggcaatggacgatgctgaacggcgagctgttcgagcgtctcgatggcggatcggccgtcagcggactgggcagtgacgacgatgtcggaagcatcgtcaagcatgagttggaagccaagtcgcgcgaaacgctggtcgtctacgagcattatacgaatcatgcggtgtggtccttttcgttcactccgttggacgggatggtcgcctcgacgacccattcgccgtcttcgtttggaccgtattcgaagatgccgcttgccgattcgacgcggtggaatagacggacgagcccagtaccgtcatccttgcgcgcgtccttgcgcgcgggactgccgtcattgcggataatcacggcgacggtgccgttctcgctgtggttccaggcgatgctgatatgcaccacgttctgtccgtgacgtatggcgttggtgatggcttcgcgagtcacatcgaaacacaaatcagcctgagcttcgtcatcggcgcgcgtaccagtctcggtgaacaccgtgacgatgcccagccggcgtgcgtgcgcgagaatcggccgaatgtcatcccatgaatgctggtctgattcttgggtgtgcgtatcgtcaccgttcgccgctccatcgaactcggtcagtgcgcggacggctttgcgcgtgtcgcccagactctctcgtgcgatttcgttgatgccgtgcagcgcatcctccacgcgtgggtcatcggttttgccggccagaccctcagacagtgcgatgattacggtcagatcctggcccacactgtcgtgtagttgaccggctatgcgcgaacggcgtattgcggcatcgcgttggaaggccagctcggctgcccgacggcattcctcggcagctttgtgttcggcttccttggcctgttgcctgccacgtactgcaagcgcgccgcctcccacggctgccaacgttaccactcgactcacccattcggtcgcgagaacgtccggatgcaccatgatggccgacgcggtcatcgacagcatcatgccgatgcctccaacgcacagcccgcgccccctcgctgtccgggcgaacgcatagcaggcgacgagcgtctgaatcatcacgattgagtccaaccgccagtacgaggcaactattaacaataccgcttcaagcgccaaggcaacggctggcagccagtaacggacaagcagtatcgcactgctggctatggtcatcgccagcagcagagccaatcccagcggatctttggcaaacgtatacatggtgtcggccggcgctccgatcgcatgctcccacagcatcgctgcacattcgaccacggcgatgaccagtggcacggccaggaccgtgaccttattggcctgcgcggattgcggtttcatggctcccattgtggctctttttgtatgatgttgcgtgcatgtcagcatgtgcgtatcgtgtcggccacgctgcggtgtagcgcggggcgaatctgcgtgaactggatgaggaacaatgccagccagcaggccgtgcccatgccgattacgcccggccatgggatttcggccacggggatgccgacgagcgccgcggatcttgcggcgaaaacgcttgcgctgacggcgaccgggatgagcgagagaatgaccgcgccggcggccagctgcaggctctgccagagatacatgcggatcacacgacgtggggacaggccgatgctgcgcagcaatgcctggtcggcgaccatgctgcggttcgacagggcgatgaccgccatgctggtggccagggacacgatgcacagcatcgttatgagcagcagcgagtccgcgtagttcaggctcttcggatggccgcccaaggcgagtatccggccataggatcgcgcgcaggtcagcagggtgaccgacagtcccatggcaagggcgagcggggcaatcgtgttcgtgttgctggcggccttcgcctcggcggaacgggcggcgagcacgccggtcgcggacccgcacaggcgacacacgacacgtccgatgcccaacagaatcggaatcagcatgctgacaaggatgtacatgccgaacgaggcgatgatgccggcccacagcgcgctgttgaatgtctgccccgcctcctggccgaacgcgagcgcccgtggcgtgcccatgccggagaacgccaatgccagcgccgccgccatgacaatcaaaccaagtgcccagtgcgcccaagaccgccaaccgtgccgtatcccgatggctcccgtgccgcgaatcacctcgatgggacggatcttcgctgcgcgcagcgaggggatggacgcgcccaacatgcacgtggccacacccaacagcagggatccgagccacgcggccatcgacggcgtgaacgcaggaggtgcgaacgagccgaatccatcggcgaagctttccgcagccatggcgttgaactcgggaaccgccagcaggctggccggcactgcagccagagagccgatcagggaaccgaacaggctcgccacacccacgagcatccacatgctggcaagcacctgactcgggctggcgcccataagccgccattgcgcgaacgtgctgtgaatacggttgaccgtggccgagccgaccaccgtcaacgagaagaacgcgagtaatgacaccaccacatagatcgtgaccgacaccatgccgaactcggccggatcaagacccgcctgccgcgcggccaatgtgaacgacggagacgaggtccacacgaattggttcatgcatatgcccaccagcgtggtcaccactgcgaccaccagaatcgtgggtacccatcccgtgacattgtcgcggaacacacgcagcacatacctagccacgatgagcctccttccgctgctgcggatacgccacgcgctggaccggtcggcccggttggacggattggataggctgggcgttcaccatcatcgggccgacagaccgcgccgccgcaaccaacggcggcgacccggccggtacgaaagtgcggcgtatgccatcggcaatctgctcggcggtgagtctgccagcgatgtgggtgacctgaccgtcgcgcaggaagatcacgtggtcggccaaagcggcggcatccgtgtcatgcgtgaccatgaccacgctggagcccgcatccgccagctcgcgcagcacctgcagcacaagctcgctgttcgcggtgtcgagcgcgccggtcggctcgtcggcgaacaccaccgccggacgcatgagcagcgcacggcacagggcgacgcgctgctgttcgccaccggacagggcgcttaccgtcgtcttcgccctctggcgaagaccgaaccgggacagcagctgcgtgacctgcacgtagtcggccttgcgatgggcgagcgagagcggcaacatcacgttctcctcgaccgtcagatacggcacgagattgtattgctggaacacgaaaccgatatgcccgcgaatgaaccgcgaacgccgttcctcattcagtgcgtagacgtcggtaccgccgatggtcacccgcccggaatcgggcctgtccaatccggacagcacatacagcagcgaggtcttgcctgcgccggacggaccgacgatcgccgtcaagcccgctccatcgatatccaacgaaacattattgagaacagtctgcgtgtttgcgggtcgggaggcggttcgagcatcgaaccctgtccgtttcaccagtccgagcgcctgaatcggtgtgccggcattttgccaagtcatgaggtagccccctgtcgtgaaagttgacgccgtttttctcaaccttcgcgccaggggcatggcaggtcgaggtaaacacggaaagtgacaccctagggtgacagattccagtagcgttccatgaccggcacccaatatgccctcaaccagaccagcgacaacgaggacctgcccggcatcgtccaactgcccgcctatgccaagtatgatggacggctgctcgtcatacttggttcctccgggaagcgaatatccttctgtcgtttgcggaaacaagccctgccgatgcccaagaccgccagataaagcaggaacatcacgggcacgacccatgtcacgtaccgccacgggtcaatctggaacgtatcgaagacgatgaacatgacgccccacacgttgatggcgacgatcgccagaatctgggcggccgccgaatcgaacctggattcggccgggctggtatcgttcgcgtcggccggaacgtcaggcgtccgcccggcgcgacgcatgaagccgagcgccgcccacacgatggccgccaccaacgccacggccgccggcaccaccagcttccagaactccccgtcattccagccgtaccggatgacggcgcacgtgatggccgtgacggcggccacgcccaatgtggcggaagcgccgaaaaaccacagcagaccttgattccgacgcccaccatgggaggcccgcacctcatcgtccgcaaccatatcgtccccgcattccataaagtccgacgcgtacgcatgccatctcaattatggcactcaaagagtcaatcagacaacatgctgtcaagcgatcgcatgacaggaatcggctatccgtcaatgccttagggtgctgtcgatgcatatccgattgaccgatgcttctacatgcgtgccgacatgtgccggtccttcgcgtccgcgtacgcattcttacatcacgacctcaaactaatctacgaaaaactttaaacagatatctatttgattttaatattatttatggtatacttaattttattaaacccgccgtgaattgaaggaggcaggtatggatacgacgatgatcccgccgtggatgtcgaacctcgatgacgaggatatgacgttcatcaaacggtttctgctcgcatcaggctccatgaaggaggtcgccgcgcagtacgacgtctcctaccccaccgttcggcttcggctcgaccggctcatccagaaaatcaagttgggcgagcagatcgagaacgagccgtatatcgcgctcatcaaacggctcgcggtcgacgacaagctcgacttcgacaccgccaaaatcctcatcagcgaatatcgcaagcagctcaagcaaggagagtaatcatgattggcgccacaagatttgccgtagtgtttttcgtgtttctcatcgccatctgcatcggcttcatcatattgcagatcaggctttcgaagatggacagcaagtggcccggtctggtattgcccgccatcacattgctgctgtcgcttgtggcggcgattaccgtcttcgccagggcggacatcggtgcgtatggcaacatgtggaacgtcgtgctttccgcattcatcgcgttcctgtccaacaacgtatccaccatcgtgctggccggcatctacttgtatcagcgtgacaagatcaatcgtcgcgccgagctggcccgtatgaacgttcaggacctgtaactcactgtgcaaaacacgcagactgaaccctacgccgcttatgccgactcatcatcttttgcgccgcttcgcgcagcttggatgattaagccggtgacgtggtcgcagggttcgtcgcgcaatcggagccggacgccctgtcatttcggctgattccgtacatcctgttccgccgcgaaccgttcggcgatttgccgtgcgtggatgttcttggcttcgttgacgaagtcggcgcatgccttgctgccgtagagcgcctcaccacacgggtcggcgaaacgcggatcgccgaccagcgcggagcgaatggccccgaacgagccggacagcggcatggcgttcatcacggtcgcggtttgattctgtgccgcccgggtgcgggcggtcttgaccagaccggtctcgtcgcagtagcgcaacgtgcgcgtcgtcacgccgctgatcaatgccgcctgatcaatgggccacaaccggcccgtatccagcggattgccctccacatcgaacgcgccggaaccgttgacggcgttcgccgtgttgtcgttctcgttcatgatcgatcatcccccttgaagccgattatcctctacccgccgtgcgtgtttcgcggcgttgccgtcaggatagacgtttacgcaacgtcaaccgcaagcgataatgggatgtatcgttcaagccaggcaatatgccgtcaagcaatcgcatgacagcaccatgttcggcacataccagatggaagaattggcaaaccttaaaaaataccgcggttattgctgtgccgagaacgccaatatgaccatagacgtgctttcccgctacacgttattcacctgtcatgcgccgatatcaatcaaaagacacttgcataaccaccgctacgcatcgccaataacataccgatgagccagaatgaggcccaggccacgatgctaatccgtaaataatactggtcagagtggcaggtacattggtcctatggctaagcgcaaacatatcggcactgttgttattgcaatactggtcgctattctgctggcgtcgggcatttccggctggctattctggcagtcggtacaacgggtgatcggcgaggcgcagcaggcgggcgaatatgcggctgaagcacagcaatccgtcgggcagggcgacttcaagcaggcgcttgagcagatggacagcgctggcagtcacatcgtcacggcgcacgacgaaacccagggcgcgctatggcaggccgccgaatacgtgccatattacggttcggacgtgaaagcggtgcgcggcatgctgggcgcggccgccgacgccgcgaccaacgccctgcccaaaatcgacagtgccgcgcagggcacgttggtggacttcaatatcgaagagctgctgtccggcatgaacttctccgacggcacgctgtccattcccaaaatcgcctccatcaagcaggatctgtccgacgccggcgtggtcttgaagcgcgtcaagacgtcgatttatgcgctgccgcaaccccacacagaacagatcaccgaaatggtcaaccagggcaagcaggtagtggaccaaatcgatgagactttcgacaccttgaacaccatcgtcgagaagattccgggctgacgttggttcgttcttgtcaggcgtaccattcgggccggcgcagtttcaggaatggtcgctgtttgcgcgctgctgcggtttgtgtgagatcgatgtcggtgataatcaactgttcatggtcatcagtctcgctgacgacgttgccgtacgggtccaccaccactgattggccggcgaacgccacatcgccctccttgccgacccggttgcacatggcgatggccacctggttctgcatgacctggacgcgaatctcccacaggaacatctccaatggttcggcgctgatgttcgcagtcgggatgatgaccagatcggcaccgcgcaatgcgcatgtacggatgctttccggcacgtgacggtcgaagcagatgacgatgccgatcttgccgaacggggtctcgaacacgtggaatccgtctcgggagggcgcataatagtcgcattcatagaagcgttctgcttgcaggatgtgcaccatggtcgagatgccgctgatatggccttgttcgttgatccatagcgaagcgtcgtagttgtggccgtcctgggctttgaggtacaggttcggtgaaacgtacatgccgtgttgcagggccttgttctgtaatgcggcgacgtgacggtcggtcaggtccatgagatatcgcgacgcatcgcggttctcatactgggggaagaacggggagaactgtatctcagggaagaacaacagatcggcaccggcctcgccggcctgatcgtagtaggccaaggccctatcggcgttttcgtcgatattgtcggtcatcgccatctgcgccatcgccagtctcatatcgtttccccatctttgagccgcaaatccacccacacatgccaattgctgcccctgacgacatacgtcaatctcatagatgctcatcacaacccgacggagacactttttccatacgccgctcgccatacggcacctgatacggccatgcatcgactgcttttttcgaattactttccttaaacaagaaacgcgccgcacgctggaatatattttgagccccgagtacattaaccgttcacaagatcaatattgcaacggcgcatacggccgctaccacacgctcaaaaagcccggaaaaccgccaatccgagccggtctacaatcgccatacaacggcacgcaatcaccataggaggctgacagacatgtccaaggacacatcaaaacaaacaacattcgatttactgtcgggtttctggctttcggtcttctgtggagcagcggcctgtacgtggtggccaccgtgctgctccccagctgttcaaggacatcggcgtcgctaacccggatgcggcagtcggcacgttgaactcggtcaccgccatcgtgggcctggtttccaacctcgtgttcggcaacctctccgaccacacgcgttccaagatgggacgccgcaccccgtggatcatgccgagtgtcacgggcatgtacctgtacgcgggcatcgccggcttcggctatggcgtgtactcggccatcgaccaggcactcaacgtcgacgtgttgccgaacaaggaagaggccgacaaggacctcggcatcctcagcttggccaccacgctcggccaagcagtcggtcccaccatcacctccgtggtcaagaccacgaccggcacctacacgccggcgttcgccatctccatcgtcatggccgtgtgcgctgccgtgttcgtgctgcgtatccagaaggtgaagtagccgctgcgagtgcctatctccgtttcaaggggctgattttgactttgcggaacatctacttccgtttcaaggggctgatgccaaagtagccactggttaaaaacggcggaatagtgatagaacaatgccatttctatctgcgttccgccagttgaccagccccttgaaacggaagtagacctccggcaaacgccaaatcagccccttgaagctgattttgactcagcatcatgcagcgcagctatatcctcagtgcgggtatactattccgggccgtcacgacgacgcctatggaacgcacgcatggcaaagagagaaacatgagtcagcccgacaccgacacggcggcacagtcgccgtcctcgcagcaggaaccgcagattcagacggatggccgtcaaaaccagccggaacaggtgaaccaaccagcgcaaatcagccagtccgagtcgccacatgacggcaaaggcgagcacgcgctgcataccaacctgaagcgcggcatggaatcccgccacctgcagatgatctcgttgggcggcgtgatcggcaccggcctgttcctgagctccggatacaccatccagcaggcgggccccatcggcaccattctggcgtatggcatcggcgcgctgatcgtctacctggtcatgctcacgctcggcgaactgtccgtggccatgccggtgaccggctccttccatgtgtatgccgagaagttcatcggccctggcaccggcttcgtgatcgcgatccagtactggctcacatggacggtggcgctcggatccgagttcaccgccgccgggctgctcatgcagcgctggttcccgaacagtcccacatgggcgtggagcgcggcgtgcatcacactcatcttcaccctgaacgccttgtcggtgcgtttcttcgccgaggcggagttctggttcgcctccatcaaggtgttcgccatctgcgcgttcatcgtcatcggatcgctcgccatcttcggcgtcatcccggtcgccggctaccaacatgccccgatgttcgtcaatctcatcaaggacggcgtcttccccaacggcttcatgccg

SEQ ID NO: 2700 - DNA, 7505 bp, Unknown
  R36_18m  MAG No. k141_7869
acggcgtgcgcccccatcgcctccgcacgctgctgcatctcggcgatggcctcgttgcgggcacgcatcagctcttcctcatagccctggctgcggccgccgaacatgttgcgcaggcccgcgccaagatccttgaacatgttcacaccggataccacttcgccgaagacgatgccctggtagttggtgatggtgtatccgtcgacggacggggtggtggtgacgagaatcatggcgaggctcctttggcttgtctgcgtagataaatcactgccgagagtcggaccgttcccgaatctcacctcggaaacggatcgcttctcttggctaccacaatagtcggcagcgtccacaccgacattttcgacccgtccgatcgcataatcaaaagcatcaggatcgatatgcaaaaccaccgaggatcgtggatcgcttgtggatcgtgaagcgttgtatcctggttgttcatggagcgggaacgcaaaatcattaacgtcgtgggagctgcaatcgtcaccaacggcaccgtactatgcgcccagcgtggcccgggaaagtcgttggccggatactgggagttccccggcggcaaaattgagcctcatgaaacagcgcggcaagccttgcaccgcgaaatcgaagaagagctgttatgcgaagttgaggtcgcggaagaggtatgtaccagcgaatacgcctacgactttggaaccgtgcggctcaccacattcatctgtcacctcatcgccggtacgccgcatctcaccgagcacaccgatatccgatggctgaatcctgctgatatgccgacattgaactgggctccggtagatcgcgaagcagtcgcgattatcgcgaacaaacaactgacgctccgatgaacgcgccacagcgcagtcaggcagtcatcaaacgatccgaatcgcaagggaacagggcaacatgtctataaatctggtcagcacctcagactctccagccaacacgcaacatcacgattctgatccaaccccctcgatcctcgaagatgtcatctcaggtctgatcgagccgcgctcagatgctcccggcgaatataagccgaccctcatcgcaaatcgccccggtggattgaccatgcgcgaggaaatcggcaattccttggctactagcgattccttcgacatttctgtcgcattcgtctcggctgaggccgtgctcagcttatttgaagacttcagaagtcaccatgaaacagcgacccgagcgggcacactgattacctcaacgaaaaatcatttcaacgatcccagggcattctgggagctgctgcatcttcagaacaccactggtgttgacgttcgcgtgtgggaaggttcccgtaatacctcagtttccgcaatggctcaaggacaaccattccatcccaagggatatatcttttctcgccgcatgaaagacggtacaccctattacgacctgtacgttggcagttccaatctcactggagccgcattgaccacgcaacgcgaatggaatctcaaagtctcatcgctggcggatggagagctggtcgggcagttccaggatgaaatcgactcacaggtggctgattccgttccgctgaccgaagagtggatcaaacagtatgaggaagatttcaagaaatacgccccaccgcgtcatgagattctgcagtcgcttgaggggcatgacattcagccaaacgccatgcaacaggaggcgttggcgaatctcaagaagattcgtgaacaaggcgagcaccgcgcaattatcgtgtcggccaccggcaccggaaagacgtacctttccgcattcgacgtacgcgaatgccagccgaagcgcatgctgtacatcgcccagcagcagatgattcttcaaactgcaatgaagtcttaccaaaaggtgctcggctgcgatgaatccgaattgggattgtattcaggcaccagcaagcaacaggaccgccgctacgtattcgccacggtacagacgatgcggcagccggaggttttggcgcaattcaaatccgatgaattcgactacgttctggttgacgaagttcatcacgctggagccgaaggatatcagcgcgtcatcaatcatttcaaagatgccgacttcatgctcggcatgaccgccacgccagagcgcaccgacggcatcaacatcttcgagctattcgggcataacatcgcgtacgaaattcgcttgcaaaaggcgttggacgagaacatgctctgtccattccactactacggtgttgcggaataccttggctccaacgacgatccgaatggaatcgcccatcgtctcgatgtctccaagggccttgatgcgaaggactcgaaacagctcaagtacgagatcgagcagcttgccaccgaaaagcgagtccgctacatcattgacaagttgcaggaatatgggcagttcaacattccggtcaccggactcgtgttctgcagtcgacaggaggaagcccataagctatcccagctgtttaaccaacagtggaatcaacaagccgaacgcccctatcgcaccgctgccgttaccagcacggacgatgacggcaggcccatgtcccagacgcagcgagacgaatacgtccgcaagctcactgaaggcgaactcgactatctcttcactgtcgatatgttcaatgagggagttgatattcccgccgtcaaccaaatcgtcatgttgcgcagcaccgaatccagcattatcttcacgcagcagctcgggcgcggactgcgcaaattcccgcacaaagaaagcgttgtggttatcgatttcattggcaattacaacaacaactatctgattccggtggcgttatacggcaacaccggcgaccgcgacagagctcgcaagaacctgcagagaaagtcaatcggcctgtcgtccatcagtttcgacccgatcgccaaggagcgcatccttaagtctttggacaccgccgactggtccgacatgaaaaagctgtccgaacagtatcgccaagtccgttacgagctgggccgcatccccatgcttacggacatctataactacgacccctcactgccgtataccatcgcatcgaagcgcagcaactatcttgatttcgtgcgttcccgtgaaaaaagcctgggcaaaggcaaacatcatgaagcgacatttgaggatcagttggagccggtgaccgacgttgaagacgcgatactcaagatggcagcggagctgctgctgcccggattgcgaccgcacgaattggtcattcttgctcagctatgccatttcgtcagcgaacggctcgacgacgacgtaccgcagcattggagtgcgggctcgccaatcggccgcagcgaattgctcgatgcgattcgtactgaattcccgcagtccgatggttcagacacgcaattcgactctgcgatcagcgtgctcgattactcatatttcaccggcccaaactgcaatcgtttcggcaatcagccattagtcgaagccgtgaacagcaccggcacagaaaacggtaccgcatatcggttgaacagcagattcgccgatatgcttgccacgaacagaacgttccgtatcttctttgcggacactctgcgcaccggtatggccaattgccgagatatattccgtgaggccgcagccaggcaacaggtctttgatcacatgttcttgtacgaacgcaaatattccatggcagacgtcatgcgactgtgcggatggaagaaggagaatactccgcaaaacgtgggtggttacctcctcgacaaggaaaccaataccatgcccatcttcgtgaaatacgcggcaagtcaatacgaagatgaattcctgagcacacaggaaatgaaatacttcagcaagaatggacgaactccgcagtctcccgaattccgatgggcgcttaacggcattggcccgaattggggccagacgcatttcgtcccgttattcgttatgcgcaaggcggaagaggccgagggtaagtactactacgttggccacgttgccgcgtttgacaaccctcagctcaccaccaaacctgacgcaagcggacaaggcagcgtgaaggtcacgctgtcgatcctgcggttggcccggccaatcgatccggagctctatcggcatttggtcagctgatgcctctcaactccgcaagcgtacggcggcggccattccaccgtcgccataggtggggtgggtcatgaaggcttggctggcggtggtgtcaccgcacatcaacgattcccacatggttaagcggctcatggagatggcttcaacgccgaggatggcgtcggcgatgtgcgcggcgtagagatcgcggtgcttggcgatcaggaagcgcatgagatcgaggcgcttggtcatgctggtcacgtttgaggaggccggggccgtgcggtactcgatcagcggctcgggggcgatgccgatatgggccgcgtcttttgcgggattctctgtatcccaggcactcccaaaacctccgacatgctcagtaccgccagtaaccccagcaccgcagatatcgttttccaccgtcaatccgcactccaacaacgacaggaagaagtcccagtcctcgaagccgccgcgcatcgactcgtcgtagccgccgcagcactcccacgcgacacggcgaatcatgcacgtggccgggcagcaattatgcgacacgaacgcggcggcattgccaccagtcggctggaccactgattccaggacaccgaaagtctgcagccagccgaatgcggcgaccatcgttttgtcggcggacaacatcgacaacgtgcgctcaatgaaggccggccgcaaacggtcatcgccatccaacaccactacgaacggcgtttcggcggcggcgatgccacggttgcgcgcggcggaaggaccggcgtttgcctggccgatgaggtcgatggccacaccattcgcatccatcgccccgtgccggcaatcgtcgagagtggcgttcagcatctcgacggatgcgtggtcatcggacccatcgttcacgatgatgatccgttccggacgaaccgtctggggccaatgacgactcgactgcctcgtgaatcaacgggccctgattgtagctggtaattaccactgtcactgctgccatggcggcaagtctatcgggtccggacgtgggccatccaccggcgctgcgcgctgcctcccgccagtggggaggtggcgcgctatccccggctaacgctgatgcatgtgtgcgggcacgggtttggtgcggactttggtggtgaagtagtcggactcaatcttccacaccgtgacgctgcggacctgcgcatcagtgaattccacattcggcatatgcgcctgctgcgccatcagcgtctgcaagccgtggcggcattcatccagatcctcgaccagtgacgccgtgccattgccgacgatcgacttgaacgcctcaccccaattgcacgtggtgcggcccgccaccacctcgcagtcggtctgcatggtgaaagccacgggcagtcggccaccggcggcggcgcgaatcgcgtcgagcttgcggccgcgcggcgcggagtggaaccagagcgtcagcttgccagtcgcctcgtcgtaatcaaagccgaaattcagcggcacgatagtcaggccctcggcatccgcataggccacttcaacgatgtcgcaggcggcgatgatcgcggcgatccgctcgggatcggtcacctcgcggtccgcacggcgcatcatgcgatgctcgccggcaaccgtccgctcatcctcacgcttggcaggtttgcgagcgcccgcgatattctccatgctcatgcctgatcatccccatccacaaccgcaatccagtcgccgtagccttcctcggccatgcgcgagcgcggcacgaagcgcagggcggcggaattcatgcagtagcgcaggccgccgcggtcggccgggccgtcggtgaacacgtggcccaagtgaatctgtgtgtccgacgtgcgcacttcgatgcggtcgcggcccggaatgcggtggtcctcatgctcggtcagcaagtcaccggcaatcgggcgggagaacgcgggccagccgcagccggaatcgaacttgtcttgcgacgagaacagcggttcgccactgacgatgtccacgtagatgccgggctcgaatttctcgtcgtactcgttgacgaacgggcgctcggtagcggcgttctgcgtgaccgcgaactgctcaagcgtcagatcccagatgcgttccacgtacttttgacggcgttttacgttcgcgattgcggcgatcggtacatggcagtagccgccggggttgttcaccagatagtcctgatggtgtgcctcggccgggtagaagttgcgcagcggttcgaccagtacggccgggcgctgcggctggcggtcgaccagctgctccagagccgccacatacacggcgcgctgcgtctcgtccgtgtagaacatgccggtgcggtactgccggccgcggtcctcgccctgctggtccacggagaacgggtcgatgacctccaggaacagcaatgtcagcgtccgcaggctgacctgtgccgggtcaaactcgactttcacggtttcggtcgcatcggtgccgcccgcgcatacctgctcgtaggtcggcgattcgacggtggattgcgcgtagccgaccgtggtgtccgtgacgccgtcgacgttctggaagtagcgctccagcccccagaagcagccgccggcgaagtatgcggtttgcgtatttccgtcattgtgttcgttacgttcgctcatacgccccacgttactacgtcgaggcggctcgcgatgcagtcaacgacacctctgcaccggcaaaaccgctttcgaggggctgatttgacccccgccggaggtctactcccgtttcaaggggctggtcggccgctagaccgcatgtaaaaacccatccgcgtcaacgccattccgccgattttggagcgtgaatacttcggcatcagcccctcgaaacgggagtagacctccgggagagaccaaatcagcccctcgaaacggagatagcgcttgccgcgccctccttgtcaggctttctccgttcaaagaggtacattcgggcttctgcagaatgctatcttcgttcaaagaggccccgaatacgggaaaccccgagtacaaacgttgtcattgcaacgctcatactcgagatttcagagttcaggcacctctttgaaggcagttagttgtccgcaaggggccaaatgtacctctctgaaagcagataccccgtctcaggctcgaatcggctaacctgcgtacccgtgtgcacaccttcacgaccgcagcgtgctgagcatgccggccacttcggcgggcgtcacgctgggcacgtaggcgcgcaccaccgcgagcccgatctgcggcaacgccgccgggtccgggtagcacacgtagaccggcgcttcggcgggctggaacttgcgcttgaagttgaacagcgagtgg

SEQ ID NO: 2701 - DNA, 5868 bp, Unknown
  R36_18m  MAG No. k141_7884
ccttggcctgagcgccagcgacctgctgggaggccatcacgccgaacaggtagccgtcttcggagaagtattcgaaggtacgaccggcgaagtcgcggcattcgaatctgatatcgttatcgattcgatcagcggctcacgatactgcccttgcatcgctgtgccactgttgaatgtgcccggctggctcacctttgggtcaccgccgacacatccttgatgccgatggttatagagtcgcaaattcacgactggcgcacctgcccacgcacctatcctgtcatttcgagcgcataatttgctaccacatccggtcagggcaatcgaccttaatggcgtaaacggcacttctcaatacgtaaacggcacttattcttggctctcctctcagagaggggagccaagaaatatcaagctcggcctcccaggagagagccagaataatgcaccggcaaggcattaggatggagggcatgagcgatttgaacgcgttgaatcttgagcccggcgaagtggttggtgggtatacgctgatctcccggctcggctcaggagctatggggtcggtgtggcgggtgcgcgacgacggcggcaccacctatgccatgaagattctgcgcgactccctgaccgacgagtcagtggcaggctccggctctgcgtccacggccctgcacgaccccaacctcaagcccgatgtcacgccgcgcgagcgcctgcggcgcgaggccatggccttgaagaaggtcaatcatccgggtgtgtgcggcatcgtggatatggaactcgacgatacgttggcgttcatcgtcactgaactcatcgagggcaagaatcttaaggatgatgtggccgccaatggccggtatgtgggcgacgatctggaacgcttggcccgcaagctcatcgaagccaccaaagccgtacatgcggccggcatcgtccatcgcgacatcaaacccaccaatgtgatggtgtcggccgccggaccggtattggtcgatttcggtatcgcgatgggcgagggcgaaagtcacgtgacccgcaccggcctagtgatgggtacacccggattcatcgcacccgagattattgacggtgccgaatccgacgacgccaccgattggtggtcggtggcgtccgtgctcgcttttgccgcaaccggcgcgcctgtgttcggcaccaagccgatgatggcggtacttgagcgcgaggcctcgggcaacgcgaatctttccggactaccggccggcacattggctgccttccgttctgcactggacccggatcgcagggatcgttgcacgccggatcaattgctgaatgccatcgccttggatgcgttgaatcccaacgcttggcagggcgagcaggcgggaccgttcgccgcgggagccgtggctggacaaccggctgcgatcgttgccgaagccgcggaggcgatgcccccttttggcgcggccggcggcgttgaccgcaataatccccgaaccatctggcgcgcggccgaggaagccgctgaggctcccaccatggccgtgttctccggcaataagggcgataacggcgatggcgaaaccgccgtattctcgccggctggcgccgctaccgccacgctgcccttagccgatatgccgccacgtccgccggccggtgcggagcaggccacgcaactgttgcccgacgctgctgccgatttcaccgacgacgccggcacacaggtactcaccggcgcgaccacaccgatgccggaccaaaccacaccaatggccggcgccaccacaccaatgaccaacaccgattcgactccggccccgaccacgccgctggccgagcgcaccaccgtactccccacgccgcagccgtcatcattccccccgtccggcaccgcccagagcagctgggatcccgcaagcaaccagcccacagcggtggaccccgccattcgcccggcattgcagcgcatcatcgaccaaaccgcccaagcggcccccaccgaaaccatggtccaaaatcctcccatgcccaatccggtggacgtgaagcgaggggaatatctgcggcgcggcaccctgccattgatcctgctggcggcgccgctggcggcactggcggcaaatgctccgctcgtggccatcatcgcggccactgcgttgttgtggctactgctcaccctggcctataacaccgaaccccagcttgagcgcgagggcaaacgcggcggcgagcgcaaaaactccgattcgtggattcgcgtggcgacttttccctggcatctggtcaaagccctgctgctggccattccccgcatactgctgctagtcatcatctatatggcgggaaccgccgtggccaccgcggctctggcactgcccgttcacaccatctcctggtatttcaccgcggattggggtattccggtgccgttgctcaatgatgtgccgttctccgcttccgggctggcgctgggcggtttcatggccatcggctggctggtcactgtgttcgccccacagtcgatgatgattcggctggggggcggcgtactgcgcgggctcaaacacagtcgcccggcgggcgcgccatccaccgaagtgggtggggctccacctgctccagtggtgccggcgcccaagggcggcgggcgcggcaccgtgctgttcaccatatgggccatcatcaccgtggccttgtgcgcgatgccgattctgggcatgccgatcaactggatgccgttcgcctagagcggggcggaatctcacacatcagccatccgcacacatggccgttgtgtatccgatacgttcgttccgtcacacttttacagggaattcacctcagatcagctctgggcgcagtcctcctcaggcccggtcattatgatggggcccaaacattgaagcgattgcaaggggatagctatgtcagatccgaagcgtcaggccaagcgtgccacacgcgctgagcgccgagcggccgaggaggccgcccagcaggcacgggccgagcaggcggctaaggaacgtaagcagcagaccatcatcggctgcattgtggtggccattattgtggtgctggtggccatcgctggattcgccgtatacaaggctatgcggccgtccaacaccagcagcagtagccagcaaagcaacatgaccgtggacgaggcctatagcaagctcaagaaagtcagtacccagccggccaacgccgatgacaaggccggcttcgtgatctcgagcaaggggtacggtcagaaggccgaaggggcgcccaccgtttccatctacatggagccgctgtgccccggctgcgcctcggtgaaccgccagcttgacccgacgctcgtcaagctgatgaacgccggccagctcaacatcgatttgcacttcctcaatttccaggacaacaagagctccgacaactactccaaccgcgcgttcaacggtgccatctacattgccgagcatgatgacaatcccgatcacctcatgagctacctctccaacatctacgctgaggatttccagccgggcgaattgtccaattacgagccggtaagcaacgccaagctggagaagcaggccgtcaatgccggcgtgagcgaggatgtggccaccgcggcattcagtggtaagaacgaatacgtcaagtggctcaccgcctccaacaactacacgatcctacgccccgaactgttcaacagctccggcgcgttctcctcccccacgctcaccatcaatggcgaatactgggatctgaagcagctcacgctggcggacaccagcatggtggacggattcctcaagtccatcggcttggactccgatcaggtgggcgtggaaggccagatgccatcgatcggcgccaacaagaagccgatttcgctggccgattaattaccggcgcggctcggcctgaattgaccactcgagaactaccggtatactagagatttgttcaaaacgatttacgcgttaagaacaatcgcctctttagctcagatggccagagcggccgccttgtaagcggcaggtcgtcggttcgatcccgacaagaggctcgacgcgtagaaaagtggcgtattatatgatacgtagacttttctacgcatataattcttaccttgggtaagtactccaggagccttcccccaactatgggcttcctggaatgagggcggagcgtcccccaaccagctccgcgccttcaggggggcgggaacatccccttctctcccgccccctttttcttttctttttttgagctcagaacaatctgacgagcaggaatggtgacggtggccggtgaaaccgcagtacgggccggaacaaccgttacgatgggtggcgtaatcgttcatccagcaggaagagtatggcaatggcacggcgttggaccccgcagcggtttgttacactgcgtcgcatccgcgtaatcgtctgtatcgcggcgaccagtatcgcgctggctggatcattcgcgttcacctcgcgtaaatccgtagccctgaacatcaacgggcaaaccacccaagtcaccacatatgcgatgacggccacccgtcttctggaggaacaaggggtggatatcaagacccacgatatcgtcactacctcgtccggcgaccaactcgccaatcatgccgtggtcaccgtacagtccgcctaccagaccactatcaacatcgacggcacgtccgttcccttctggaccgtggccaccagtgccgaccagttgctgggatttttcgaggaaaaccagaacaacgccacaaaaatcaccgtcgacatcgacaatgtgtacaaccagctcaccggcggactggtcatcaatcaggatggcccggtcaccgtcattgcggacggcaagacttccgtggcccccaacggcaaactgcccgcggcctccattcttgactccaaaggcatcgtgctgaacaaagaggaccgtgtgagcgtcgaaaaggacggcgataccactatcctgcgcgtacggcgcgtgacgcatggcgaggaaacacgcacagccatagtgccatactccacacaaaccatcatcgactccaatctgcctgaaggccagtcggagatccgccagcaaggcgtcaatggcgagaaaacccaggtgtataacgtcacgtatgtcgatggcgtggccgaatcggagacgctgaaatccgaaaccgtcaccacgatggccatcgaccagatcatcgccgtaggcgccgccaagtctgataccgataaaggttccgacaaaaaatccgactccgccgataacggcaaggccgattccggtttcaacaatcagcacgagtcgtccggtaacaatgccaacaacacaggcgacaagaacaacagcagctctggcaacaacacgaacaccgataccaacaacaatgccggcaacaccgggggcaacaactccggtaacaccggtaacaccggcaattccggtaacactggtaattccggtaacactggtaattccggtaacactggtaattccggtaacactggtaattccggtaacaccggcggcggtacgaataacaattccggctcttccggctccgattcaggaacaaccaccacgccctccggccgactctggcacgccaccgtagcccaggctcaggcctatgccgccggtgccgccgcgcagcgcgggtggacaggcaacgactgggattgcctggtcaaactatggaaccgcgagtccagatggctgtggtatgccgaaaacgcgagctccggtgcctacggcattcctcagtcgcgaccagcagacaaaatggctgcgttcggcgccaattaccgtgacgatgccgccgtacagatcgattggggtctgtggtacatcgca

SEQ ID NO: 2702 - DNA, 4103 bp, Unknown
  R36_18m  MAG No. k141_8027
gatgagggcgaggaggcggccttcgtgtgttttgttggcgagcgcggcgcggcggtgcgagtaccacagtgggttttcgagcgtgcacatgctgtggctgatgttgtcgatgcgctccgcgagctcggccgggccttcgccatccgtacggcacagttcggcgagttccggggcttcctcaaggtactgggtggcggcgtgcacgcgcggcatcgaatcgaccacctgatgtacaccggcgaaagcgaggtcgatcatcgcggcttcggcgatgtcgatgccggcaccgccgaaacgggtcttcgtcttggtcagcgggaagcgcttgatgaactggtcggcgatctcgtcgcccacttcatagcagtcgccgcagatgcgcgggccgagtgtggcgacgatgttcgccgggtcggcacccttgctcttcatcaggtctaccgtggcgccgatcacaccacgctccagaccacgacggccgcagtgggccgcaccgatgatgccggtgaccgggtcgcccagcagcaccggcaggcagtcggccgcgaacatgcctagggcgatgccggattgtgcggtgacctggccgtccgcctcgatgacgtgcggagtgtcagtctcaccatgtgtgccggacacgtcgaagccgaagggggtgttgatgacgaacgagtcgtccacgtccacagccacgccggaatgtacttgggagaccagcgataggcgggcttgcaccgcttcggcgagtgcgatgcggttcgacagcacggcctcaggttcgtcgccggacttgccgccgaggttcaggttgccgtaatcgccggtgctcaggccgcccagtcgcgtggtgtacaccaccttgatgccgggggccagtgcgatggggatggtcaccggaatagggcgaccggctttatcggtagagctgatgctgttggaatcgaggatttcttcgctgtattcaggcataaggcattctttcttgggtgcgggcggtgttcatgattcccatgaccacccccagtcagcgggggcggagtggtaggttattcggctttgagggtgggctttttggtgcgcgagcggatggcggcgttgatgggcacctggtgcgggcagggcatcgagaacacgtgcgccggattattgatggcgggtactggcgcgccatcggcatcgcgcaggccggtttccggcacggtaaagaccaatggtctctcgccaggcagcaggaattcaacctgttgaccgggctcgatcttgttacggctcatcagcgtgacacgtccgccttcgtccgcgctccagctcagcacttcgcccactaccagccatgagcggaagtaggcggagcggtcggtgttctgtgtgaccttgtgctccgggtaatagaagccggtggagtagtcgcggtgggccaccttgtcggtttcctcgagcagccattcgggcagttcgacgtgcggggccgggcgaacggccgcatgcttccaatcggtctcgatctgttcgaccgcggtgttggacttgcggcgcgtggagcgggcgtgggagctcatgccgtcgggttcgacggcggtgccggccgacgtaccagaggcagttgagtcggcggcatcagcaaccgtcacgcggtcacgttctgcggcaaccgagccggtgaccgaatcggcaaccgcagtatcagagccacggtcatatccctcatcggccacaccggcgaacgcggcatcggcattgctcatcacttgatcttcggttccttggccaaaatcggggtcgcccgggcgaatcacacggtcacggaaaggcttcagaacattgccatcagcgtcttcaaaaccgcgttgaatcatgtattcattaaccgcggttttgtaggcgttggtcatggcggcgatatagtaggcgcttttcgcgcggccttcgattttgaggctggtggcaccggagtcaatcaaatcatccaagtgccccagcatattcatgtcctgcgaattgaacagataggcgccgttctcggtctgctcgatcgggaagtactggccggggcgcttctcttccacgatcgaatacttccagcggcatggctgcgcgcattcgccatgattgccatcacgcccggtcagatagttggagaacaggcaacggccggagaacgccatgcacatcgcgccatgcacgaagcattcgatgtcgaggtcaccgggaatgttggcgcgaatatcacgcacggcctgcaagtccatctcgcgggccaacaccacacggcgagcgccaagctcatagaaggcgttcgcagcttggtaattggtgacgccggcctgcgtggagacatgcaattccaggttcggagccacttggcgggccatcatcatcacgccgatgtcagagacgatcagcgcgtccacgccggtgtccttgagctggccgacgtactcgcgcatggcttcgatctcgttgttgcgcggcagcacgttgcaggtcacgtacacgcgggcgccgcgttcatgggcgtagcgcgagccttcctcaaagtcctcaagacttaggtttttgggggccgatcgcatgccgaaggctttgccgccgcagtagacggcgtcggcaccataatcgaccgcggttttcaggcccctcaggttgccggccggggacaacacttcgggctttttgcgggtggggaggttcatcgtcgtattcatcaccgcaatagtgtagtggtggccgtgtaatgcgggcggggctaccgttaggctggataacatgaagatcgatatcgtgagcgtgttccccgaatactttgaggtgatgaacctcagcctgatgggcaaagcccaggccaagggattgttggagatcaaagcgcacaacctgcgcgactggacccacgatgtgcatcattcggtggatgatacgccagtcggcggcggggccggcatggtgatgaagcccgaggtgtggagcgaatgcctggacgaactgctgggattctcgcggccgtctgaatcctccgccctatccggcacaccggtgctcatcttcccgaacccatcggccccgttgtttacccaacgcgacgccaccgagctcagccatgccgaccatctgctgttcggctgcggccggtatgagggctacgatgcgcgcatcccggactactaccgctcccagggcgtcgacgtacgcgaatattcgatcggcgactatgtgctgaacggtggcgaagtggcggtgtcggtgatgcttgaggccatcacccgcctgatgcccggattcatgggcaacccagattcgattgtcgaggaatcctacaccggcgaggacgcactgcttgaacatcgccagtacaccaagccggccgtgtggcgtggtattgcggtgccggacgtgctgttgtccggcgaccacggcaaggtggaccgttttcgccgcgacgaagcgctggcccgcaccgccgagatccggccagaccttatcgcggcactggattgcaaggcgctggataaggccgaccgcaagaccctgatggccttgggatgggaggtctccgccacccatccgcgccggctcgccgattaattcaccacacggtgggagattcactacgcggcggaatcgtcggaacgctctatatccgagtcgtcatccgcgggctcgatgtagaagacggcggtttcgccgtagttgcggctttcagtgatttgccagccttcgggggcggtgggggtgtcggagcgtaccgagcgttcgagcataatcacggtgttctcgttggtggcgctgcccaccgccagattggccaacaactgatcgcattcagcggtctcataggcgtagggcggatcaatgaatatcacgtcaaaggattcaccaaagccgccagccacttgctcggcctttttggtgaacacacgggccttgagcgaggcatcccacgaacgattcttctgtaactgcgacaaggtcttggtaatcagcgccgccgcaggccgggaactttccacggccacgagttctcgcgcgccacggctcagcgcttcgatgcccaacgcaccagtaccggcgaacaggtccagtacacgggcatcatccagcactcc

SEQ ID NO: 2703 - DNA, 5876 bp, Unknown
  R36_18m  MAG No. k141_8108
aactgcaggaactggtttcccgtgcggactcgcagtgcataccggtgcctgaatcggtggaggccgccgcccatgtgcttgccacgcatgatctgccggtctggccgcataacgaagtggctgacatcgtgcgtgacgccgtccgcgtgtgcgtggatgaaggcatgttcgtgccggcccgcacgctctcggtggccgtggcccgcatgaatgacggtgaaggcgacaacatcgacatcatccaagcccagttcctgcgctcgctatccgcgtagccgcctgaggggagttgacggtatagccggccgaggggagccgagcccgctaggatagacaaccatgagcacgaatgaacaactggcatgggatttcgacgatggggatgtggccgaggtccggcctgataccggtattgcacgttttgcccctggctccgaacaatggatagccgcactgcagcccactgacgacgacgcgatacgcctcgaccgtttcgacgtgaacacgatgaccgctgaggccgccgcccgcctgtgggctcgcgtggccgcatgggtggaatccgatcagatcgcctactacatcgacgactcacccgtcagctccgacgccgcctacgacgcgcgcatgcgttgcctcgaacgactcgaagcggcgttcccctcattggacaatccacagtcgcccacccatcgcgtcggcggctccttctccaacgacttcgcctccgtgcgccaccccagccgcatgatgagccttgatgacgtcttctccatcgaagagctcaaggattggtacgattcggtgattcgcgacctcgattggcctgattccaagcccctgcccatgagctgcgaggtcaaaatcgacggcctcgccctgaacctcatctatcgcaacggcgtgcttgaacagggcctgacgcgcggcgacggcgttaccggcgaagacatcaccctgaatgtgcgaaccatcggctccattcccgccaacctcggcggccccaaggaagacgttccggacttcgtggaaatccgaggcgaagtgttcatgcgctgggatgacttccacaccctgaacaacgagcaggaggacgccggacgagcgcccttcgccaacccgcgcaacgccgccgccggctcgctgcgtcaaaaagaccctcgcatcaccgccacccgtcgcctgagtttctatgcgcatggtctggggcagctcacctgggggccggaccatccgcgcggcacccatgacgtggtcgccgaccagtcgcaggcctacgatctatacaccaggtggggcgtgccggtctccccgcataatcgtgcggtgacctcattccaggagattctggacatgatcgagtactacggcgagcatcgcggcgacatcgagcacgcgctcgacggcattgtcgtcaaggtcgatgacctgggcctgcagcgcgccctcggtgccacctcgcgcgcgccgcgctgggccatcgcctacaaatacccgcccgaagaggtcaacaccgaactgctcaacatcaccgtgcaggtggggcgtaccggccgtgtgacgccggtcgccgtgctcaaacctgtctacgtggccggctccaccgtggctcgtaccacgctgcacaacggatttgaagtcaaacgcaagggcatcctgatcggcgacaccgtggtggtgcgcaaggccggcgatgtgattcccgaactggtcggcccggtgcttgaacggcgcaaagggcgtgagggccagctgcgcgaattcgtcatgcccgagttctgcccttcatgcggcgcgaaactggcacccgccaaggaaggtgacaaggacatccgctgcccgaatgtggaaagctgcccggcccagttgaccgagcgcgtgatttcgctggcctcacgcaaggcgttcgacatcgagcatctgggtgaacagtcggccatcgctctgaccaacccggaggagaaccggcctgattcggtggcgacctacgcgccgaacatcaccgaggttctggtcgcccccggcgaagagcccgaactgtacgagccggtggaggggctggaattgccggccgcgcagaagccggtgttgtccaacgaatccgggttgttcgacctgaccgccgccgatctgcgcgacgtgcgtgtgtggcgtgaggccgcaatcgtcgaagtgcatgagacggtcggtgcgaacggtaagaagaaaaaggtgcgtaagcgtgtcggcggctctggcctgtggcatcaggtgcccgccttctggaccgcgcccacgccggccaagaagctcacggccaagcagttggccgaacgcgcgcaagaagaggccgcagtcgaatctgccggaacacagggaggtgccgccagcgagacgaccggcgcacctaccggggctgaggctccacttggtactatgccgggctttgccgcagcctcctatcccgagtatgacgtgccggccgacgcggtcatcgtgcgcgtggaccacaagaccacgcgcaccggcgtcacggatgtgccggtgatcgttcggcccggcgaaaacacgcgcaagatgttcgacgaaatggacaaggcccgtcacgccgacctgtggcgtgtgctggtcgcgttgtcgattcgccggctcggtccgcctaccgcacgcctgatcgcctcggcgatgggctcgctggcagccatcgaaaacgccacgattgaagatctgacggccatcgacggggtgggcccggaaatcgccgaatcggtggtgaactggttcgccgccgcccgcgagcccggcgactggcgcggcgcgactttgcgtgcttggcaggccgccggcgtgggcgtcgatgaggccgagaccagttcgctgccgcagacgctggccggcaaaaccgtggtggtcaccggttctctggagggctattcgcgcgactccgccaaagaggcgattatcgagcgcggcggcaaggcggccggttcggtgagcaagaagaccgattacgtggtgatcggcgcaaacgccggctccaaggccaccaaggccgaggaactcggcatccccatgctgggcgaagcccaattcgcccagctcctagaaaccggcaccatctaaaatagccccctcagacgcttcattaaccccctctgatgagggggctgtcagcctttaggctgactgggggagagaaaaagcgaatcccgccccagtgtgacttactccactccctctggcatgccgccgcatcacacgctagggtagaacaggccctaaaggaggatacggatttatgagcgacgcacgtcagatcgaagccgacatctacgaacgcctgagcaaggtcatcgaccccgagctcggtcgttcggtcaccgacctcggcatgattgccgctatcgaagccgcgcccgcatcgtcggacgccggcacttacgacgtcaccgtgcacgttgagctgacggttcccggatgcccactgagcgagaccatcaccaaccagatcaacggcgcggtcagctcctatccgggcgtacagctgctgcctcatatcgaagtcggttcaatgagtcgtgacaagctggccgatctggttgccgacctcaaggccgaacgcaagcggaaccccttcagcaagccgggcgtcaagacccgcatcttcgccatcgcctcgggcaagggcggcgtcggcaagtcttcggttaccgcgaacctggccgccacgtttgcggccctcggcttcgacacggccgccatcgacgcggacatctatggcttctcactgccgcgcctgttcggcgtgcacacgcagcctaccaatctgaacggtatgcttatgccggtcaccgcgtggggcgtgaaactgatctccatcggcatgttcgccggtgccgaccgggcgattctgtggcgcgggccgcgactgcagcgctccttggaacagttcctgtctgacgtatggtggggcgagccggacgtcctcttgctcgacttggctcccggcaccggcgacatggcgatttccgtggcccaggcactgcccaacgccgaactcgtggtggtcaccaccccgcagccctctgcctccgacatcgccgtgcgctccggactcgtggccctgcaggtgccgatgaaggtgcgtggcgtggtggagaacatgagctactacgagcacaagggcgagaagctggagattttcggtgccggcggcggtcagcgcgtgtctgaacagttaagcgcggcgcttggctatgacgtgccgctgatggcccagctgccgctggaacccgaagtgcgcgagatcggcgaggcgggccgtcccgcggtgctggatgtcgatggcgccttgcgcacggatggcgccggccagaccttccgagggttggctgaacggctgttggcagtgtgagcctgcgcagcctcacacttttgtaggcggcgctggtgtttaagtccggctcgctgctggtgggcgaatcgcttgaccacagcacccgcgacctggtggtcgaggcagtggagcgcactgccggcgtggataggctgcattaacccgcaggccattcacatggacgaggacgccgtgccgcgctgccttggtatgaatgggggatctacgtcgagcccgatgtctggcgggcacctcgcggtaaatagcggcatagcgcattatcggtgcgatgctaagaggtaatggcccatgagcggttccaatcggcgagattgcgttgccgggacaccacgacatgggccatctcgataaaacgatgccgcgtgtcggctgttctcaggtcatccgcagtgacgagaatgacgatccagccgagcagttgcaatgcgtttcgctttgccgcgtcgattcgcatttgtgccggatcggcgtgataggctccctgatattcgaacgcgacgcggcagtccggatatgccatatccaatatgacgtatgagttgccgatattcacgcgatagttggcggtggggcatcccaagcccgaatccttcagcatcccaaacagcgtgttttccggcggagaatccgtgttctctgtcatgtagggcagtgcctcgtggcatttgttacgacctatgaaccgcggactgatttccaagtaagtatcgaaatccttgcgagtggccattctgcgccgtttatcgcggctcatcaaagaggctccaatggccgcaagttcctccaatgtggagtattgggccatctgagcccacatcatgaccggcgaggcaatccagaaatgttcatagtcctttttgcggatatccagttttcccttaaacacatggaagaccacgcctttgattcgtctgcgtttgttggcactggaaacacaggcgtgcacggcatcaacagatagcgtgcaatgtcgggggatgggcgcgccgtagtagttggccgcattgatgtatcccaccagcaatggaccttttgaacggcgcgcagcatcattgcaacgttcacgttctgctcggcgtcggccgacaatatcctcatgcataaaagagctcatgatgcgaccgtaaagctgatttggacttgaatgcaagccaggcagggcaatgtggttccagcttatggagttatccacattgtctatttgcgcagagaacggttctcagtagtatctgtgcgctcaaatgaacaagaacataacaatctcacatcacgcaaatggcgacatggcagtgattagggcatattccatgtgtgcttcgggcgtagagaagtgtgcacagacattattgagaaccgttctctgcgcgcctatctggctacgacctcggtgggcaggagccccgtgcgctggaacggccggtcctcgatctggtcaagcactagggtagccaagctgacgccgaatgcgtccattggctgg

SEQ ID NO: 2704 - DNA, 3304 bp, Unknown
  R36_18m  MAG No. k141_8355
gcagctcatgcgcgccatctggggcggcgccacgctggagcaggtgttcgcggccaccaagatcgacccgtggttcctgaagcagatcttcctcatcaacgagaccgccatgacggtgcgcgaggccgagaccctgaccccgaagctgctcaagaaggccaagctcgccggtctgtccgacgtgcaggtggcccacctgcgtggcttgggcgatgaaggcgagaacaccatccgcgagctgcgctggacctacggcctgcgcccggtctacaagaccgtcgacacctgcgccgccgagttcgacgccgccacgccgtactactacagctgctacgccgacgaaaccgagctgcgcccgcgcgagcgcgaggccgtgatcatcctcggctccggcccgaatcgcatcggccagggcatcgagttcgactacacgtgcgtgcacgccgtgcaggagcttggcaaggactatgacaccatcatggtcaactgcaacccggagaccgtctccaccgattacgacatgtccgaccgcctctacttcgagccgctcaccttcgaggatgtgctcgaaatctacgaggccgagaagaggatgggcccggtcaagggcgtcatcgtccagctcggcggtcagaccccgctgtccttggccgcgcgtctgaaggccgccggcgtgccgattctcggcaccaccccggaatccatcgatctggccgagaaccgcgagctgttcggcgaggtgctcaagaaggcggagatgaacgccccgcgttacggcaccgccctgagcctcgaagaggccatggacgctgcccaccgcatcggatacccggtgctcgtgcgcccgagctacgtgcttggcggccgcggcatggaaatcgtctacgacgacaagcagctcaccaagtacgtggaccgcgcgcttgccgaggccaaggccgataccgtggtctccggccgcctgccctccccgctgctcatcgacaagttcctgcaggacgccatcgaaatcgacgtcgacgccctgttcgacggcgaggaactgtacatcggcggcattatggagcacgtcgaggaggccggcgtccactccggtgacgccgcctgcaccctgcccccgtccaccctgtccgacgaccagatccgccgcctgcgcgaaggcacctacgccatcgccaagggctgccacgtgcagggcctgatcaacgtgcagtacgccttcatggccaacacgctgtatgtgatcgaagccaacccgcgtgcctcccgtaccgtgccgttcgcctccaaggccaccggcgtggcgctggccaaggccgccgcccgcatcatggccggcgaaaccatcgccgaccagcgcgccaacggtctgctgctgcccaagggcgacggcggcgacatccaccccggccagcaggtcgcggtcaaggaatccgtgctgccgttcaagcgcttccgcaccccggtgggcaagaccgtcgacatcctgctcggacctgagatgcgctccaccggcgaggtcatgggcttcgaccgcgacttcccgcacgccttcgccaagagccagctcgccgcctacgatggtggcctgccgacccacggcaacgtgttcatttccgtgaacgacaccgacaagcgtcagctgccgctgctcgccgtgcgcctcgaagagcttggattcaagctctgggccaccgagggcaccgcctccgtgcttcgccgttacggcatcgagtcgaacatcgtggacaagatcagcacccgcgtggataccgatccggaagccccggtcgaggtgcatcacgctgccggatccgtgggcaagaacgtggttcagcttatcgaggaaggcaagatcgacatgatcctcaacacgccgaactcgcgcggctcccgttccgacggctactccatccgtgctgccgctattgcagccgatctgccgcagtttaccactatcaccgagttccaagccgcactgctggctatcgaggccgtgaagcataatgattatcagatcatgagcattcaggagcattcgaagcagctgttcgaattggagcgacgggagttctgatgactacacccagcagtgaggaattgcaggcacaacgttcggatttcggtctgcgactgagcaattcaatggccaaatacggaccgctgtgtgtgggcattgacccacatcgcaagctcctcaccgactggggatacaacgtcgacgccgaaggcgccgaactcttctccatgcgtatgctgcaggccgccaacgggcgcgccgcagcagtcaaattccagacgtcgatgttcgagcgctacggagccaaaggtttcgaagcgctcgagcgcgtgctctacgcggcacgacaaatgggcgtcatcaccatcgtggactgcctgcacggcggcctgtccaccacgatttccgccatcgcagacgcctatttcaagcccggtgcaccgttgctggccgacgccatcacgctgctgccgtactatggcgcgcgctcgttgaacggcttgattaccgaagcgttggaaaacggacgcggcgtgttcatcgcctccctgacttccaatccggaaggcatgagtctgcagaccgcgttgcgccagagcggcgattacaagggacgtaccgtggcctacggcatcgcctccaccgcgcagaagcataacgtggatatcgaaggcatgggctcggtgggtctgatcatcggtgccaccatcggccaatggatgcaggattccggcgtggacccctccaagttcaccggtccgattctttcccccggttacggttggcagggtgccgaggccaaggatctgaaaaccgtgttccgcggtacgcgcggcaacgtgctggttaccgtgtcccgctttatcgcctcgcatgggccggatatcgccgcactgagccaagctaccgagtcgattgcgcttgacgtacgtcagtcgctgatggaagccactgccgaaggcgcagaaaaccagtaatcagaacggaatcagatgtcgcggcatgcgtacgtatctatctcattgcatacgtcgcatcacgattcatattcttccctgttcgtcggggctgtaacagttaccggtcatctcgccggtgagccgttaccacattggattcataatcgctgcacaccacatcatctccggaggaacccatgactgaaaacacccatgccggccgtctaatcgtcctgactggccctaccgcagtaggtaagggcaccgtggaagccaagctgcgcgccgaccaccccgaagtgtgggtgtccgtctccgccaccac

SEQ ID NO: 2705 - DNA, 10131 bp, Unknown
  R36_18m  MAG No. k141_8409
catgagcctgggtcgtggccggtgagatggacgtggatagatccactgggggcatggaacctgtggaagtgacagagggccggattgcggcaggccgtgcggccggaatcgaaggcgtaggagccgcccaagcagacacggcgcgctcgatacgcgcggagcgtacggagtcgccgggcagttcgggaatcgtcggcttgagtttggaatccgtggctgattccggattctgttcgccgagcagttttcgagcggcattgttcaggctcatcacggaattgtcgtgcatattccacgtccattcggcatggatctcacggcccgcggaagtgaatatcgccacgatgcgccaaggctcaagtccgcgccgggtggatttccaggtcactgattccatgccgattccagcagaggccagcgtgcgttccaccagttcgctgatggtgcgcaccctgctgtctttgggtgccgccacggcaaggaattgttcgatggcgtactgtttctcggtctccacggccatggagaaacgacgtaccagcgtttcgctcagatgatatttctccgcgacacgggccggatcggcgccggcgcgaatcagcgactgtatctgggaaatcggcaaagtggactgctgatgcggctggggggcctgtcgcgtctcgcttctgacctgcttggcctcaagaatcgcccgttcgagcgtgtcgtccacgctcacagccatttccctgccgccaagggagaatacgaggtcccccgtcttgctcacgcgtacgaaacgggctttttcaagccgatcatctggcatattcgcaccactttccgtcgcaaagacattacttcttttaagtatgccccacgtgtcgaactttacgagtatttcaaatcgtgtatcctatgggcgagtacggcgctgaccgtgctatatatatcgacttacgaaccaaagacgacgaaaggaccatgatggctcaggattatgattccccccgcaataaggatgaggacgaggaatcgctgcaggcgctggggaagtcctcgcagaacgcctcgagcgacatcgacgacgatgagaacgccatcgccgaagactacgaactgccgggcgccgatttgagcaacgaggattcctcggtgaccgtcatccccatgcagggtgacgagttcatctgctcgcagtgcttcctggtcaagcatcgcagccagctcgcctacacggacgaggatggccagccggtgtgtgaggagtgcgccgcctgatggcgttcgacgagacctacaacgagcccgaatccaccgaggtcctggtcaagagcctcgaccccgaacatccggcccagctgcactatgcccacgcgggcgatgccggtgccgacctcatcaccaccgtcgatgtgacgctgaagccttttgaacgggtactggtgcccaccggcgtggccatcgccctacctgcgggctacgtggcgttggtgcatccgcgttccgggctggccgccaagcagggcgtcaccgtgcttaacgcgcctggcaccgttgatgccggctaccgtggcgaaatcaaggtgccgctgatcaacctcgatccggaacgcaccgccgtcttccatccgggcgatcgcatcgctcaattggtgattcagcggtatgttgaggcccggttcatcccggccgaaaccctgcccggatccgatcgcgccgaacgtgggttcggttcgacgggagtggcgtcctgaccggattgggccggttgaatgaccaaggtgatgacggcaacgacggttgcggaaccaatgatggcgaacaggtgcatgcacaaggctccggttcgcggctacaatgaacttcatgacgagggaggtgactggcatggcagagattgatggcgagcagtacgccgcccgtaagttgggttgtgagatcagtgccgatccgctcaatccgctggatccaatcaagaaggtatgcaagtcccatcatcccggtgaggatttgtccatcctcgaccgcgcgtaccggcgcgccgtcatccagcattgcacgcaacggcgcaagtctggtgagccgtacatcatccacccgctggccgtttcccagattctcgcggatttgggcatgggcccgatcgtggtggcggccggcctgttgcatgacacggtggaggacaccgactatacgttggatcaatgccgcgccgaattcggcgacaccgtggccggtctggtcgatggcgtcaccaagctcagccagcttgaagtgggtgattccgcccaagccgaaaccattcgcaaactcgtggtggccatgagccgcgacgtgcgcaccctggtggtcaagctcgccgaccgcgtacacaacgcccgcacctggcgctatgtgaagactacgtccgcccagaagaaggcgcgtgaaacccttgacgtgtacgcacctttggccaaccgactcggtatgaacgccatcaagacggagctcgaggaactgagcttcaaggtgctctacccgaagatctacaacgagatcgtggtgctggtggctcgccgagccggccagcgcgatgtgtacctgaagcagattctggcggagatcaacgaggatctcgacgagcagaacatcaaggcatacgtcaccggacgcccgaaggattacttctccatctaccagaagatgatcgtgcgcggccatgatttcgcgaacatctacgatttggtcggtgtgcgcatcatcgtcgacaccattcaggattgctatgcggcgcttggtgccgtgcatgcgcggtggaacccggttcccggccggttcaaggactacatcgccatgccgaagctcaacatgtaccagtcgctgcacaccacggtggtgggccccggtggcaagccggtggaaatccagattcgcacctgggacatgcaccgccgcgccgagttcggcatcgccgcgcactggaaatacaaggaaaacggccaggccggccgcgccctgagctcgccggacaagtccgaccgcaggcgtgacgagaagaaccaggagctttccgaagccgacaatctcaaatggattcagcagcttgctgattggaccagcgaaaccccagattccaacgaattcctcggttccctgaaggaagacctcggctcgtccgaagtctatgtcttcacgccgaagggcaagatcgtctctttgccggcccatgccacaccggtcgatttcgcctatgccgtgcataccgaagtgggccaccgtacgatgggcgcgcgcgtcaacgggcgtttggtgccgctcgacaccacgctcgacaacggcgacaccgtggagatcctgacttccaagtccgataccgccggtccttcgcgcgactggctgagcttcgtcaagagcccgaaggcacgaaacaagatccgccagtggttctcgaaggaacgtcgtaccgaggctattgaggaaggccgcgacgaactgacccgcgctatgcgcaaacgtaacttgccggtcaatgcgctgctgaccaccgaggcattgatcggtgtggccgacgacctcaatttcccgaacgccgacgctgtgttcgccgccatcggtgatgggcagatctccacgcagaacgtcatctcgcatctggtcaaggatgccggggccgacgaggtcgatgaggaggtcgagcaggaggctctgccgctcaagcccgtggagcgcaagacttccagcagctccaccggggtatccgtcaagggcgtgggcgatgtgtggatcaagctggcccgttgctgcatgccggtgcctggtgacaatatcatcggcttcatcacccgtaatcagggcgtatccgtgcaccgcaccgactgccagaacatgatcgatctgaaaaacaagcagcctgagcgtgtggtcgaagtcgaatggaccagcaccaagggcctgttcatggtcaagattcaggtcgaggcgctggatcgacgaaacctgctttcggacgtgacacgtgtgctttccgaccatggcgtgaacatcatttccggtacgatcgccaccggttccgatcgcgtggccaccagccagttcagcttcgaaatggccgatccgcagcatctcaactcgttgctggcagccgtgcgcaagattgatggcgtgttcgacgtgtaccgcatcaccggtgccaaggaatccgccgaacctcgactgcgcaagatgaagtaggccgttgcttggctcccctccgggaggggctgtcagcgaagctgactgaggggagcagcgcgggcttgcggaactcccctcagacgtctgcggcgccagctcccctcagagagggagccaagaatacgaaaaggtcctgactggaataccaatcaggacctttgctgtatatgtgtcggtcttactcggccacgttcacggacagaattacggccggctcgagcgggcgatccatcggatcggtgtccagtgcttcgagcttatcgacgaccttcttggagtcgtcatcggcgacctcgccgaagatggtgtggtgaccgtccagccacggggtcggcacggtggtgatgaagaactgggagccgttggtgccatggaccttgccgtccatgccgcgacgcagaccggcgttggccatagccagcaggtatggcttgtcgaacttcaggctcgggtcgatctcatcgtcgaactcgtagccagggccgccggtaccggtgcccagcgggcaaccgccctgaatcatgaactgcttgatgatacggtggaaggtcaggccgttgtagaacttgccatgggaaggctggccggtgtacgggtcggcccattccttctcgccggtggcgaggcccaggaagttggccacggtgttcggggccttgtcgtcgaacaggttgatggtgatatcgccctcagaggtgcgcatgatgatggtagtcatggctccaagtgtctcatgggcttgagaccggggaagagacgtgattgcgggaatggcgcggagagctgggaatgggcgtgggcaatagccgggacaacatgccgcagcgtgaagcgtcatacgagttgtctcgcgatggccaacgcgccggcaacgaccatgagcgctgagaagacacgcaaaagagtccttttgcgttctcttcccggtttttggatccgatcacgacggatatcaggaccaatccgacggccagcggcaccaaggccagcagaagcagtggcttttccatggcgcctcctttctgaacgctgtgattcagagatatctttagctaatcatgggatatgggcggcttggtgccgattggtgatggggctcgatcctgatgttcgtcggtgccggaatatggtgcattccgtcaaatagaggtgggcacttggatacggtgtcgctttattggatttctttgtttctatggtttgattatgccacgagtccaacaaaacgttaccggccccagcggctattgacaaacttgtcagtttggacgtattgcgtgtcgaacacgctgagccgcgacaaattagatgcctgctgctcggatgcgggtctattggaagtcatatttatcggcacatttcaatgcttgctttggaacatattactttggtcgatcatgatgttgtcactgtagacaacatttaccgtcaggattacgtgcgaacagacattgggaagaaaaaggttgatgtgctgaaatccagggcgtcaagatgtctttctatagatagcattgataaaatgataacttgtcatagtgaacttgatgaattaattgaccgagagaaaatcaacttagtaattcaagcggcagacgttccaagcaccaccgaagtcgcaaggatgattaactactcatgtgataagaaagatatagcgttcattgttaatccaggctattttggtaattcggtaagtttgcctgaattctattatccgaacaataaatatgactatatttcttcacacttggcaatcaaaggcaagctattgctgcaccatgagtccggtaagcttagctatcgattatgttcaacattgggatcgttggtagcggaacaggttgaagattatcgatgtcattgctgtcctgctcattatggagaaaagggttacttcgatatatatatgattatgcttggcatactgagcaagtttgtaaagaaccagtgccgcctaatcttctgtaggattccagtactggcagggtaaggataaattattagatgagtaattcgttaaagctcgtttctgctcctgtgcgcgaaagcaggttgtgggatatcccaggttacgtgccatggttcacggcggacagcgcgacggccatcggcgtggccctgcggtatctggcggtctctctgatcggatacaagctcaccggatcgaccacagcagcgggttggttgggctcgctggccgcgatcgcacagcaggcggccgccgtgttcggcgggacattcgccgaccgtcacgatcgcaagacactgatcatcgtgaacgcgacagcgggcgtcatctgttgggggtcagtcgctgcgctgctcatggccggcaagctggtcttccccgtgctgcttgccatcgcggtgttcgagtctgcggtcaacgggtttctcggccccgcctcggatgcgatgctcaaatccatcgtcgatattcgctcatatccgaaagcgcgcagtctcaacgaaggccgtgacgcgaccatcaacatggccggcagcccagtcggcggcctgctgtacggcatcgccccgtggttgccgttcctgtcggctgcggtcatgtacctgctggcaggcgtggctgcgacacgtatccgagtcggcggaaatccgcggaacggcagcgatagcggcaacggcgatagcgacgatgacggtgggaaagcgggcggcgcgtcatttttccgtgatttcgccgaaggatggtcgtggtcgctgcaccgcaggatgctggtgttgacgatggtgtcgtccgcgctggcgaatttcggggtcaatggcttccagtatgcgattcagctgcatctgatgcgcaccggcgtgaacgcgacgctcatcggattcgtgaatacgggcgtattcctcgcgatgctggcgggtgcgttcatcgccggacggatcagcgataccgcaccggtcgggccggtgacatgctgcggattcgtgttcatctgcatcgcttcgctgccgatgctgctgaccgacaactactgggtgctgcttatcgccaacgccgtgatgtgcctgccgttcccgatcatcaacgcgttgcagctcgggttcattttcggtaagacgcccgacacgatgcaggggcgtatcaccgtgacgcttaccgtaccggcccaggcactgtccgcgttctgctcagcgacggccggaagtctgttgcccgctttcggattcagcgggactatgctggtgttctgggcggtgatgctcgtcagtatgctgctaatcgtcagttcgcgcagcctgcgcaccattccacgcgccgaccagtgggatcgcacaccgctggagtagccgcggacggccaccaaccatggggactatgcaccgctgcgcgctgctctccgcacacgtcttccattccgcaaaccggctgcgctgacaggacgatgagtgcggtcagtttgcggcagtcagtttgggaagaactcaaaatctcgattcagcaggctcaaatcacgagttttcagattgtggtctggaaaactcggtggaagaggctgatcccgggagaaattgaggaatccggatgtccgtttgcgcgaccgattctatgaaaacttccggatgcgcgcgggagtttagcgcgaaacatgaatccggcgaagttctcccgggaacggcttcaaggtcgattttgagaatcgcggaattccaacgtttttgttgagagattatgcatgagagtaccggattctcgtaaactcccgcgtccggcacgggagttcagcggcgaattcccgaagtcagcgtaaactcccgcagaatctgggagattatggcccgacgaggtctaccagaacgaactcccagattggccgccgttcagccagacgaaaacgacccagcaccggcggaatcgaacaaacaagcgccacaaccaccatcaagcagtcggcaacgtcattatgagctgataggaaccaaccttcttgtccgtcatcccagtaaacgttgcgttagttgacatgtcagggtattattctcgaacagtgtgtaaacacactattcacgtatacctctggcgtgtccggcgatgggatgcccgcggcggatatcggacacgatcttcccgatccggcactgttcccggaccacgcagtccgcgaccatgcacgccaggggaaccggattgccgtacgcctgccactgctcgagccgtccggcgtaggtgctgccggcatcatgcctgatggcgatgggctcgtaccccgcctgcatgagcatcatgttgaggatctggcgtccggtacgcccgttgtcgtcggcgaacgggtggatgttctcgagtgcctccgcggaggcgcgctccgacggggggtaccatcatcggaaagtccgccggaaacggcggacttttccatatccgcctccgcatcgtccgaaacgcccattctcctcatcagagaatcatcaagaagttgttccgtgcttactttcaagaatcttgatgcattaaccaggtcgtatacagaccagcctgttttccccgacatctttagggacatggccgaacggccaattcccatcgcttcggccaagctggactgcgaataaccataagccgtcaatagcattttgacattgaaggtgattgtcgactccagctgcttttgataaggggctgcggacattttcttggagaccgaacggaaagattttcgtatgtccggtcttgaggaacgagagcgtgcggtggagttgtatttcaccacgccgatgacgacggcccaggtggtggagcatctgggttatccgaccaggcagtgcctggagcgttggctggcgatggattcccggcatgctggccatatggccaaacccatcatcccactggagaccaggcgaagggcagtcgagctggtgctgggcggcatgcagcagaagcaggccgccaaacagctcggcgtgagcgtcggcgcggtgcatggctgggtcagggcgtaccgcaagggcggcatggccgcgttgcagcccaaaaacaggaactccgcgcagggcaataagcccgcggactcccgccgccggccgtccgcagccgatgatgatgacgcggaggctttgcgccgcagggtcgaggaaccggaaccgggggaacgcgttgatgcgggaggtggtggaggttcgcagaaaaagaccccggcgccgacctgcggcgcctgtcgaacagggagaagaccctgttgatcgaccggttgaggccggcgtattcgcccggctcgatggcatgcttgcccggcatcgcgccgagcggccacctactgccaccacgcccggctcggcgttgacaagtacgccggactcggggcggaggtggccggggcgttcgccgattccaagggcaggtacgggtaccgcaggatcaaggcggtgctcaagaccggcgtatcggagaagtcggtccgcaggatcatggcggaggaagggctcgtggcgcatgtgcccaagcgacgcaggtatagttcctacgagggcgagacgacgccggctcccgccaatctcgtcgaccgggacttcacggccgagcgtccgaacgagaagtggctgacggacatcacccgggatcaaggccagggacgggaaggtgtacctctcgccgatgatcgactgcttcgatggcaagatcgtcgcatacaccgccggcttcagccccaacgcggagccggacaaccggatgccggagaaagcggcctcgacgctgccggggaacgcgcgtcccctggtgcattccgaccgtggatgccactgccggtggcccggatggctcgcgctcatggaacgcttcgggctgacgcgctccatgagcgcgaagggctgttcgccggacaacgcggccgcggagggattcttcggcaggatgaagaccgaggcggtctaccccgagaagtgggaggaacacacccgcaacga

SEQ ID NO: 2706 - DNA, 4775 bp, Unknown
  R36_18m  MAG No. k141_8567
ccatccacgcccttcaggttcggcacagcggaaatcacgtccagttccgcaccccagcacgtggcgaagtcggcggcaatgtccagcgccttcagaccccacttggattcgtcggagccgacggccaccttggtgatcgtgttgttcaggtgcatcaggttaccgtcatcatcggtgtacggcaccaccacaatcgggcagtaagcatatgccggcagcgatgaggacgtagtgcccagcaggcgctcggccagaccgcccttgccacggttgccaatgacgatcagattgtagttacgagacaattcgacgaacaccgatgccggatctccggtaacaatcagtgtggcggcttcgacgccctgctcgtctgcgatggccttggccttggccagaatctcctgagcatcggaatgcgcggcgttatcgtcccccatcgccgtgtaagtggcatcgaacgaaacggcggcatagctcggcagggaatatgcgcagacaatctgcagcgtcagccccgcgtgctttgcataattcgcggcccaccatgttgccttgtaactggcatgcgacccgtcaacgccgacgagaatggccttgtcgttaatcatgacgacctccttgaagttattgtggcacgaataccacgtacctccaacaataccccgcgacactcggtttggccggtatcctccgctcaaaaagaaatccgcgtatacgaaaaaggcacatcccaaaggacgtgccttaatacgaattcgcttaccgcataattcttgttacatcacgcggcgaatggaatatccagctccaccgaacacggaaacgttgcttattgccgttccctgcaccgggttcatagcattcatcacctgtccgttaccgatgtaaatggccgcatgagtaccattcgcaagaatgtcacccggcttggcatccgccaagcttgcgaccggagtacccacagtggcttgagcaccagaggttcgcggcagggaaatgccaaactgggagaagacgtactgtacaaaaccggagcaatcccatcctgccggagtgttgccgccggcaacatacggatagccttggaacttcagtgagaagctggcaagctcagcgccagtgccagtcattttacccaagtcaacctgtggaatcgacgcacgctgttcagagcggctggctgcagcagcagcggactgggctgccgcagcttcatcagcggctttctgagccgccgccgcagcagcagcttccttctcggcctgagactcggtctgtggcacatcaagagtctcgatgccaccccatttagagttctcgtcaaccgaagtggaggtggattcggcgaacaaattcttcttcaccgaactcgccttcgggaaagagcgtgaggacaccacagcactcgtctgcgcggaatcggcagaggcaaacggggctacgcatgcaaacatggcacccgtggcgataaccgccactgatgtggaaataatattcttaacgttcgtcatcagcgccttaccttagcacacatgggtcgatttcataacaggaatgtcttttcgaagatgatgtcgcgggtgtatcactcggcaggagaacgcaacgggcctcggataccgattggcatccgaggcctgcaatatatcaatcaataagactgcatcacgggatacgtaccacgatggtgagtttttcggtcatggcgctagcgagagccacgctgtagccgttccagccaccatggaccgcctgaccgttgccgacatacagcgccacatgatcgtagtgcgcgccgccattccatccaccggtgttggcataaatcagaatatcgcccggctgcagggacccgtctgtaactacgtggccaccgggaacattgacgtactcttcaggccaaccgtggaagttaataccacgggccgccaacgcttgactgaccaatgcggtgcagtccatgctctgtccgatcaaagaatacgcacggtcgatagaggcaccggcaccagcggaaaccgaaccactggcatcggaataagtaacagaagagcgagactcattacggctcgcggcgttggcctgcttctgggtcgcctgagcctcggcctccgtctgcttcttggcctcctcttcggcagccttcttggccgctgcggcatccttttccgcctgagattccgtctgcggcacgtcgaggttctcaatgccgccccaatcagcattgtcctcaacattcgtggcagtggcttcagtcgtcagatctttgcgcacctgggtgtacgaggggaaggacttggtggaagtcacagtaacaccctcagctgcagtcgctgtaggaacaaacataaacgagcaagcacaggagacaatcgcggcaacaatggaagaagctacagttttggtcttcatagaaccatcaccttacacggtgcgcattaactcgtacaggatggaagaaataaaacaccccggagctattgggatatatcggcgtgtcggcacaggtcagttcggactaatacgcggtcgcaacacttgaaatgtcatttcgcgcgaacgattgccgatagggcgacgtcacatccgaacagtaatcaccgaatgtaagccaatgaaatgaatcagtagtgaacgtactggaacttaccggcttcggcggcgctgaacgtacgggtcgaaatcacacccaatcccttggcattggattcggagatctcaatggagccgtcggcattgatcttttccagaatggcaacatggccgtatgtgccatcggcattggcctggccaggagcgaacaccacagcatcaccgacatggcgaggagtgttgtccacccaatagcccagagcggaagctgacgccgcccactcgccaccattgccgaagttgccgctggaaggcagtcccagttcggcacgacgctggtacgcgtaccacgtgcactgaccccacggatagttgttggagttggtgccaacggcatggttcgggttgaagccagccggcacagcatcgccatcggcatccatgagagccgacaccacaggattgttcgcattattgcgattcatcagcttggcgtccaaggtgctgtctgaattgctcagcccccaaccgccttcattggtggactgtgcggtaacggaggatgaactcagatcagtacgtgcttcggaacgagaagccgcagtcacatcgctgatgcgcttaatctgcgtggtcgtcgtggccggatcagccacgaacgagttcgtggcgtctttattgttggaaaatgcaagagcacctgcggccgtgccgaccagagcggccagtgaggccgaggcaagaatatggctacggcgttcagcggcacgagcggcctcacgaatggaacgacgagtctggggagcgatttcattgatcttctcggcaatgaccggatcaagccccaaaacaacggcgtcgctgccagcggattgcaccgcgcgcacggcacgaacggaatgagaacccttgccggaggcaaacaatgccttcgctaagctgaacttctggcgcgagaccgtggtcgctttatgcgaagcatgcttcatactacgttaactccttggatgggttcggcggggtcctttcaacgaccccgtatgaccggcacaattgagtactgtacaacgaacagaggtcaatcctcaatgcgatcccccaccatccgggcatgtcaaacgatttacgtaaccgtgcggcagggtgaaaaactgccttgtttccgcccgttcacgaacctcactatccggttatcggaagaatcactaactcatgtcattccgacacaccgtagccatgatgtgctgcgtacattctgcactgcattccgcattgccgctactaccgcccggcaccccggaattccgcagtagccccgcagcaatcccgcacaccgagcattatccgcgatattccccaacactggtctacccttgaaaccatgactatcacactgagtattcccgagtcgctgaagcccgaagatggtcgcttcggctccggtcccagcaaaatccgccccgaacagatcgccgcgctcgatgccggcgccaccaccctgcttggcacatcacatcgccaggcaccagtcaagcaactggtcgcttcgattcgtgaaggtctgcgcgagttcttccacctgcctgaagggtatgaggtggcgcttggcaacggtggcgccagcgcgttctgggagattgcctgcgcttcgctgatcacccgtcgcgccgcattcggcacgtatggctcattcagtgccaagttcgccgcgtccgccgcgaacgcacccttccttgaagacccggtgctgttccccggcgagccgggcacttaccgtctgcctgagctcaccgagggcgtggacacatattgctgggctcacaacgagacctccactggtgtggccgccccgattcgccgcgtggccggaagtcgtgaagccggtgccttgaccgtcatcgacggcaccagcgcagccggcgctttgcctgtggacatcagccagaccgacgtctactacttctcaccgcagaaggccttcggtgccgatggcggtctgtgggtcgccatcctctcccccgaagctatcgatcgtgcggcaggcgtcgaatcaagcgctcatctggaaggcgcacatcgctgggtgccgccgttcctctcgctgaccacggcactgaacaactcccgcaaggatcagaccctgaatacgcccgccgtggccaccctgatcatgatggaaaacc

SEQ ID NO: 2707 - DNA, 2844 bp, Unknown
  R36_18m  MAG No. k141_8625
cgggagaggtccttgtccaggaagttgcgctgcgaatacatcagctcgtgcatgctcatccacgagcagtaggtatccgagggcgggaagtgcgtgagaatacgcgtgccatcgatgccctcccacatgaacgagtggtgcgggaacttggtggtgtcgttccacgagatcttctgcgtaaggaaccagtcgaatcctgcacggcgggcgatctgcggccaagagccggtgtagccgaaactgtccggtagccagacgccgcgcggcgcgacgccgagatgctccttgaaatatcggcggccgaacgtgatctgccgcaccaatgattcgccggaaggaatcatgttgtcggattccacccacatgccgccgaccgggatgaagcggccctcttcgatgcgccgcttcattcgtgcgaacaggtcgggatgctcctcttccagccatgcgtactgttgggcggaactcatcgcatacgtgaagtccgggtcttcgtccatcaaagccagcacgttggatacggtacgggccaccttgcggcgggtctcgcgcaccggccacagccatgcggagtcgatatgcgcgtggccgatggcgatgtgtttgattgcgctggaggcggccggttcggcgagtacgccggcgagcgccgcacgggctgccgacacggtttccaagtcgcgttcatcgtagatgttcagggagcgttgcagtgctttggcgagctgccagtagcgcgggtcgtcgtccttgagctcacgaatcagcgaggagacggtttccagatccatgtagtaggcgaacacgtcttcgttgaagatggtgatatccatacgactcagtgtgtatgggaagtcacaggtgccggtggcctcttcgccgagttcggtgggtgagaacggggtggggccttcgacgaatgggttggcggcggcttcgatatagacggtgaagtcgccatgttcatcgagttctacggtgctgctgccgtccgcgtagacgagtggaatccagtggttgcgtgggttcgcggatttgatggcggtgccgtcggcacgatagacaagtccctcggattggaatccggggccgcggtgatcgagccagccgaggtctaccatgagttcgacttttcgtcctttgaccgccgccatgtcgatatggccgttcacctcgaaccatgtggtgccccatgtggtgccccagactccgggaacgcggaaaggttcgaagggcacttggccgttgcgcactttggctagaaattcgctggagggcaccggttcgccgggattgtggaacgaacgcaaggcgcatgcggcgagtgtggtgtggatatgcggtttgacgcgctgctgcatgacgcggtcgcagcgctccaactgctgattgggcagaagaaacatggagagttctcctttgctgtgtctgatggaaatgatgggtgtggtgacaattgggaaaaccgtaatacgacatgcttctgccgcctcatggttcgaggaggcagaagcgtcagacgggaattcagcgcgtgatgcgcagggtggcgagctggaacgggccaaagtgcaacgtggcaccttcggcgttctgcctaccgtcttgcagcgcgactggaaggtcggtggccagattgtcgccttccagcacattggtctcatgcaccgaagcgcctgcgagcgccgggcagacgtgcagcgtggcatcggccctgccgccggccgcctcataggcgcgcacaatcaggtctccggagccatcgtcggccagctttatccagtccaacaccacggtgccgtttgctgactcgatcgaggcgagcggcgctaagtcgggcatgtcatgaagcgtcggtgcgttgagtgcgcaagcggcgtcaagcgcacggcccaccgtggcgttggccaccacggaccagtcgaactcatgcgcaccgatatcggtgcgcgggtcggggaaggtcggcgcggagagcagcgacagtcggaacatggtgcccgagtcacgaccttcggcggcgttcccggagatcggcgcggcatcggacccgtacaccgatccgttgatgacggccgccgcgtaaccggcgtcgccgataagggcgaagcggttcgtgctgctctcatacttggcttcgtcggatgcggtgtttttgacgattgggcggcggaccagaccatactggcagtcgtatgttgcttggtcggccacgatacccagcggcagatcgactttgaggaagcgttcacgttcgtgccagtcgatatcggcatggaaatcgagcgtgtgtgaaccggggcgcagcgtgatggtggtggtgatgacggtgtcatcgtcggcggtacgcacgcggactcgtgccgcaccgttttcggtatcgaccgattcgattgatccggtcatggcattcgccatgagcagggattcgcgttcgatctcccaggcatcccaaacggcgggttcgtccctcaacagttcgtattggcccaatcgggtgccggccggaaccaattcacggccatgctcctcgtcaagcagtgacgagatcgtaccgtcggcctcgatggtgacggacagtacgccgttggccagcagtacacggccgttgtccaatgtctgggtcagtacggaaagcgcgttggtcggttcgttgatgcggctggcacgccaagacgcgccgtcattacggaactggctgatgcgggcttcggcgagcaggtcggcctgcgggttggccttgcgcagcacggcgcacatgtcttgggcgatttcggcgagacgcttcaggtcgcggcgatagtcctcgcgggcttcgcggtgcacccatgcgatggccgagcc

SEQ ID NO: 2708 - DNA, 3491 bp, Unknown
  R36_18m  MAG No. k141_8678
cgacggcgaaaatcatttctttgaggactgcacgggtgcgctggtcgagccgaccggtcataccgaggtcgataagtacgatctggccgccccggatgaggatattgccgggatgtgggtcggcgtggaagaagccgtcgtcgagaatctgtgtggcgtaattgtcgacgagcttggtgccgatctccttcaagtcataaccggcgtcgatgagctggcccgggtgggagacggagatgccgtcgatgtactccatgaccaccacatgctcggtgcacagttcggcgtacaccgtcgggcagtccatgtatttgaatcgggcggcgaaacgcttgaattcggcgagattgcgggcctcgatcagaaagtcagtctccgattcgaaggtgtcccacagctcctcgaccacgcccttcagatccacgatctgcgaggtgcgaatcaccttagtggcggccttggctatggagcgcatgatggagacgtcctgggccatgatttcgcgcacacccgggcgctgcactttaatggccacatcttcgccggttttcagcgtggcgcgatgcacttgcgccagtgaagcagagcccaacggcttgggatcgatatgcgcgaacacctcgtcggcgggacgcccgtattcggcggcaagcacatccaacaccgtggaatacggcatcgggtcggcgtcggcgcgcagtttggcgagttcgtcgcagaagctttgcggcagaatctcggagcgcatcgacagaatctggcccactttgacgaacgtggggccgagcgcctcgaacatgaggcgcatcttgaccggagtcagaccgtgcagcacgtcgaattgctcgacgattctggtgatctgccccagtcgtttgatcttgccacggcgcgtcagatggtagcgcgtggcgaaatcgttcctgcgtccgaacagtgccagcgtttcgtcggatacgctcggagtcgccttggtaacggcccgcttgagcgtgtccggcgtgtcgacggaccggttcgccgccgcctcacgttcggctttcgcaggcgtcagaatagggtcgaccctgctggaaagcggggtcgactctgattccggcgtagtgcgtgtgggcttggtcactcggccttgccctcgtcagcgggcttgtcggcggcactggtgtcggctgcggcagcagctttgtcgccggcttcggcggcggccttcttggcgtcatccaccgtctcgctcaccttgcgcttgagctcggtgttcagcgccttgccctgctcgaccgtaatctcacccttcttgacgagttcgtcgacgagctcgctgctcttctcatatccggtggcaagggctccgatgcccgccagcaggaccttgcgcaggccatcacccagaagatcaaaatcagccatgatacccctccttcgaggtccgacatggcctggtgccatgtctcgtaccaccaagcctagcgcaaacaacagggcaatgtactagaccctcagactgatttcggctgttttttcgctgattggtacttaccgaggactcaccgagaattcaccgaggacgttcggcggcagccttgcgcgcgttggtggctacttgatcgagccgggcgagctccttggcttgttcgggggtctgatcggacgtatcgaacgtaccgtaacgacgagtcacggcagtttcgataaggaaatcgctgatggcggggtttttaggcagcaacgagccgtgcatgtaggtgccgatcacgttgtgcacgcgcgcgccctcggtatggtcttcgccattgttgcctcggccgtcctgatcgacggtgccgagtggctgaacgccttcgcgcaggaaggtctggccggagtggttctcgtagccaatcacatcgccgaactggtcggaatgctcaacaagattgccgatcatacgcacgttctggcccacggtataagcaccgataacgccgatgccatccagacgggtgccgtccacggtttcaaagtactcgccgaacagctggtacaggccgcagatcatcagcatcggcgtaccgtctgcggcaagcgagcgcagcaggtcggcgcgatggtagaagtcgtcgatgattttcttctggccggtgtcttggccgccgcctcccagaataaggtccacctggtcgggccagtcgtcgccttgattgtactggtggacgaccggttcgtaaccgtacagttccagacggcggcggatagtcagcacgttgccggaatcgccgtagatgttcatgtctttgggatacagggacaccacatcgattgttctggccatgtcgcgttctccttgtcgatgtcttcccgctaaggggaagtcttattcctcaccatgtcctcccgcaggcgagaggtggcgcgcgggcgctagagggtggttacttgcccacgcccgcatcccgtacttcggtgatgcggcccagtacggcacgggttttgagcatggcggtgtaggtgcagtagatgtgcttgcgtgtgccgggattggcgttgacgaatgcggtgacagcctgttcgaggtcggtgttcgtatcggcgactggcacttggtcataccccaagcgcagtgccatgtcccaggcgcgcacgccggagaccatggcgacaccggacgcgcgcaaagaggtgaagtccacgtcccatagccagctcatgtcgcggccgtcggcatattcgtcgttgatggcgatcatggtgtccgcgttggccgggtcgaagctggcgagcgagaggcggaagcccatcgggttcttgaccagcagcagttcgaccggggaaccgttgacgtcgatgacctcgccacggccgaaagccggcgtgacgcgggaaacggcggcgatgagctcgtcggcggacacggcgcaggcgttggctgcggcagtggccttggatgcggcggcattgtcttgcatcaccgcacgtaccacggcgagcgcggcggccgcgttgtacaggttgtagacgccttcaagtttgacgtcggtggcgtagtcctggctgtccatctggaaggtggccttgtggtcgcccacggcggtaagtgtcacgtcggcggggagttctgccgtgcctgcggaagctcccctctccgaggggagctgtccgcgaagcggactgaggggagtactgactgaagggagcggcccggccataccttccaccgacacggtcgtggccatgtcgtcatcggacgggaaatagtggcgcaaatcgtcggcgaggccgaagtatcgcactgtggtgccagccggggccttcgcggcgagcgcggcgatacgcgggtcctcgcggttcagtaccacagtgccggtagtcgccgcagccacatggctgagcagtttggccgtggtgtcgatttcaccgaatcggtcaagctgatcgcgcatcacgttcagcagcaacgcataacggggcttgacctgcttgacgaagtggacggcgtacgcctcatcgagctcgag

SEQ ID NO: 2709 - DNA, 12172 bp, Unknown
  R36_18m  MAG No. k141_8683
aactcgtccggaatctcatagccggcgtacttcacatcaacgtccacttctcggcgggaaggcttgctcagcaaagcgaagacctccacggaagcggcaccacgacgtttcagttctgcgaccagccacgcgagcgtgcgtcctgaatcaacaatatcctccacaatcaaaatgtgccgtccgcgaacatcggcggacaaatcctgcctgactgtgacctcaccgctcgacactgtgcccgagccatagcttgaaaggctcatgaagtcgatctgcacaggaatgctcatggcctgggtgaacgcgaccagcgtattcacggcccctttcagcaccgcaacgagcagcggattcttatcgcggtaatcctcgctcgcgagagcggccatctcgtggatcttggcatcgatctgttctttgctgaccagctcgtggtcaatatcttcctcaacgtcagcgattcgcatgcgctccatcttggcacacgcgaatgacgtgtttcttgcgattggctgaataacctctgggaagtgagacgccgccttggccatgccaatcgacgaccagccggtcgatggcggcaatctgggcggcactggcgttcacaccggcctggctcagcgcgtgagcgatgacccgcaaccgaatcgcctctggctcacgtgcaatacgtttgacgccgatcatcaggccgatgccatggcccgaatcgttggtatcgtctgcagcacaggctcgtggcgtatcggtcgataccgctgccgacgatgccggccaatcaactgtcgtaaccgcctcccccatcacctcgtcggatcgctgatccagatactccttgtccattctggccaactgtgcgctttcggcgaaatggcgggtgacattgaatccagcgaatcgttcgatggccggcagcaggtcgtggcgtacccgcgagcgcaacggatagtcgtccggcaactcgccgtctaccgcatcgccattggtggggtcatcccaatattccacacccaagtcttcacagaggccggtggtttcgtctcgagtaagggtcagcagcggccgcgcaaaagtcacgccactgcgtgtgaagacctgcggcatgccggccaacgcatccacgccacggctgcgcagcagtccgatcaatacggtttccgcctgatcgtccatagtgtgggccaacagcacggcaatggcacctgattcacgcgccgcggcgcacagctcgttgtaccgggcctgccgtgcggccgcttcgaggccctcaccgcgtgcctgcacggttgtgttgcgcacgatgaccgggcccagtcccaacgcacggcaacgatccgcggcctcgccggcgacctgttcggaaccctcctgcaagccgtgatccacaatcacgacaccgcaacgcacgcccatggacgtgcatacgatatggcttaccgcggccagcgccatcgaatcgcgcccgcctgaacaggccacgagcacgagtggtgcatcggaggcaacggcatggtccccatgctgcgcgaattcgggagcctgcacatcgcatagttccacggcgctcagcgttgttcggaccgcgcctacggccttgcgcaatcgtgcggaatatgccatgtactcaccacccttttctggttataggcactcgtgcgtttatggacgtttacggcctttgtagcccttgatggcccttgatgcctcttttacagccccgcgagcttggtgatgaacgagtcgatggcgctacgcgcggcggcataatcctcaggattgttgaccaccacggcaaacgacaacgctcccccattggtacgggacacattgccggccatcgacgtgaccgtgccgaggctgccggttttgacgcgcagcagaccggccacggcatcatccgtataccgatcctgcgccgtgcccaccaaccccgcgatggatagaccttccgcaccagcagcaccgctctcggtggtcagattacgttgttggacggccgccagcgtgcgtacggtgagccgggagccgggagacaggccggagcaatcggccatggtcagaccggatgtatcgagaccgagatcgttcagagtggatttgaccgcttccgtgccgccttcaggactgtttgtcgctgatttcgccaaagcggtgagtctgccgaactcctcggccagcgtattgtccgaatgtcgcaacgtgtatgccatgatttcggacagtgttgccgaactcaccgaggccaaaggcgtttcgccggatggagcggtgtttgccgtcacgtctccggtaacggccacaccgttcgattggagcagttcggcgaatttcgtggccacgtcgctggcggtgtgctgggacagttccgggtatccggccgaatcatcagggtcggccggcgcaggcgtatcggcggtgtattggcggcctccatcaatcgccattgatgagaccggcgtgaagtagacggtgtagtcgcttaagaccgcgccgccttccgacagacctgcgggaatgcgtgagtcgccgaatagggtgtcgtcgtactcgagattgacggaagtgatgcctcgctgggcgagcgcggccacggtggccttggccaaggtgttcagaccggcacgtccgttggtatggttggcgtcggaatcgcctgcagacagcagcatgtcgccattgcctttgagggtcaacgtattggtgccgtcatcggattgggtgaggaacacttgggtatccaaggtggatgccatattcagggtggatgaggcggcgagcgcggtcagcgttttcagtgtggatgcaggctcgcgtggagtgttcgactcgtgttcggcggcgacggtgccttgggcgtcttcaatgatcaccgacgtatcgtttcccacgccttgcgcggacagcaattcgttgaccagtgcagaagcggccgtggaatcaatggccttgttcgcgttcagggcaccggcgatggtgccgcctgatttggcggtggccggattggcgaaaacaggtgcggtgacaggttttaacgtcaacaatccgggggccacgtcggtgatgtcggcggcgcagtaccccgcgaacagggcgatggtggtcagtgcggaaatgatgacggtcagtgttcggcgatgcgatcgttgggtccgccgttgcgcttcacgtcgctgacggcgtgataccgctgtagataccatcgtgctccttatgccaaggcaatcatttctgcaatgaggcgaacgagtcgagtgttgccacaatcgagagcattcgcgcatccatcagcttaccgcccagccatgtcccgagtgccagaatgccgatgccattggccagcgcgaccggaataatcgccagccacatgccgccttcggctcctgtcagcagcatgaccagcgccacgatgccagtgggcagcatgagcagcaggctgccaagcatgtagacgaacgggaagaaaccttgggccatggcgcggccttgaggcacggagaacggcttgtccattgaggcgaccgggtacatcagtacacaggaggtgacttcggccacgcccagtccgctcaaggcgatgcccatgcccgtggcgaggaagatcaggccggcagcgaggtcatcgggctgcgcccagcgtccggtcagtgcgccgaccagcacgatgccggcgagatagagcagcaccatgtagacgaccatgatgccgacgtagacgcgtacgcggccgattctgtcggtccggccacgcacgccggcgatgacttccatggtgaagccgcggccgtcatatgcgagcccgttgctttccacgaccgacatgaaccagccgcaccagatcagcgactgccagacgaccgcgctgatgccgtgtgcctggaaggcgaagatgatcaggaacaggaccggcatggcgaaggtcatggcttgacgggggtctcgtttgagataggtgatcaggcgtgcggaaaccgcgccggatgccgaatcgggcatccatgcgaatgcgccgatgcctttggcggtctcggacggactgtttgcgccgatggtgagccgttcatgtctcagacaccaggtgcagacggcgaagcagacaatccatgtgacggcaaggatggcgatgcgggcgagcagcaccgcccaggctccggtaagcgcgtcgaacggtagttggaaggccgcgccgaacggcgtccatgcgacgatggtggtcgccgcgccccaggtttcggtgttgaggctgaaggccacgccggagttgaccagaatgttcggcaactgacagatgataacgaacgtcagcacgatgaagatatagaacgcgcctttgccgcgtttgctggtcaccagcgtggtggatagggcgatgagcagtttggagatgctcatcatggtgatgacggccagcactgcggcgaggagggaactgatgattacggctggtcccatatgccgataggccagtgtccagagcatcagtgaggccacgccggtaagggcggggatgccggacaggccggaaagcagcaagccgaattgcaggttgcggtcggcgatgccgtagagcgcgaatttgcgtgggttcatggtggagccttcgccaagcatcatgagctggatgaagccgatgaagatggtcatggtcgcgccgaccagcacgacgactatgttgacgatgcctccggaaccaaggatgttcagcggaaagccatccgcgttcacggtgaagggcggcagtatgccgatgaaccatgcgagcacgccggtgccgatgatggtgccggccgcgagtacggcggaaaagacataggcgacggtctgccacgccgattttcgcagggtggcgagcgtgagcgtccagcgcaggcggaccagggtgatggcgctgctgatcatcggcgggcctcatcggtgggtatggcgggcgtggcggttgtaagcggaatgggctggaccggctggaccgaagttggtgcttgggcttgggcttgcccgccgtcgagccatgcgagatgggcggcttcgtggcggccgccgaccagttgcaggaagcggtcttcgagttcttcgccggcggcgacctcgtccaccgtgccggccgcgcacaccagaccgttgttgattacggccacatgcgtgcacatcttttcgaccaatgccatcacgtgcgaagagataatcaccgtgccgccggtcttcgcgtattcgatgaggatgtctttgaggttggcgctggacaccgggtccacggattcaaacggctcgtccaggaccagaatgcgcgggctatgaatcatcgcggaggccaggcagatcttcttggtcatgccggccgaataatcggtgaccatcgtgttggcggccccggccaagtcgaaagcattgagcaggtcctgggcgcgacgcgtggtctcatcgcggctcatgccgcgcagcatgccggagtagacgagcaattgcaaaccggtcagtcggtcgaggatctggtcgggctggggcatgacgccgatcatgcgcttggccgtgttcacgtcgctccacacgtcatggcccaaaatcatggcggtgccggcgtccggtaccaatagaccggtcaccatattgagcgtggtggttttgccggcgccgttggggcctacaagtccatagaacgagccgaccggaatatcgagcgcgagtccgttgacggcgatcttccggtcgaagtgcttgaacaggccacgaatggacaccgccgcattcggattcggcggccatgcttgtggctgcggttgcgacggccgtgcaggcgcgggggcggcagctggcatcatcggcggctgaaatccgacattcctttgagtattgtctaagctcatacatccactctaccccaccagccaaccctcagcgaagcaaacccccgggttgctgttggattgccccgctgagcagctccaactagcggactcggtcaacccttatgcgcgatgggcttccactgggctttggagaagagggcctggaaggagatcggcacgtagctgagaatgtaaatcgggaagctgagcacataggcgagcagctccttgttcgtggcaccgatctggtcgcgctcgacaatgatggtcaatgcagccaatgccatcaggcccaacaccgatatgatgatgccactggaccaactggccagcgattgcagctggctcggccaactcacgaagccacacgcggcgaacagcaagcccattaccgcgcgaatcacgcccaacacggtaaacggacacagcatcaaggtgaagtcgatgcaggagaaatcacgttcgcgaaccgcgcgtttcagcaatgccgagccataataacggaatacctgcaggaatcccttgctccaacgcaaacgctgacgccaactttgcgagaaggtaaccggctgctcgtcgtagagaatcgcagtaccgcaatagccgatgcggtcgccatgcagaatcgaatccatagtgaattcaagatcttcagtgagcagatggaacttccatcccttgttccgcttcatcacctcgcgggagaacatgaatcccgtaccgcccacatggcaagaggaaccgagaatcatacgcgagttagacaggaatcgcgattcacggatgaaccacagcgcagaaccagaagacacccagttatccgccagattcaccgaattacggtagctggtcagaatcttgaatccggagcagaacgccttgttcatttcctcgaagtagtgcttgtccagcttgttatcggcatcgaacacgaagtaggcctcataatcatcggccacaccgatgtcgagcatatgccccaacagatacgtcagcgcatatcccttgccaaccagctcaagattgtggcgttccaccacatggcagcccaaagaccgcaccacgtcggcggtgttgtcggtgcagttgtcggccaccagccagatgtcgatgaggttggacgggtaggtctgatcgcgaatcgacccaataaggttgccgatcactttttcttcgttgcgcgcggagatcagcacggcataccggttggtcatcggggcgtcggggaagcgcacgggcttggcgaacagggacatcacgatgcacagtccctgatatatcatgccggcaccgccgacgatcatcagaagaatatcgagtacggaaagcagagtcatcagcgccaccctgccctaggattgctggaggcagattgatcagactgcttggtttgcttgcgttgctcgggctgctcaggctgttcggcggaccgctcaggctgctcgggccgctcagactgctgcgtatccgcggcaccacgctgcggaatcgccgccgtatccggctcatcaaagcttgcatccgcaccgactgtattatcggcgttatcggtatcatcggcatccgactccggctcagtgccgtgtaatcccttgcgagcgctggaggatagcacgttcttcggaatcgccacggtggcggaatcgtccaaatcggattctttcgtctcgtgcgacggaatcgcatagatctgttcctgcagcaaacgcagttcctcattcatcggcacgcggttggtggatcccctggccgcacgcggcatgtgctcgccgattggctgcaatacgtgctcgccgaacgcctcggacgcctcgacgatcttggacttcttctccggagtcggatcgttcatcagcggtgagtcaatcagctcatagcgcttggtgtacgcacggaagatggcctgcagcgatgcggtgaccggcagcgccaggaacgcgccgaatgcgccgaacagcgagccgaacgccagcaccgagaggaaggcgacggccgcgttgatatccatcgtgcgctgcgaaatcctcggcgagagaatcaggttctcgatctgctggtagacgatgatgaacaccagcaccgccacggcgtacgtccacccgcggttgccccaagcgaacagcaccggcagcgcaccgccgatataggtgccgaccgtggggatgaactgggataccacgccgcagaacagggccaacggcagccagtagggcacatgcaggatctccaagaagatggcggtgcaggtggcgttgatcagcgccagaatcgaacgggagaacaggaaggacgaaatctggccttgggccacggtccacaccagcaggaatcgacgctgcgtgttgggggccagccactggcagaaggagcggcgcagctttgggccggcggcggagatgtaatacgtggtcatgaccacggtcatgaggttcagcaggaaggagaacaggccacccaccgtactcatggcggtgccggcgaaatcggtgacccacgaggtctggatattgttgaagatttccatgccaagattgctgatttccggcatcttgaacgtggcgtgctggtccacgaactcacgaatctgcccatacattgccggcaaaccgcggaccatggcaatcatctgctgtacaaacatattgccgaacagcgtgagcagcacacccacgaccacggccacgcccaccagactgacggcggaagccacgccacgcttccagccatgagccaccagcgccaccactagcggttcgacggccagcgccaggaacagcgagatgatgatgtcgaacaccagataggagatgtcgccccacgagcgccagcagaacatgaatacgatgacggcgagggccacatacagcagcgcgcggccgaaccattccggtggcctgcgggaatctcccttggcggggaacaaagtaccaaagtcgatacgattctcgtcgtccgggtctgccccggcttttgcggcaccgcttctcgacgtgtcggtgctgtttatgtttcgcgcgcgttcgctcatggctccccattgtagcgaggggtttgaagctcggatacgccggcggcgtacacccgcttttctattgttgatgttatgctcaacgtttcgatcatcatcccagcgtggaacgaagccgaacgcatccgcgactgtctgctgaacgccactcgccagaccatcatgccgcatgaggtgctggtggtggacaatcgttctacggacaacacctgcgcgattgtcgaacagttcatcgccgaacatcccgagaccccggtcaaactgttgcaccagaacgatgaacaggggctgattcccacccgcaactttggcctgaacgccgcgaccggcgatgtgctgggccgttttgacgccgactgtatgatccggcctgactgggtggaggtggtctccggcatcttcaccgaagacccggccgcgatgggtgccactggtccggtgatgtattacgacatgccctcacgtcatttcgggttgaaaggcgacaattccttacgcaagcgaatctaccgtgccgatggcggccagccgctgctgttcggctcgaatatggccttgcgcgcttcggcctggcatcagatcgcgaatgaggtctgccgagataaggccgatgtgatgcacgaggatatcgatatttccctgcatctgatgggcaagaatctgaaaaccgtgtactcgccgcgcatgatcgccgcgatgagcgcgcgacggatggacacgtcgctgagttcattcctgaactacatgcgacgttttaagaatacgtttgatgcgcatccgcaacatacgcgcacgcataagccggaggtgttgttcaccgccatgtatccggcgatgcatatgttctacccggtgtggcagaaagtgctgaattccgcggatatcaatccggctgaagccgcgtggatcaacgagcagatggaactggcggaggcgcaaggcaagcagctgtacgacgagacccccaccgacgaagtctacgacgaaaagcacgaaaagtagctggatatacgagccccctctgcttatgcaagctccctctgatgagggagctgtcgaacgaagtgagactgagggagagactgcgacgcagccgctaaaacattgaatcggccgcaggccgatacctattattcagcggctacgccgcaacttctctcccagtcagctacgctgacagctccctcatcagagggagctaatgtttaccgtcatcgactgatcacatcagcgacttgtaaatcgcgagaatgtcctcttcggtggcctgacgcgggttgccgggggtgcacacgtcgttgaaggcgtcgtgggccagcggttccagatcagcctcggtggcgccgacctcgctgatcgtggtcgggttcttcagatccacggtcagcttgtggacggcctgcacggcctcttcgcgcaccttctccagatcgccggtgtaggcgtcctcgacgccgaacgcgtcggcgatgtcgcggtacttctcgcccgtgtagtccttgttgtattccatgaccggggccagcagaataccgttggccacaccgtgggccacgcccagacggccgcccagcgggtgagccatgccgtgcaccaggccgaggcccacgttggagtaggccataccggtgatgtaggaggcgtacgccatctgctcgccagccggaatgtcgccgtcggcggacttggctaggttcttggcaatcatgcgaatagtctgcatggacaggcagtcggacaggctccaggcacccggggtaatgtaaccctcgatggcgtgggtcagggcgtcaagtccggtggcaaccttcaggccgcgcggcatggagtcggtcagatccgggtccacgaaggcgacgatcgggatatcgtgcgggtcgacagccacgaacttacgcttgttggcggtatcggtgaccacgtagttgatggtcgtctcggaagcggtaccggcggtggtcggcacgccgaagatcgggacggacgggttcttggtatccgcgacgccttccagggacagcacgtcggcgaactccgggttggcggtgatgatgccgatgcccttgcaggtgtcttgcggggagccgccgcccaggccaatcaggaagtccgcaccggactcggcgaacttggcgacgccgtccttgatgcactctaccggcgggttcggcttgacgttggagaacacctcgtacggcaggccggcctcatccagaaccttggtgaccttctcggcggtgccggtctccagcagtaccggatcagtgacgataaatgccttggtgaagccgtgctgcttggcgacggccgggatttccttgatcgcgccacgtccgaagtatgcagtctggttgaaaatcatgcggtataccatagggactctccttttgagctagtgtcttaactggtggtccactcactctttgagtggtccaacggttccccagtctactccgcgcatgagcattcacctgaaaacacgctgaaagaacaacactgaaaataatggcaagaaatggcggaattccgcacttgtcgaattattgtccattgaccaaaccagttcaatcgcccgagatctcaacgataagaccattttccggagtcgcttggtgctctccgagaaactcgtctctcatccgcttacttcgcgcgtacacaatcaatatgcgagatgcctaattccattcgtgtttcatcagccgaacgcgaactggttcaccagatggtgtattcaacggtttcagtctcttgaagaggactaagatacctcgacaattggggtgatcatcataagagaatgaggcagataatggcaaatggcaaggctatgacggtcggcgagatggcgtccctgtttctcgaccccgacactcccgttcgtatcgacgcttttgacggctcgcatttcggcccggcagacgcggatttgaaggtcaaaatcgccgcgccgaactgcatgtaccagctgctcgcgcacccgaatgaaatcggcatcgtgcgcgcatacattctgggcgatttcgacgtggacgacattgactacgccgacccgtatccggcgatgcgcaagctggtgtcgctggccaaatacgttcgcccgctcactcccgcatccattgcccgcgtatccgccggcattctgagtcacggcttcaagaagccgccggtgcccgccaccgagggcccaagcaagttcgcccgcatcaagcgtggcctgatgccgcacaccgaaaaggccgattcggaaaccgtcagcttccactacgacatgtccaacgagttctacgccgacttcctcggc

SEQ ID NO: 2710 - DNA, 18683 bp, Unknown
  R36_18m  MAG No. k141_8885
aactggcaatcattgactataaagaagtagtacaaacacgctcttgagttctcaaaccaccaccacaccagcaagacaggaaaccaaccagaagaaggaacccgccgcgctgagcggcaacaggtgaataacttacacgcatgtttggattcgcgcaaatcaaggcgcgcaaaagcctcaggaatcgttgcaatcacacggttccttcggcgtgtcgcaaacagcctatttgcgctgttctgataccagaataatccgttttgcattgccgatgcgtaacaaattcatgcgttcaccggcgtgttgcaagaattcgattgcgtgtgaccatccaggttcaccttctcgcaaccggtcatcgcatatgcaaaaagggacttccctttacgggaagtccctttcagtagctattgaagctcgctagcctcaggccaaggtgttcgggtcaaccggaacgcccgggttcatcgtggaggtgatggtcgccttggtcaggtaacggcccttcacggtggacggcttcagacgcttgacttcgtcggccacagccttgaagttctcgtccagagcggactcatcgaagctcatcttaccgatgaggaagctcaggttgccgttcttgtcgacacggaactcgatcttgccgcccttgatgtccttgacagccttggtgacatccatggtcacggtgccggtcttggggttcggcatcaggccacgcggaccgagcacacggcccagacggccgaccttgcccatcatgtccggagtagcaaccacggcgtcgaagtcgaggaagccgccctgaacctttgcgatcaggtcgtcatcaccgacgatgtcggcgccagcctcggtggcctcggtggccttcgggccacgggcgaacacgaggaccttggcggtcttaccagtgccgtgaggcaggttgacggtaccgcgcacgagctggtcggccttacgcgggtcgacgctcagacggaacacggcctcgacggtctggtcgaagttgtaggcaggcatgctcttgagcagagcgatggcctcgttggcggtgtagaggttgttgcgatcgacgcgctcagcggcttcgcggtacttcttggaacgctttaccatctgtccttctccttatcagtccgtaaccgtgatgcccatcgagcgagcggtgccctcgatgatcttcatgccggcctcgatatcgcgagcagacagatcttccatcttggtctcagcgatttcgcgaacctgcgccttggtgacagagccgaccttgtgggtcagcgggttctcggtacccttctcaatgccagcagccttcttcagcagagctgcagccggcggggtcttgagaacgaaggtgaaggaacgatcttcgtaaacggtgatctcgacagggatgacctgacccatcttgtcctgcgtctgggcattgtatgccttgcagaagtccatgatgttcacgccatgcgaacccagagccgggcccagcggcggggccgggttggccttgccagcctggatctggagcttgatcagcgccgagactttcttcttgggagccatattatggttcttctttctataacgcggttcgaatggtcgccgtcctcagatccgcttgcctgctatcacgctcggtcttgactcgttatttatccgtgcatgctgtaggcaatcggcctgtggtcggtctcctcccgcaacttatattgctgtgctgtgctagcgggtcttccctccagacacaagctttcccattatgcaaatccacccggacaacgcaaaaagcccgaccacgatggtcgggctctgcaaagtttggggttaatccagcttctgaacctggtggaagccaagctccaccggcgtatcacggccgaagatggacacgagcacggtgagcttttgggtggtgggctccacgtcggaaacaacggcggccatggtggcgaaaggtccatcggtgacggtgacctgatcaccaacggcgtaggagacttcgaccttgcgcttcttggcggcggcgggcttgtcgccagcggccttgagtgcctcggaagcgatcatcggagccatcattgccacgacttccttgcgggagagcggggctggatccttggtcgggccgacgaagccggtcacgccttcggtttcgcgaacgatacggcgagcgttctcatccggccacatacgaatcagcacatagccaggaacacgtacgcgggtgatgatcttcttacccttttcggtgtgcttctcgacttcttccatcggcacctcgacctggaagatctgatcttccatgccgaaggaggcgacgcgggactcgatgttggtcttcacgcgcttctcatagccagagtaggtgtgcagcacataccacttgccatcaagggaacgcagggacttggagaattcgtcaacggcctgctgaccggcatcggtttcctcggcctgctcggattcgttgacttcttcctcgtcctcatccagagaaacggtctcggtctgagtggaagcaacgggagcggattcagtcgcggccggagcggcggactcaacatctgcattgtcgacggatgcgtcagattctgcggaaaggtcagcaaccggttcagccggggcagctgcctcatcggcagcagcttcggaagcctcgacaacaggctcctcagccggcacggcgtcgagattctcgagattcagttcatcactcatgcgttgttattcaccttaggttgtgcggatcagccgaacacccacagcacgagcttgcccagaccgaagtccatgcccgtgacgagggccatcagcagcagcacgaagataaacacagccagagaccagaagaacagttccttggcagtaggggttacgaccttgcgaagctcgtcgatgatctgcttgataaacagaccgatacgcatgaagacattcggcttgactaccttttcgctgttgttcgtcttagccattctgtacctcgcgtcagctgcttgattattgaaaacttggcagggaaggcgggactcgaacccacaacctacggttttggagaccgttgcgctaccaattgcgccacttccctaggtgaaaatccacctcggcgtgcattccgtagagaacgcttcgccacggcgaaaccgccaagttgttatagtaacggctccggtggattatcgcaaatcgcgtgtcgcgcgcgtggcatgtgcgcggcacacgactcttctcagttagcccattccttgaatcgacgcatgccttcggctaggtcttcgtcggccagtgcgtaggagaaacgcaggtaaccgggagcaccgaaggcctcaccagggacggcggccacgtgggcctcatccaacagtgcggcggcaaaatcagcggacgtatcggacacagtgccgttgggccccagcggcttgccaagcaaagcggtgatgtccgcaaaagcgtagaacgcaccggtcggagtcgggcagttgacgccctcaatatcgttcagagcagccacgatcgcgcggcgacgtgcatcgaacgccttgcgcatctcatgcacctcgtccagcgggccagccacggcggccagagccgcacgctgggagatgttggccacattggaggtcatatgcccctgcagcttggtggcggccttggccacctcaagcggcgcgaccatccagcccacgcgccagccaggcatcgcataggtcttggccacgccgttcagcaccagcagctgcccgcggcattccggcacggcggcaccaatgtaggtggtgcgcgcgtcgtcgtagttcaggtgctcgtagatctcgtcggagataacccagatgtggtgctcgacggcccaacgaccgatcgcttccacggtttccggcttccagacggctccggtcgggttgttcggggagttgacgatgattgccttcgtacgctcggtgcgggccgcttccagcgcctcaagcgagggctcgaagttcacgtcggcaccggcgaatacttcgaccggcacgccacccgccaatttgacggcttcaggatagctggtccagtacggagcggggatgatgacctcatcgccatcgttgagcaagatctggaaggattcatacacggcctgcttgccaccgttggtcaccacaacctggtcggcggacacctcgtagccggaatcgcgcagcaccttagccgcaatcgcttcgcgcagctcgggcaggcccggcgtaggcgtgtacttgtaattctttgggtcaaggcaggcatctgccgcagccttgaccacgtttgcgggggtcgggaaattcggttcacctgcgccgaagccgataacgtcaagtccggcggccttcatggccttggccttggaatcgacggcgagcgtagcgctcggtgccacagtgttgatacggtcggaaagagtctgccattgcgccatagtcatggcttccatgctaaacctacagcacgaaaaatcgccagagccgcactatggtgatgggatctgtcgtgtgacagatcccatcagtcacacaagtacaagattgtcgcgatgaaccagtgggtgggcgtactgggggccgaggaaacgcttgagttgggcggtgttacgcccgagcatctgcggaatttcttcggaatcgaagccggcgaggcctcgggccaggtgttcgccgctttcggcatcgatccagaccggatcgccggcggaaaaatcgccatgcacttcgagcgcgccggccgccagcagcgaggcacgcccgccgcgaatcgcctggccggcacccgcatcgaccacaatagtgccgcgcgggtcggcggcgaagccaatccacagacgacgcgacgaaccgcgggccttaaccggtgcgaacacggtgcccaccggatcgcccatcatcgcagggcccgcgttcgaggcgcaagtgagcaccgtggggatgccggagacggccgccacgcgcgcggcctcaagcttggtgaccatgccaccggtgccgaccttggagccggagccggaaacctggatgtcgcccaatgcatcgataacgttgggcacatattccacacggcgggagccgggctgggaaggcggtgccgtgtatagcgcgtccacgtcggtaagcaataccaaagcttccgcgcgaactaggttcgcaaccaatgcggacagacggtcgttatcgccgaatcgaatctcgttggacgccagcgaatcgttttcgttgataatggggaccacaccaaggtccagcaatcggtccagcgtgcgttccacattgcggtactgggtggcacgaatcgtatcttcggcagtgatcagaatctggccgacgcgaataccgaaacggccaaaagcagtctcgtagcgagccataagcaaaccttggccgaccgctgcggtggcctgctgagtagccacgtcggccgggcgttcgtcaaagcccagcgggccgaagccggccgcaatagcaccagaggaaaccagtactacacgcccgcccatcagtcgtatttgggcaagggcggcggccagagcgtcgagcttgcctggatcgaggtgaccgctcggctgcgtcagcgaactggaaccgaccttaacgacgatggttccagcggatgcgacggctcgccgcacctcggcctgacttggagtgctcatttattcctcggtttcaccatcttcgctggactcaccgtggccgaacagactggtttcgtcatggcgatcgtcgtcaacggtcgggtcggcccagtggccggccttgcgttcggccatcatcgcatcgcgcacggcggcacgggcgtccatcatctcgtggtattgggcacgacgttcggcgttggagcggcggtgcgtgcgcgggtccagctcttcgagacgcagatccttgcctcgggcaccgaggttggagccgtcgagcatttcggcaccggcggagatggtcggatcccaatcgaattcgaccatacgggcaccgcgaccgatgcgcacctcgtcaccagggtgggcacccttgcggcgcagctcgtcttccacgcccagcttggccaagcggtcggccagatagcccacggcctcgtcgttgtcgaagttggtctgcatgacccagcgctccggcttgacgccacgcacctcgaagaacacttcgccattgccgagttcgcggcgctcgaccgtgaactcaagcgcactgccgccctcgtcagcgcgacgcggacggcggcccttggtctccaatggcttgatgaccacgcgcgtctcctcttcggcctgctcgcggttggccacttcctcacgcatctcatgcaccagcgcagacaacgcgaagttgagctccttcagcccctcatgagaggcggtggagatctcaaagaccttcagcccgagtttctcgaactccggacgcacgaactcggccaattccttggcctcgggcacatcgatcttgttcagaatcacgatgcgcgggcgttcgggaatcgggatggcgcccaatggcagttcgagcttgtcggcgtagagtgccaactcgttttccagcgcgtggtagtcggacatcgggtcgcggtccggttcaagcgtggcgcaatcgatcacatgggcgatgatttcggtacgttcgatgtggcgcaggaactccagtcccaggcccttgccttcggaggcgcccggaatcaggcccggcacgtcggcgatggtgtatcgagagtcgccggcgatgacgacgccgagattcggcaccagcgtggtgaatgggtagtcggcgatcttcggcttggcggaactcatcgccgcaatcagggacgactttccggccgaggggaaaccgaccaacgccacgtcggcgatggacttcagttccagaatcacgtcgcgttcctcgccgagttcgccgagcagggcgaagccgggggcgcgtcgggtcttgttggccagggcgatgttgccgaggccgccggcaccgccctgggcgacgacgcagcggtcgccctcgtgacgcaagtcggcgagctgtgcgccgggatgcttggatttgccctgttcgccgcgcgcctcaaagacgacggtgccgcagggcacgggcagaatcaggtcctcgcccttggagccgtccttattgtcgcccaaacccatggtgccgctgccggcgacacgatgcggcatgaaacgatagtcgagcaggctggtggcgttacggtcggccacgaacaccacggaaccaccgtcgccgccattgccgccgttcggaccggccaacggcttgtatttctcacgacggatgccggccgaaccgttgcccccatcgccgcccttgacatggacggttactcgatccacaaaatcactcatattgattaccttacaaaaaagccgcgtccttacgggcgcggcttgaaaaagcttgacgctatatcgctcaggcgatgacgtcgacaaccttgcggtcgcgacgcacaccgaacttcacggagccatcggtgagggcgaacagcgtgtggtccttgcccatgccgacgttgtggcccgggtggaagttggtgccacgctggcgaacgatgatgttgccggccacgacggcttcgccgccgaacttcttcacgccgaggtattgcgggttagaatcgcgaccgttgcgagagctggacgcacccttcttatgtgccatgattcatggtcctttctataactcaggcaatcgccgtgatcttgacgatagtcagcttctggcgatgacccttacggcgagcaacaccagtcttgttcttgtacttctggatgtcaatcttcgggcccttggcttcatcgttcacaacctcagccttgacggacaccttggccagatcggcggcggcgagggtgaccttgtcaccatcgacaacgagggagaccgggaattccacggtatcgcccttcttggcgtcgagacggttcacgaggatgacgtcgccaacctcgaccttttcctgatggccaccggccttcacaatcgcgtacattatcgttccttttatgttttggaaagctaccttgcctaacacgcaccgagcctgcggtcagacaccgagtttcaaatctacaccaccatgcggactaaatcaaatgatttttgcccgcgtgtcaagcacgacacacctgttactcttccgccgtgttgttggcagcgacggcagcggcggcaatctgagccagtttggctttgacgtcggcgctggaaccagccggttcgggagcgggagcggtgccgcgaccgtgcttgttggttttgacgaacgggtcaccaccgcgaagcgcgtagggatcgtcgtagtcggccgaaacggtcggctgatcatgcaggatgaaaccacggcccttgcaggtcgggcattcctcggagaacgcctcgaccagaccctggccgatgcgcttgcgggtcatctgcaccaaaccgagcgaggtgacttcggccacctgatgcttggtgcggtcgcgtgccaggcattcgaccaagcggcgcagcaccagatcgcggttggcgggcatgaccatatccacatagtcgatcatcaccatgccgccgatatcgcgcaggcgcagctggcgggcgatctcttcagacgcctccaagttgcagcgcgtcaccgtttcttccaaggacttgcccttgccgataaagcggccggtgttcacgtcgatggtggtcatggcttcggtgcgatcgatgacaatcgagccgccggacggcaggtagacctgacgttccatgcccttacgcagctgggagtcgatggaccatttgtcgaacacgtccttgccttcgtgctcggccgggtcccacttctccagcttgtccttcaggtcgggggccatggtgtcaaggtattcctcgatacggtcgtagaccttgtcaccttccacgatgagcttgctaaagtcgtcgttgaagatgtcgcgcaccacgcggatggccacgtcgggctcgccctgcaggagtttcgggcgcttgccgtgccagaattcctcgcgcttggcgttgatgcgctcccactggcggaccagtgattcgagatccttgacgatggcgtcttcggatgcgccttcggccgcggtgcggataatcacgcccatgtctttcggggcgatcttggagacgatgttcttcagacggctgcgttcgcgctccgaaagcttgcggctcacgccggtcatgccaccggagggcacgagcaccaggaatcggccggcaagcgtgacctgagaggtcaggcgggcacccttgtggccgatcgggtccttagtgacctgcacgagcaccgggtcgccggacttgaacgccagctcgatgcggcgcggctgaccttcgagacgagcggcatcccagttgacctcgccggcgtagagcacaccgttgcgggactggccgatatccacgaatgcggcctccatgctgggcagcacgttctgcacgcggccaagatagatgttgccgacggtctgtacttcctgaatgtcggagacgtaatgctcgaccagaacattgtcttccaccacggaaatctgggtgtggtgttccttctcgcgcaccaccatcaggcggtccacgttctcgcggcgtgcaaggaagtcctgttccataagctggctctggcggctgcgctcacggcggttgtcacggcggcgctgcttcttggcctcgagacgagtggagccttccacatcggtgatttcgtcgatgtactgctgcttgcgggagcggcggaccagcggctgttcgctgttctgactctggtcgtcggtgccctcgccgttcttgccgccacgacggcggcggcgacggcgagtgacggtctgctcctcatcgtcctcatcgcgatcacggtcatgatcatcgcgatcgtcacgacggcgggaacgcgtatcctcggcatcgttctcggcggtatcgtgctcgccgttggcaccggtttcgccgcgtgagccacgacggcggcgacggcgcgaacgggtgcgggtgacgtcggattcctcgtcgccctcctcctcggcaatcggcgagtaggcgatatcgtccagctcgaggtcttcctcaatctgctcgacttcggcggctgcacggcgctcctgggcgttcagacggcgggagcggcgcgaacggcgggagtccgaggtgtcgtcggcgtcgaaatcgtcgtgatcggcgttggtatcgccggacgcggcgtcacgggaagcgtcacggtcggcggaggcgcggccgcggtcgtcgcgatcgtcgcggcgacggctgcgcggctgggcatcgtcatcgtcgtggctgcgcgagcggcgggagcgacgagacgggcgttcgtcggcgtcaacatcgtcatcacgagtgtcagcggtatcgtgcgcatccacggcggcgggcagcaccggttcctggaacagcagggacgtcatcggcttgccacggcgcacggtctcgtggccagagggcagggattcgaccgcgtcgaacaggcgctcatccggggtgtcctcgtgcgtatccgcaactgcacggcgagaacgacggcgaaccgtacggtcttcgtcatcatcatccatatccataggcgcacggcggaggcgggagcgaaccgggcgatcctcgtagtcatcatcgtcggactggcgggagcgagagcggcggcgaaccgaacggtcctcgtcgtaatcgtcatcgtccacgactgaacggcggcgggaacgcggggcgtcatcgtcatcgaaatcatcggcactgaccgtgcggcgcgaacggcgcggacgatcatcctcgctatccaagtcagccactgcggaagcggcgcggcgcggacggcgcggagtctcgtcgtcatcatcggtatcgctggaagatgcggcggacgtacgacgggtgcgacgcggcgtttcggcggcatcgtcggccgtggaaacgcggcgcgtacggcggcgggttggacgttcggcggaatccttggaatcgctggattcatcggaatcgccggaatcggatgacttggaatcggccgcggtgctggcattgggaagcgcgggggcttcgaacagcggggtgcgttcctgcacttgcagttccagggaggcgccggcagcaccggtgccgcggaccacgcggcggccgccacgacgacggcgaacaggttcgacgggctgggaggcggcggcaggcgcagcgttcacggctgcagccgaatcggcattggatacggttgaattatcggttccgtcgttgacgaaaccttcacggttgtcagtgggcacaatgctcctcgcggcgcgctgcatcacgacgcctatttccaggcctatacgcttgactcacaccacgctctcaccgtggccgcgcgaaaacgcgccgcgtaaaggcaacttcgtctcaagtctgtcctgcgggtggcggacaccggcgcttgcgttgtctcattctcgagagccgcaaggggatcgacgccatctcgcacgctgatggttatgcagaaccaccatcctttagtatgccacatattttgtgcgggcgtggcccggcgaggctgacgttctctcggctcccctccctgcggtgacagctcccctcagagaggggagctcgagaggtgtcagaccagccagtcggtaagaattgcggtcatggcggccaggtcggattcgggcacctgctcgtcgtgcttgtgcgccagcagcgggtcgccggcaccgaggttgacggccgggatgccgagctgggagaagcgtgccacgtcggtccagccgagcttggccaacgggtcgcggccggtgcgctccttgaccagtcggaccagatcttgggcgagcggggcgttcaggcccgggcgcgcggaggggctttcgtccttcatttcgatgccgtagccctcgaacacgccgccagtggccacatgctcgccattgccgagttcggcaccggcatccgcgcccatcatcagagccttggcctcggccagcgacttgtccggggcgaagcggtagttgacgtgtacgcggcattcatccggaatgacgttcgtgcctttgccgccggaaatcagcgtggcgttgaggccctcgcgatagtcgagcccgtccacgttcacggtggccggctcgtaagcgttgagtcggctcaggatgtcggccgccttgtggatggcgttctcccccatccacgcgcgggcggagtgcgctgccacgccgtgggtcacgacgtcgaagcgaatcgtaccgttgcaaccgccctcgatgccgctgttggtgggctcgccgatgatggcgaaatcgccggtgatccaatcgggatgggcctcgacgactttgcgaaggccgttcttttcggcgacgacttcctcatggtcgtagaagacgtaggtgaggtcgactttcggggtggtttccggcgtgcggccgtcgagcgtggcggcgaggtagagcatcaccgcgtcggaggccttcatatcggtggcaccgcggccccacagcacgcggtcttcgggatgagcgtgggcgatttcttcgcgaatcagcgaatcgccgggctccagccacttcggtgggaaattgtcgatgaccggcacagtatcgaggtgcccggccaagatcacacggttcggctcgccgaagtcggtgctggccaccactgtgtcgccgtgacggcggacggtcaggtgctcttgctcgttaaggaaggcctcgacctcgtcggtgagggggccctcgtggtcggacacggagaagttctccatgatctgggtgagcaggctgttcagctgctcggcagtggatgcggtgcggttcaattcaagcgtcatgtgaacagcgtaccgcgtgggcggcgggcccagcacacccactacatgagattttgcggccgaatacatttttatgtgccacactggggtggcgaaagggaggattatgtcaggtctaatcagcgccatgcaaggcttctgcgttatcggcatcgtgattgcggtgggatatgtcgccgcacgaatgcgaatcggcgggccgtccgctcagatggtgctcaaccgtttctccttcttcgtatcgagcccgtgcctgatgttcgccatcctctccaaggaaccgatcttcgacatcttccatccctcgattatcgtggcgttcttctccgccgtgctggtaggcgtggtgttcctggtgctcaaccgcatgttcttccacctgaacgccccggacgccaccatcggcgccctgaattcgctgtacctcaattccaataacatcggcctgccaatcgccacctacattctgggcaatccggctctggtggcaccgattctggtcatgcagcaggccatcttcacaccggtgggcctgacagtgctggacgtgaccaccaagggcaaggtctccatcaaggaaatcgccaagcagccactgcatcaaccgctgcttatcggttcgctgctgggcattgtggtctctgcgatttccgctaaaagcggctggttcccagtgccgaaattcattttcgacccgatcgacatgatcggcgattcagcggtgccaatgatcctgatggcattcggcatgtccctgcacggcaccaagccgctgcagcagaagggcgatcgcccggccatcttcacggtcgcggtcctcaagaacatcatcatgccaatcatcgcgttcctgctcgcctatttcgtgatgggcttccgcggctccgagctgtacgcctgcgtggtactcgccgctctgcccaccggccagaacgtgtacaactacgcggcccgctacaacgtgggcctcaccttcgcgcgcgacggcattctgatgagcaccatgaccagcccggtgtttatcgcgatcatcgcggcgctgctgagctgagccggcaactgtaatcaccgtaaaaaaacttccgcgaaatccaccgtaggattccgcggaagcctgagatatacactacttgagaatcgccttaatcgcctcatactgctgagcagtgagttgcaccgctggctcacggatcagggtggaaatgttcagtcccttggccttgaccgcacccttgatggcggagatgaacaggtcggtctgatcgtacagcgccatcaggtggctgatgcgttcggcggcctcaattgcggtgccatagtcgccggcctcatatgcacggtgcagcgtaacgaaggtctccggctccacattggtcatgccgcagatcacgccatcaccgccggagacgcggttgacgagatagtactcgtcgaaaccggagaacaccgcaaaccgtggattcacggccttgaccgcgcgaatcaccttgcgggtatggctgattgtgtcgaccgtgtccttgatgccgacgatgttcgggtgcgcggcggcaagctcggccacaagctccggggtcaagtcgctgccggtgcgcggtgggaaattatagaggatcaccggaagattcgtcgcttcagcgaccgcgccgaagtacgccttcgcgcctcccgcagtagggccgaagtaatacggcgaaacgaccacgagcgcatccactccacttgcttcgactgcccgcgcgaagtcgatcacattgttcaagttggtatcgcccacgcccgcgaacaccttgatgcgcccggcgacatgcttggccacgaagtcgaccgcctgcttcttgacgtccagagggaaggcatagaactcgccgatgctgccaaacaccagcacgccgttgataccggcctcgatcagatgatcgagatgctgcccccaacgttcatagtcgatgtcaccgtcgtccttggtgatggtgatggatgggcagatgatgcctgagaattcggcgctgctcgtcatgattgttcctttcgttacggaataggggtgccgcacaagcggcaccgggtttgcggcctctcccccagtcgtcctgcggacgatagccccctcatcagagggggcttgggtttagtcgatgttgtaagcgcggcgggcgttgttttcgaagaagtcctcgtcctcgccgaacgtgtccagcatgagttggaagtgcgtggcaaaggtcgagttgagttccacgaccggccagttggagctgtacagcaccttcttcgggccgaatgtgtcccgcacgtatttcacgatgtccgggtccaccgggttgtcgccggaaaccttgatatacgaattcggcagttcggccaacgctgcgagtgcggcgcacgattcctcatcaagcccgggcacgttgccgagatgatcgatgatgaccgtcacttcgggaacctgcgagaacgccttggccatgtcgcccagttccgggccacggttgcacagctcgaatggcaatcccttggcggccatcgcgcgtagaccggcgatgaattcgggttcgagcgcacggccccgcggctcggaatccacatgcagcggttccctgatgccatcggcattaatcgggacacgcatccaagggcttacccgtccttgcaacatgcgcttcaggatcagaggacttgcattctcgtacagcagccggtcctcaagctcatggtcggccgcgtcgacctccacgtatacgccgccgaggaaattcacgccaaacttggcgtactgtgcggctaggtcttcaatcgtgtacttgtgttgcagcgagggcaatcctgccagccatggcagatcctgcgcatccggatcccagatatggaagtgggaatcgattacgttgagtgtcatatcaggcctccttcagaccgatcttggaaccccagaatgcgtaccatgccacgaacaggaagcccgggaccatcaccaggatggcgatctcgatgcctgccgcatcctgaatcacaccgagcagcagcggaatcaacgcggcgcccacaatgctcatcaccaaagccgaggaaccggtcttcgccgcggaacccttgatacctttcagcgtcagggagaatatggtcgggtatccgatggaaatgaacagatacgccaccatgaacgcgatgacggagaccttgcccaggccaaggaataccacgaacatcagcacggctgaaatggtcatgtatacgccaagaatcttcgagggatcgaatttggccatcaatggggtggtggcgaagcgtccgatggtgaacagcagggaaagcacggaaagcatcatcgccgcggtgccggctgtgatgcccgcgccccagtgcttgagcgcgtaggcggagaagaccgccatgccggccacttgcaggccgatgaaaatgaactcggcaagcacgcccaatgcgaagtgcgggcgcttgagcaggccgaagaaggagctgttctcggaggaggcgccgcccgcggcctcctcttcgtctcccggaggcgtgggcagcttgaacagcgcgaacacggcgagcaccacgaccagcacaacgccgatcacaatgtatatcgtgcgggtatcattcaggaactgcgccttagcggcgtcgaagccggactcgcctgatgcgacggtggtgccgagaatctggccaagaatcagcgggccaacgatgttgccgacgccgttgaaactctgcgccatgttgatacggaacgattcgcccttttcatcacccagcttggtgatatacggattgcagttggtctccagcgatgccgcgccgagcgcgataacgaacatggcgaacaggaacaggccgtagctggccatgctggtggcagggatcaccatgaacgcgcccagagcgaacaggaacagaccggagatgacgccgcccttataaccgaaacgcttggcgatcaagccggctggaatggccatgacgaagtatgcgccgtaataggccacctgcagtaatgacgcttcggcgctgctgagttctatgtagtttgcgaacggcgagttcaacgcgttcacgaggttcatggtcaaaccccagataaagaacagtgaggtcaccagcacaatggcgatggtcgccttggaaccggttgtgtttttggatgtcatcattgactccttagtgatacgagtttccccgatattgcctagcgaggagtggaccaccctgggccatgttggtaaacggatgacccagggcgcgggtgatacgggcggcatacgcggatacggcgtacggatggagcaatgatcaaagctccggaattgccgcgcgaatattcgggaaagggctgcttgtcagctcagcgcacggtcaaggtggacatagccgccatcgacgtacacccactgaccggtggtgtggctggagcggtcggagagcaggaatgccgcttcattaccgatctcttcggtggtggtcatacgatgttccagcggaatcttgtcggtgatcaccgacaggcgcgcctgctgggccgcttcatcgccaaaggtcttgatccaatcggcatagagcggggtccagcactcggagacgactatggcgttgacacgcacgctatcgtgcaccaatgcggcggcccattcacgggtcaggcccaggatcgcgcccttggcggccgcataggcgctggtcttgccttggccggtaagcgcggtcttggacgagatgttcacgatggatccgcggctttccttgagatacggcacggccgcgtggaccagctcgtaatagtgagtcaggttgccgtgaagcgattcctcgaactcacgccaagtagtggtctcgagatccttgttgtcgttctttccggcgttattcacaatgccatcgatatggccgtacttcttgtatgttgcttcgacgacgccggcgatcttgtcggtgtcgttgaggtcaagcaagtgcacatcataggtggtggtgtactgctcgatatccttcttgaactcgtcgagagcgctgtcgggtcgattaatcaccaccgggatggccccctcctgggccagttgcagcgtgatgcctttgccgatgcctttgaaaccgccggtgatgatgatgactttgccttcgagatgcagatccatgggaactccttcgtccatccttattctgcgtttcatgggtgttccatgtcacgcccggccggggcttcggcaccccagccggagtggttgtgtgttgttgtgttgagttgtgttgttcagttatgaatttccagttgcggtcagccgcgatacaggtacttctcggccgtctccagcgtcatttcggtaccgttgcccggagcggtcggagcgacgtagttgccgtccttgatctcggtcgggtggacgaaatgttcatgctggttatcgacgtattcgatcatgcggccgtccatcgtgccggacacggccacataatcgaacatcgcgaagtggcatacggcctcgcacaggcccacgccgccggcgtgcgggcagacgggcttgttgaacttcttcgcgagcaggtattcgagcacgatctcctgcggaccggccacgcgggtggcgtcgatctgcatgatgccgaaggcgttcgcctgcagatactgcttgtacaggatgcggctctgcatctgctcgccggtggccaccttgatggggttgatggcgcgcgcaatcgtggcgtggccgatcacgtcatccgggctggtcggctcctccacccaagccagatcgaagtcgtggaacttgttgatccagtcgatggcggtgggaacatcccacacctggttggcgtccacggcaagacgcacgtcggggccgatggcttcgcgggccttggcc

SEQ ID NO: 2711 - DNA, 7785 bp, Unknown
  R36_18m  MAG No. k141_9072
tctcggccaacacgcgcatggcacctccccggctcgacgctcttccaccaccagtctagcggtgtgcggaacacaacgaacttgacgggcgtgcggaattattcgcatgacggtccaagacaacgggtctacacttcccgaatagatgaggcacaagcgtcggatgttgtcgacacaaccgtaaagggatgataccgatgattgcgcaaagccacagggcgtccaactattcgatggacgagatcagcctgatgccggtcgataaggtgtacaaggccatgcagaccgacgccgaaggactgtaatgacaaatgtcacgcctgtgcggccaagtcgtgacgtttgcctgtggcggcgtccggccccttcttgggatgatggaatcgccaaggaagggagtgactatgacaaccgacaacagagcttccgaacacgactcgacaaccaacccggctctggccgtgcacgtcagccaactggtcaaacgctacggcgacatggtggcgctcgactattttgaccttgacgtgaaccagggcgagattttcgggctgcttggaccgaacgggtccggcaaaaccaccgcgatcaactgcatcctcgcgctgctcacctacgattcgggcacgattcgcgtgttcggccagccgatgacgccgacctcctacgcgctgaaacgtcgtatcggcatcgtgccgcagaacgtggccgtgttcaacgaactgaccgtcaccgaaaacatcgactacttctgctcgctgtacgtgccgaagaaaatcgaccgcgcgccgctggtcgaggagtccatcgaattcgtcggactccaggacttccgcaagttccggcccggcaaactgtccggcggtctgctgcgacgcctgaacatcgcctgcggcatcgcgcacaagcctaacctgatcttcttcgacgaacccacggtcgccgtcgacccgcaaagccgcaattcgattctggaaggcatccagcggctcaaccaggccggcgccacggtgatctacaccagccactacatggaggaggtcgaacagatctgcgaccgcatcctcatcatggaccacggccggcacctggcgctcggaaccgccgacgagctcaagaacatgatcgacacgggcgagcgcatcaccatcgaaacgctcgatctggcggattcggcgatggccgaggtccgtgcgctgccgtgcgtgatcgaagccacctacgacggcaaggaactcgacgtgcgatgccgtcgcggcgaacacaacctgaccgacgtgctcgacgcggtgaaacgctccggcgccaacatcggccacctgaccagtcgcccgcccaccctcaacgacgtgttcctcgaactcaccggcaaggcgttaagggactaacaatcttgcccccgctggcgggggctcccgcgaagcgggcgggggcggtcccgtagtaaccaccctcagtcagcttcgccgacagctcccgccagcgggagcaggtaaggagacatcatgtggaccacatttctggtcgcattgaaagcgaacctgcgcaatcgtcaggcactgttctggatgattgtgtttccgatcgtgctggcaaccatgttcaacgggttcttcggcggactgtccgagggatacgagctcaaaccgataccaatggccgtcgtcgaagatagccgctggcagcaggcagacggagcgcgtacgtttgtggatgccttgtctggagagacggcctcatcgtcggagtctttggacggcacggcatacgccgatatcaatcagcaattgctgaccatcaccgcagccgacaccgtgcggaaagccgaacagctgctcgccgatggcacagtccgcggctacctggctgctgacggcaacgggcgtttggcgataaccatcagtcgggaaacggtgaccgcggccaatgacaccacaggaagcgtcggactggatatcagcctatcggcattgcgcagcgccatcgacctgtacaaccgcaccgacgccgtcacccgacaaaccatcgccgacaatccacaggctgcgctcagccgcaacttctggaatagcatcgggcaaagcgtcgatgtgactcacgaaacaacgctcacgcatttccagcccaatgccatcgccagatactattacgcgttgctggccatgtcctgcatgattgccatggggtactcaatcagcacggtctccacagcacaagccaacctgtccgcattgggcattcgccgcaccgtggcgccattgagccatgccagacagcttattgccggtttccttgcctgctggttgtgcgcatcggtcgcattgcttatcgcattggcctatattcgcttcatttgcgacatttcgtttggagggcgagaaccggtgacggtggtcgcggtaatcatcgccgcattcatgaccagttcagccggtactttgctcggcgcggtaccgaagctttcctacgacacgaaatacggtttgtcgagcggaatcgcctgcacattgtcgctgttcaccggactgtacggcagcttcgccatgcagatcagtgactggatagcacgcaacgcgcccatcctcggcaccatcaaccccgcgcaacaggtgacgaacctgttttacgacattttgtactacgacagctaccagccgttcatcaccacttgtgccattttgctggcgatgagcgcggtattcctcttggccggcatcgcaatgctgaggaggcaacgctatgaacacctgtaaagccacattgcgtgtactgttctcgcacagggcctacctgttgatttacctcgtgttcgtgggcatcatgatgctgtctatcagctggtcgatgctgtctggcacatccgattccgcagccgcggcattcgagccggccaaaatgcgtgtcgccgtcatcgatcgagactcggacaggggcggcatcgcgtcatcgatgcgcacatacctgtcggattccagcgaactggtgaacgttgacgatgctagtgaaactctgcaacaagccgtcgcctcgaactgggtggatctgatcgtcatcatccccgatggtttcgccgacgatttcattgatgccgcggcgacaggcgagaatccaccaagcgtggacacggtcaccagctatacgtccggcgcaggctcgatggcccggatgaacgtcatcgggttcctttcactcacacgtacggcactgattggctcgcatacgacggtcgatagtgcggcgctcgcagctatggtcggtatcgacattggagacactgcgggtgattcgtctgaagatggcatgggcgggtttggtgaattctcgaatcaggacatgcttgatatgctgccggccggtcagattgagaaacccagcgtcggcgatctgttcgaggcatcgaaagcggctgccgcatcggcgagtgacatggacgcgaaccataaggtcgctgtgatcgacacggcaagcgcggacgcggaaagtgcttcggacatggcggccagcagatttggcaacaccatgaaaaccgcgctgtatccgctgtttttggcgatgaccgtctgcgggtcaatgattctgggcatattcaccaccggggaagttcgccgtcgtctcaccgcatccccacaacgcatgtcgtcgatgggactccagcggttgctgacgctcagcggattcgcgctcgtcgtatgcgtcggttatctggtgctggcggtcggtctgatggtcgcggcaggacttgatccgttgcacctgagcgtcgggggagtgctgatgacgttcggcgcgacctgcgtgtacgcgctgatgaccgtcgcctgtggattcatgctcagcgaattcgggttttcggaggcggctgccaacggattcgccaatatcttcggcctgctcatcatgttcacgtcgggagttgcattgccgattgacatgatgcccgccgtgatggtgactatggccaagttcctgcctggctggtggtattgcaccgcgatcgacaacgcgctcggctccggcacggcggaggaaaccggcataagcgtcgccggctgggccggctcgctgggattggtcgcactgttcggtgtgatgttcatctgcattggcctggccgccggccgcttccgccgatcccgtcccaccctggccgcgcccgccaccacgcagctggccgagtgagaaaatcagcctttcaaccgataccgctgcaccgggtcatcggcgaacttgactcgggcgacccgcccttccttcatcagctcgcgcatgccggacgtggcggccagcggagtcaactgcagttcgcgcatgatctccttgacgctcatcgccgaatgccgttccagtacggtcataatcgccttgaccacgtcacccggtgaactgttcgccatcgtgcgctgcttggtgatggtcatcgtgaacgtgttgatgtcgttgcgcgtggtcgccggctcgatgccggcctcgcgcaacgcggcggcgatgcgctggtagccgtcgccgccttctgggttcacaaacccgccgcccggatacggcgtggactccagcagcgtgaacaggaactggtttcgggtggagacgaacggtgcacccgtcaccggatgcggactcgccagcacatcatgtgtcaccatgccgtacaggccacccggattggtgatctcaatgcgatcggtgaacacgctgatatgcacctgcgtgccgcgcgcatcgggcgaataatcacggtgggtgagcgcgttcgcaatcgcctcgcgcaacacgagtggcggataatcgggcttcttcgcgccaatccaacgcatcaacgagtcgaccgcatcgtcgatcatcaccggaatcgaaccgaccaccgacttcgaggcgaccaatcgttcgtcaccccggaacacatcgtcccggctcgtccccggaaacacggcaatcgaaatgccgagccgcggatagaacttctgcggatagcggcccaacgccagcagtccggccaaggtgggacgcagtattccgccgacctccgactcgtcggaatcatcatggcgcaacacctgcagatccagcagcacatcgatgccgtcccggtcggcgaacacgcgcggatgctgctcgcgcacgcgcgccaacaatccggcaacaagctgcgggtcgaggtcatcggtcgtggcgccgggcacgatatccagatcgtatgtgggctgcagatgctcctcgatgagccggtcgacctcataggaggtcatgcgccggtcgccgtcgccggtgcggatgaacgagccgccgtgcggtccgagcgcggtggtgaagcagggcttgtcgcgcggcagcatttcgtcgatgcgcgcgaacaccagattcgcgccttcgaacgggcaggtgacgatcacgggccgcaccaccggcgtcatcttctcgcacgcctggctcagcgcctcctgcatggcgcgcgcgtcgaatccctcgaccggcgtgaacccgttcttttcggacaggccaaggatgatccagccgccggagccgttggagaacgcggacagcgtatcggtgatggtcgaggagatcttgcgcttgcattccttgacctcgcactgctgcgtatcgttgccgatcagacgcatgagttcgatcagctcagtcattttggcagtatagtcatcgaccatggcggcctccttgacaccattgtgccccataatccgccgcccgctcgcctccagccccgccggttcaccccaattcatccagaattcatgggttactggtcaaagtacgaatgattgccgagaggctgtcgtatatgcgcaatagcggctgcaaactgtgttgcgccagagcgttcaagtcttttagcaaagtcgggaatgtttatcggtggccgatgtcgagaatcgataagctcacgtatggcgctagctgtggcttccggatttcgtctaagtaatacacagagcaaatcatctggcgtgatgacctgaatggagaaagagtcaagcagtttctggggaaaatccttgatattgcgcgtggccagtgcgtctgcttgtccctgtgccgcagccgcaagtacgtgacgatcatccgggtcaggcagatcgaattggctccattccgattcctcaacatgtatggaggattcggggaatgcctggtccatcattatcagtctttttcggaaggcttgttgtgcggcgtcaggcagtgttcgggaggcggcttcctgtgcttcttgtaatacgttaggcgaccacaggggaagaaaaaggtcatgctcggccaaggtgagcagaacatcggtcaaggtgatggaatagatgacattggcatcaagaaacaccgaaagcatcggcccgtactctccttacctccgataccgcatgcatggcttcctgcggggtcggctcgggcaggtcgtacaattcggcgtcttccccgacgccgatcatttggctcagggcgcaatccttggtgtgtttcgaggctcgcttgtattcaagcaggtcttccagccggatgcgacggtgattggacggacgtgaaaaaggaataagtcctttatcaagcagtcttatcagtgtttgccgcgaaatgccgagcattgccgccgcctgttcggtagtcagatcttgttcggtggcactgatcgttacacttttgccttcggcgagaaggatggccgtctgcctgacggcgtcgcaaagctgcgaaggtaggggagtctccacgccgctggcatctttgatgaagatccgctcatcaagaaatcgtgcggtgaatgcctccaatgtcgtcatgtcgtcaatgttgatggatggaaggattgttcttggaatggtgagtttgtcggattctgccatggtgacctcctttttatctatcacagtataaaacgtccaaagcgaccaaaacgcctaaaacgttcaaactatgcgaattgacgatggttatcgagttttcgaatatgggttgctactggccgctaacgaggtcgaggagggcggattatgttgggtggcgtgggaatcttgcgtgtgatttgatgctgccgttgctccgattgagggtatgtgggccaagggccgggtgaagttggcgtccgagccgaagggcaaacggttcggtttgttcgatgccaagggtcgcgtggtggatatcaaggcgccgatcggccccgattggaaaggcgtgaacggcgtgaagccgattcgtgccgtcatggtcggcgattcattggtggccggatgtggcgtggacgaccagtcgaaaggcattatgccgctgcttgccgcgcgcgtcgcaagcgtaccggtcggccggtggcctggcgtacggtcggcaagctcggcgcgaccgcccggcgcgtgcgctaccggatgatcggcgatatcaacgaccggccggatgtgctgatcgtgtgcgtgggcggcaacgacatactcgccggccgttcggtgcgcgaatgggccgccggcctcgcgccggtgctggacgcggccaagaacaaggccggcagggtggtgcacacttttgctggtcactccatccaccactgccgcgaaaccatcggtgatgatcagcctgtcctcattgagcgactggtcagacctcttgccttggcagtgctgttctatgatgtgcatagcgattttcgattccatggttgtcagaacgcttaaaggcgtctactggctcattatgatggcagcagtgacatgcggatatggggggcgctgtctaaatgaaagtgcaacaccctttagattggagattgtccagataaccagtgaa

SEQ ID NO: 2712 - DNA, 7052 bp, Unknown
  R36_18m  MAG No. k141_9160
atggtctcactcgccgtcgtgtagttctgtgttccgctggcggtgaacttgacgttgccgttgatcgtgacgatgcgtccgactcgacacagagtgaggctgttgttcgtatacggcggtttccattgctgggttacggaatcccacaaagcccccttcggtgtgaacaggcgtaccggcgtgccgaccgtgatgccgtccaatgggatacgccacaacggcatgtatgcgtcaaccgcgccggacagtatcttccctgacggaatggtcgggtcggcggcggtcgtcgcgttcggcgaccccttcaacacggccaactccaccttttccacgccggtcgaggaatcacgattgtaatgcgcgcaaatgatgtcattgcgtttcatgccctgcgacccgttggagatcgtcaccgattccgccgccgtgatatgccagtccaagccttgtatcgacgcgcaaccagtaccgatggtggccttgttcgcactgcccatcgtgcacttgaacacgtcaccccagtcgaacaccacatcagacttagaaaacttggcctgatgaataatcgccttgtcctcacttgaaatatgagccgtgccggccttgccgtcaacaagttcgatggtcacttttcaacctccttcaaccatgcttcaaacgattcgtcatccttctgtatgaacgtcatgaaagacgtattgcatttggaacacaattcatagatgtcgggcggcacatcctccgcgatgcgggtcgccttgccagccgaataccgacgcacggtgaaccattcacgcgcctccgtgtcaccagcggcgacataagcggtcttgccgcacttgtcacacacgtacttcgagtaaccgtcagatttcactagcctatcctttcaaacgtaaaacaaccaagcgaaggcaactgcctccacgtgccgccgaaatccacggaagggttgacaccggtcgtgttctggaccacgtatccgattgggaacacgaccctcccggaagcgccgccgccgacatgagcgctgatgacaccgtccacgctcacgatcgtggaaccgtccaccctcacgccacccaacacgtccgtggacgcttttggcagcgtgtaggcgttcgcgccccgttcgaccgaagcgagcttcgaccgctcgccatcggtcatcatgcccgacttggcactgtcggccacgctcttggccgcatcggcgacgttcctcgcattctcggcggtctgattcgccttgccgatctgcgccgcgaaaccggaagccgtcttgttcgccgcgtcggcgacctgcctgacggaatccaaatcctcggaagcgacctccgcgttgatcgtgccgcctgaaatcgacaggccacggccagccgtcaaagacacgccaccaccggtcgaacccgaagaggaagacgaactcgtgtaattcgaatattccgtcttcgaagaagccgcgtcgccaacctcatacgatacggacaacaagccgccagacagtttcacgatcttcttcaacacgacggcagtaaccgtcagaccagtgacatgatcgcagcccgcaaccctatcgcccacatcaagcgacaagccgtcatgcacagtcacatcgacagcgccagcgccctgcaaatcctgcaactgcttcttcgtctgcttgtccaactcgtccttctcggcggacgaataatcatagactgcggcgatttcgtcacgaccaccgaacgtgcgcgtattggacaccttgccggaaccatccgcataatagtggacgaccagacgattcctcaaatcacccttgcccaagccgatcatatggttggtacgccggtaatccttcgtgatggaaaaatcaaccagatcggaatcaaccgtatcattatggtcaacaatcggcttggcatacatccatacagtgccgtcaacctcctgaaacatgagtttcagatcattcgctgccaacatcctgcggatgccatcatacgcagtgcaataccggtcgaactggaacgttggaatcgttttcgtggaatccgcgcgaaccttgaacacgtcagacaggccaatacgggccaacaggttcgacaacacctgattcacagggccggacaccttcagataatcctgccccgaatccggctgcaacaccttaccggccaacatgccatgccaactccgaccggaatacgttacgacgctcacaccgtccgacagttcatccttcatatgatcgacgatgccgccaacctcggtcccatccacatagacaagaccacggtcaggcagcaccgtaccgtcatacaacgtcagctcgaaatcattctcaccagacccccacgcgcaatcaaacacgcaatccgaaaccgcatggaacggcacgccattctcgtcagcgcaaatcaaatcaaccaagtcgggtccccattctcctcgacaaccgtcagatcaaaaccgaaaccggaacccaactcaaccacgctcgaaccagccggaacaggttggaaaacatactgtccacgattcaaaccggaaccgcgcacaccccacgaaaacacgttccgcagagaaccatccgcaccatgcagcatgatcgacttcttcaacgagtcaaccacaacgtaagcgccagccggaacatcaccattcaaccggtacacgttcccgccaatcgtcaacgacggattcgaaacagccccatatatgaccagacgaaacggcatcggaacacgcatacgattagacaccatgcatgacggacgcgaaacagccagatcataacccatgtcagtcggcaaatccaagccagacgcggcagacccgggcacaggctgatacgacacggtaacagcatcatgacgccacacaccatccaacaagacgaacgaaagcgcacacaccgggtcggacgaacccgggtgcgaggaagcctcggacttcaccgcataacacgattgcgtccaaacctcccccgcaccattcacagcctccaaccgtcccggcttgccaacagccagatcagcgtcaaccgtccgcatgaacgagtcgaacgcagccgcatcaccataatgcacgtcaacggaaatctcccgacgtttcctcgaaacaccagtcaatccaccgttacgcaccgtataatcccattcacggccacgcaactccaacgcgccctcgaaatcaaccgtcgcataatccgacacgtcgaaccgttcaccggtcaaaccactcacatacgcaagctcacctgccacgattggcctccaatacatcacggacgaaatcacgcttgctaggccaaggactgctattgcgactgatctcaccgccgataccgtcacggaagcccgcaacctcacgacgcagatcgttcacggcggacaccagttcgcgatcatcccgtgaaggaatgttgaccgtgacggacgtggccgaatccaacattctctggacactgacaccggaagcgtaggcgttacggctcatgtcacgcgcggaacgcgcatacgacgtgcgagcctgagacaccgccctgtccagatcgccggtcgcgttcaacacgttcaggaaattcgggccgacggtacggtcaagcctgctcgccgcagcggcacgaataacatgctcaccattcgacagccacatgggaatcgaatcggacgtgccagtacccgggccgctgatacggccaccggtagccgcacgcgcggaaccatcgccgctcttacgagtgatgacatccacgtaacgagtggcaaggacggtgccatccagcgcgctgatactacggaacacactttgggcatcggaagcatcgcccagcacacgaccccacgggcgggaaatcgtcgtaccatcatatgcgttcgtttccatgaacgccgtacgcgcaccactgttgtcgcccagcacacgaccccacgggcgggaaatcgtcataccatcatatgcgttcgtttccatgaacgccgtacgcgcaccactgttgtcgcccagcacacgaccccacgggcttgctatggtcacaccgttgaacgcctgaatgccggcgaacacggcacgtgccacactgttgtcgcccaacacgcggccccaaggctgagccaacgtcacgccgtcatacgctctcgtattgtcgaaagcgttccgggcgctcgaatcatcgccaatcacaaacgtgtgcgcggtcgcaagcgtggaaccgttaagcccctgatatttcgccaatttcacactggcgtcatcatcgttcgcatcaatatcgaacctgatgcccttcgcggcaggaaccttccgcttctcaatatcctgcatcttgccgctcgccttatccaaagcgtcgatgagaatctggatctgagcgtcagtcaacccactgtcacgaagcttctgcttgacggcatccaacttcgggccagcctcatccttggcgagaatatcgatctcagccttcgtcagaccaaaacccttagccaaagccgtagcatccttgatcttacccgaagcgttatcctgagcgtcaagaagaatgaccaaatccttctcgctcgcaccacccatgagcgccttcacggcaccgaccaactggtcgaaactcgttatatcacccttctggacgagatcaagaatgatttccttctgacctttggtcaactcaagcttatcgatataatcctgaacctgagccttcaccgaatccatattcgtcagatcgaacttcgtggacacgttatcgggaataagacccatctggtcggcaagcgcggcggcggcctcggctgacatgccgcactgttcggccatctgaatgatttcctgacgtgcggaatagacggcgttcttggctttctggttcgcttcggcgctgccattgcccgcgtagatgatgttcttcgcggccagtaaagcgctgttcgcgtaatcggccatcatcttgcggttggcctgggcgtttttgctgttgccgtccaactcgtaattgttggctgcgagggattcggacagcaggctgagcttgtcggaggccaacgccgaaacgttggcgacgctatcggcgctgccgatccaatcggacgccaccttcatgcccttcacccattcggcgtgggagtcttcaagcacgccaagcagacgttcggcggcctcggtctgctgctcgttgacgttcaccatctgaccattcgcgcccatgacccactgctggtcgttcttgatgtcctcaagcttcttatgcatcttgttataagcgtcgttcgttccggtcgcggcggaattcaattttttgacgctgatgccaagagcatcggccgcatcggaggcgttcttgaacgggcttatcgacttctgaataccgctaagacccttctcgatggcgttgccatcagggagcttccaaccgtaatccttgtcggtccaattctccgaaacggtcttcatggctttggaaacagccgtggaagcgttctccgcaccgctttgaacgttcttgaacgagtctgcgacagtccggttcaccgtctgcgtgtgcgcgacggcatcattgtacgagctgatcgcactgcccgccagactcaatgccgtggtcgcgccgccgatggcgatgccgacaggcccgccaaggaaatcgaccacgccgctcaaagcggtcttcagcaaaccagtcttacggacggcaccctcagccgcctcgccgacaccacgaaccaaaccagcagaaccagcgccagcggcaacgcctgcgacggaggaaccgccagcctgcgcacgattcatgcgattcagcttcgcagtggtctcgtcggcagcgacacccatccggcgaatttcggaaacctcaccggtcagcacgccagccgtctgaccggacttcaaacgagccatggcccgaaccagctcgctcatactgatcgcagtctcctgcgaggtgatacccaactggctcaaagtcttccgatactgcaacgtggactcgatgttctgcaacatgccacgcttcaacgaattgtaagcgctgatgccagcctttccgaacgtcgcatacatgccgaccatcgcctgaacgggcgcaggcagcttgccgaacgcctgagccatggcggaagcgccatcggccaacaccttgatcgtcggagccgacgacttcaacgtgttccccaacgttccaccgaacgtgtcggacaattcgccgcccatcgacagcagactgtcgaacatcggagctgcggaatcaacggcacggaacaccttctggaatccctcggacacgccgttgctgaaatccgcgatgccatgcttcgacttgccggcaagactgctgatggagccaatgccggtggacaccatggagcctgcgtcaatgaacgcctgcttcgtcgtgtcccgcagctcataagccgcgtcgccaatctcacggaacgaatcatggaacttgcccgaagcggtcttcgccccgtcggcccacgcggccaacgtgccgaacgtgcccttgaggataccgccagccgacttgacgctcgacatgagatagccaccctgctcgatggccttctccatggcctgagtgaccttgccggtacgctccgcctcatcgacccactgcgccatcagcgtcgcgttacggctcacatagttggccatgcgcggcagatacgagctggtgctgtcgccaagcctcacaacggaagcggtgacagcctggacgccagggtcaagcgcgttcacgcccttgaccgtattgccgagaatcgaattgatacgggacacgtattcgccttgggcgactatcttcgcggcgttcgcggctatcttgccttcggcggaggaaacattctccataccgtcaacgaacccgttgccgcccaaagcgtccatcatgtcgatgaccggctgcttcgcctcagaccagaacgagtcggacagtttcttctgcaagccgcccaacttcgtagtggacacgtcgatataatccgcgtaattcttcacggcggaatatccagcgccgaaagcagcggtcacacccaacagtgcgcccggagcggccagagccgccttgc

SEQ ID NO: 2713 - DNA, 6321 bp, Unknown
  R36_18m  MAG No. k141_9218
atggtctcactcgccgtcgtgtagttctgtgttccgctggcggtgaacttgacgttgccgttgatcgtgacgatgcgtccgactcgacacagagtgaggctgttgttcgtatacggcggtttccattgctgggttacggaaagctattcagcaggtaagtatgagtttctgccatgctttctgcatgtccttgaggacgctcagatcgggcttgaggtaataccgtgcggtggtttggatgtcggagtgtccgagttgtcgtgcgaccacgctgatgtcggttccggccttgatcgccaacgtgccgaacgtgtggcgtaggttgcgtggcggcacgcagggcaggttcatgcgcctgcaccaactgcggtagtggtttgcgacttggttcgcgttcaggctgccgaccagtcgtccggtcttcgtgccgtggcgtagttccgccaatcgtttgaccgcgaaacgcggcaatgcgacggttcgtcggctcagatcggtcttcggttcggtgacggtctcatggcctgccacccattgcaccgaccttttcaccgtgacggtgccgcgtcgcaagtccaagtcggcccattcgacgcccacgctttcgcaccggcgcaatccggcgcacacggacaccaatagccatgcttcgagcggatgcccgtagaagcctttcaacaggcgtcggacttccggcgctgacagtacttgcggctcgtagtgccgtaggtgcggcaggcgtatctcccttctggtcacgtcgttgtcggtcaaaccgcgtttgaacgcgagtcgcagtatcgagcggaacaccgcgtaggctttgcgtgccgctcccggcttatcgaaggagtccaaccatgattcgatgtccgccatgctgatcgagtccatgtcccttccgctccattgcgggaggatatggcagttcagggcgctttcatatcccactagagtgcattcgcggagtttcgcgcatgagggtttccaaacggtggttgcgaatgtgtcgaaaagcattggttccttcccgattcttgttgaataatcccacacattgtcgtgttgccgttggcctgacatgcgtgtgggtttcttattgttccacatccatgattctccgttcatgtttttaaacccgtcgatttcgacgggttttgtttttaacgcttcttttaaggaggatgttttgactcagatcaaattcgatttcggccatccaagcgccgatggcatagctgacttggttggcgagaagattcatgtggttccgaccgaacggttcaggaacggcaagcgtatcgtcgtgcgcgattcgttcgaggtgcgtttggacgagcatggcaccgcgaccgtcaccgttccgccgaccgacagcacgttcgcctatgaggtgaccgtcggcgagagtgaggatacatggcgtttcgtccgttgcgtccaggtgccggattcgacttcggttttgaatttctccgatttggtcgaggtcgattctaccacgctcacgccaaccactaccggtaatccgttggccgacattgaccagtccgatgtggattgggccgtgtccacgattaacgcctgatttcaaggaggtttgttttggctaatcctgacaagtttttgcgtctgcgcgattacgctcgtttggagcgtgcgcagaagaatggtgtcgtggatggcaccaagttcaactacgacggtgcgaaacacgtcgtgtcgaatgtgcgcgagtatttcgacgcgcaccgtgacggacgcacgtatggcgtgcgtttcccgctctactcgttttccaactcgccggatggcgtgaaggtcggggataatgcgggtctgaccgtcgtgccgtccacgaattatcgtgcgggccgtgacgactacgcgggtctgagcgcgttccgcgtgttcgacgctaacgttactgtggccgacgatggcactccggtggtgaaggccatcaagggcttggctggcaattacgcgaaggacgggtcgaatggcgacgtgttcgtcatcaccactcccggcttctaccggttcgagttcgacacgaaccactgcaccatctggtattcggacacccagtacgacggctattcgccgatgccgggcgcgctgctgccggacgggtctctccgaccgtgcatggcgtacgcgaaatatccactgtccaattacggcggcaaggccgcgtccgtctcgggtcagattccggcctccatgagcgaacaaggctccgtggccgtacccaccagcaaaggcaagggctacagtggaaagacttccgccgacacgttctacacccagttgatgcacatgctcaaatacgcggccaaggacatcgaacgccacctgggtggcgacttcaacggtgccggtcagatcggcgtcagcaaggccgaaaccaacgtcacgcgcgcgctggtcaagaccactgacgcggcaagcatcgacctcggctcctacgtttccattggcaccggcaccgaccgtggggacaataagaccggcgaggcggcggcataccgcaaggtcatttccaagaccgtcgtggacgcggccaccaccgcgatcaacgtgtccggcgcggccttcacgaccacgacggccatgcatgtcacccaaatgccgtacatgaccggggcgacggacggcgtgctcggcaacgacggcatcccccgcgaggatgtgtccaaaacccatcagccgatcaagctccagggcatcgaactgttcgccggagtctacgagaccgaaggcgacatcatcctgaagaacgtgaaggactcggacacttccggccataccgaagtgtggaaggtgttcgacaccaccaaggcgagcggcaccgccatcaccgccgactacacgcatgtgggcgactatccagccgtcaacgacaagaccaacaaccagtggcaatggcagaccgacttcaccgaaaagcacggattcctgctgcccaccggtgtcggcgcgacaagcaccagcggcctgaccgacgcgcttctcatcaacccgatcacctctccgggactgcatgagttgctgcgcggcggcggtctctgggacggctcccactgcgggttgttctgcgcgcgcggctggaccgacctctcgtccgcttggtggctctgcggcggtcgcctatccattcttggccgcacgcacgcctagtgcggggggttgggggtgagcgccagcgagggggcgaaagccccctaatcaccctcgtatgactcttgataatatttcagggattcgtgacggcttcgccgggttcctcccgtctcttgctgcgcggcggcaatctctgggacggctcccactgcgggttgttcagcgcgaacggcaggaacgacctctcgaacgcttggtggaactacggcggtcgcacataagggttaaccactttccgtcacgactaccctccactttcggggatatgcgagagggcaagcctcggccacgccgaaaatcgaatcaagcacgcgaccggtaggccacatggccgaacgccgccaacattccccttatagcttttatgaaaacatattgcaaacacagtcgcatcaccgaacccgcgttcgtgcgcgaaagcatcgaacggttcctcaaaggcaaacgctcccgcagggacgtgaacgaattcctcagccgccatccagacttggattcgctttcacggcagatagccgacgagatagggcgcggcgaatacagattcgcgcccatccgctacttccgccgtgtggaaccgatttcaggcaagatacgcatcatcggacgcgaaagcatccgccatcagatctacgattacgtctgcggcacggcgttgatgccattgttccgcgcgaaggtcggcagatggcagacggcgagcatccccggcaggggcatagccgacgcgcgacgcgcgatcaaacgatgggcgcgcgaaccatccagcagggtcttcgtgaaactggacgtgcgcaaatgctatccaagcatcagccgtgaagtgctgaaacgcctgctctcacgtgacgtgggggacaggcggctactggatttgacgttccatctcatcgaccggtacgcgggcgatgacggattgaacatcggctcctatctaagccagtggctcgccaactattacctctcatacgcctaccactattgcgaacggcatctttccaaggagcgcgtgaaccgcaggacaggcgaaaccgccaccagacggctcgtgacgcacgtgctgttctacatggacgacattctcctggtcggcagatcgaagcgtgatctgaccatcgccgtcaaacgcatacgcgcctacctgcatgacacgctccgtcttgagattcatccgacatggaacatcaagcatgtcggcgtggagccaatcgacatggtgggcttcaccttctacccggaccataccggcgtcagggcgggcatcttcctgcgcgcacgccgctcattccgccgatacgcgcggaaccctacgagtcttcggctcgcataccgttgcgccagctactacggctggctcaaaaacagcgattccatccaataccggcgtcgaaacaacgtcgatcaaatcgtccgccgcgccagaaacaccgtcgcggcaagccgaaagaaaggataacagatgattcagaacgtctcttccgcaaccccgttggaaaaggtggactaccatctccgcgatgacggactggccgacatccgcatccgccgcaacatcaggaccgtcacccatgaagcgaccgacaatcagccggaatacgtggagtacacggcggtcgaatcctatcagattctgccgctcatggaacaggaggccgtcgaacgggcggatgtcctgttcgagggtgacgccaccagttccaggccggtgctcgaccgtgtgagcgcattggaacaggcaagcctggacaacgcgcaacttctggccgacctgatggcgggcgagaacggggatgcgacggattccaccgattccgacaccggcaagaacgctgccgacgattccgccgacagcaagaacaaggagtgaagacaatggctaagttcaatcatgccgcagcggtccgcatgtacacccgtctggtcaaggccggacgcaagacgctggacgaagttccggaggaataccgcacggaggtgcagcagaaccttctcgacccgtggttctgacgcaagaaggcataggtgaatcaggaagcaatcaccatcatcgtcgccatcatcggttccggtggtttcggagcgctcgtaccgtgggtgctcaacaggatcgacaacaggcgcgacccgctgcacgagggcgtgaaggaactgctgttctgcaagcttgaactgttgcatcggcagatggtggacaacggcggcatatgcaccgtcgagacgaaacggaccgctgaacgcatataccgcgcctacagcggtctgggaggtaatggcgtcggcacggaaatgcgcaacgacatcatcgacgcgcacatacaggaggacaggcaatgacgcgccccatgatcgcaggctgcatatgcctgctactgctcgcgctcatcatcatattcaatcatggtgcgcgcaggcattgattttcacactggttttcaaagccatcccattccgggatggcttttttattgcccccttgactcggggcgggaaggagaggatgtgaagatcctcgacaaaagcaagcataaacacggacgcctgcaccggcgcgtgggcatgacgctgaccgcgctcgccgccgcggtctccatggcgttcgccccggcggcgatggccgacatgcagggcatcgacgtgtccaactggcagtgcggcatcgacatcgccaacacgcaggcagacttcgtgatcgtcggcaccacatggggcaccgggcaagtcaacaacaactgcttggtgtccggcgtcaacacggacgccaaccgcatgatcgcccaagcgcaggaatccggcaagaaattcggcctgtaccattacgccatgggaggcaccccggaggccgaggcccggttcttctacacgaatacgtcgaactattggcgtcacggcatcgtggcgctcgactgggagatggacgacaaccccgcatggggcgattgggattgggtacgccgattcatggcggagtgcgaacggttgagcggcggtgtgcgcccattgctgtacaccggcccggtcgccggcaccatcccgcaggacatccgcaaccggtacggcctgtggatcgcccagtacgcgaacatgagcccgaccggctatcaggccaatccgtggatgatcggcgcgtacggcgag

SEQ ID NO: 2714 - DNA, 9085 bp, Unknown
  R36_18m  MAG No. k141_9376
acgaatacggtctgaccttgggagatggtctcctggtcaggttggtagaaatacacgagccagttggagatgatgccggaaagcagcgcccacccgaactggccgaccgcaaacgcccacactttggcgatggggagatctttgatggctgatttcgccggtgcaacttgcgcgcccgttacacttgctgtagtcgtattgcccattccccataacctccgaatcaacattgacacagtgtcaaaaaccagtatacaccggggttttacactcaattccctgcagggcaaaaccgcacaccacaatccacaccccgagccgccttcccctcagccatccgcaggctctacgatgagagccatgactggtctggccgaacgactaccgcacgtcgccgctttccccgaagcgctgggcaccgggttgctgctgcataccgatgtcgcactggacgacgggctcagtaactgcatcgatatgttcatcagcacctatgaagccgcattgtcccggttcaaggatgattcgacggtcggccggatgcgcacggccacgcatggcggcacgttcgattttcctgattgggcattgggtttatttggcctgtacgaccagctgtttgcgtcgaccaatgggaccatcgacccatgcgtgggcgaggatttgattcggcttggctatgacgagtcgtattcgtttacgcctgcgccagatgccgctgaacatgcaggcgcgatccacgaacgagccatttggtcagccgacgttgagcggcatggcacaacactggtgacgcgcggaccggtcgcgctcgatttcggcgcgtgcggtaaggggtatttggtggatttgcttgtggggatgttgggtgatggcgcgggtcaccctcaacccattcaatacgtcatcgacgccgggggtgatttgctagtgcacacggacgaaccaatcaccatcgcccttgaagatcctgccgatccggccaacgccgtaggtacggtcgaaatcagccacggcgcattctgcgcgagctcccccagccgccgccactggtctgacgccgcaggtcaccaacttcaccatctgctcaacgccatcgacggactaccggttgacgatgtagccgccacatgggtggccgtcacgccgccatcgagcgccataaccacgaagacatcgacgcatggcagcaatgcctcgacaacggcaaaccgcgataccgacgattcgtcgaacaccgttgcggcacacgtccctgtcacactggccgacggcctcgccaccgccctgttcaccaccccggccacccagctgcgcgctcacttccccttcgaatgcgccattctcaacgccaaccgcaccgccgcccaatcccccaattttcccggcggctttttcacacactaatgcacgaaatcatcagtatcacatccctcgggtggaccgatgggttgctcccctcagtcagctacgctgacagctcccctcggagaggggagccgagtatagctaatccgctaatccgctaacgcaggaaacaatccgtcagtcagcgagtgcgaactggctgttgtagaggtcggcgtaaaaaccgcccgccgccagcagctcgtcgtgcgtgccgcgctcgatcacgtcgccgtggttcatgacgagaatcatgtcggcgtcgcgaatcgtggagaggcggtgcgcgatcacaaagctcgtacgccccacggtcagcgcgtccatggccttctggatcagctcttcggtgcgggtatcgaccgaggaggtggcctcgtcgagaatcagaatcggcgcgtcctgcaccatcgcacgggcgatggtcagcagctgcttctggccctgggagagcgacgacttgtcgtcgagcacggtgtcatagccgtccggcagcgagcggatgaagtggtcgaggcccacggccttgcacgcatcctcgatctgcttgtcggtcacgccgggcttggagtaggcgatgttctcgcgcacagtgccgcggaacacccacgtatcctgcagcaccatggagaactggtcgtgcacgttccagcgcggcacggacttggtgtccacgccgtcaatcgcaatcgagccgccggaaatctcatagaagcgcatgagcaggttgaccatggtggtcttgccggcaccggtcgggccgacgatggcgaccttctgcccggccttgacggaggcggagaagtcgtggatgatcggcttgcccggttcgtaaccgaactgtacgtggctgaattccacgtcgcccttcacttcgtggccgttggtcccaagcaaagcggacttgccggattcgtcctccatctccggctcctcaaggaagccgaacacgcgttcggcggccgccgcgcaacgctgcaggttctggaaggcctgggcgaactgcgccaacggctgggtgaacaggcggacatacatcatgaacgccacgatcacgccgaactcgatctgcccgtcgagcgcgagcgccgcgcccaccacgcacaccaccacgtagccgaagttgcccacgaaattcatgagcggcatcatcaggccggaaaggaactgcgacttccagccggactcgtagaggtccgagttgtacttctcgaagcgacgaatcgaatcggcctcgccgttgtatgccttgacgatgaggtgaccggcgtacatctcctccacgtggccgttgacgtcacccagcgccatctgctgccgggcgaagtacttctgggaggacttcatgatggccatcatgatgatcaggccgatgaggctggcaccgatggcgcacagggtcatgatcacgttgttgtagaacatcatcaccagcgcgcccacgaacagcgtcaccgaggtaatcagcgagccgagcgactggcccagcgtctggccgatggcgtccacatcgttggtgatgcgcgacagcacgtcgccgtagctaaccttgtcgaagtatttgagcggcagtttgttgattttgaccgagatggactcgcgcagtcgctgggcggtgcgctgggtgacgttggccatcatccagctttgcacgtagccgagcacggcgtagcccacgtacagggccaccaaagtccaggcgatgtggcccaccgtgccgaaatctaccgagttcatcaccggtctgccgttgacgatggcgggcagacctttgacgatctcgttggtcatgtccttgagcttgtccgggccgacgatctggcagacggtgccggccgcgcccaggatgagcgcgatgatgatgacgggaagatagttgcggcagtagttcacgagtttgcccatgactttgccgaaatcatggggcttttcgacggcacgcctgccgcccattggtcctcttggcatttgttttactccttaaaagtccgtattgacctccctctgatgagggaggtggcgcgaagcgccggagggagagaagccgtacgcgactacccctcagtcagctgtgctgttttattcgctcgcttatcagctcgtcttcgcctgggaacagcccactgggctgttccctttacggctcagcccctgacatggggagctaccgctgccgcccccctacgccgtaagctccgactggctgagctgggattcggcgatctggcggtatacgtcgcagttgtcgagcagttccttgtgcgtgccctgacccacgaccttgccgtcgtcgagcacgacgatgcggtcggcgttcatgatggtgccgatgcgctgggccacgatgagcttggtggaatccttggcctcgcgggcgagcgcgtcgcgcacttcgcggtcggtcttgaagtcgagcgcggagaacgagtcgtcgaaaatcaggatttccgggtgacggtacaccgcgcgcgcaatcgacaggcgctgcttctggccgccggacacgttcgatccgccttgggcgatcgcggcggaatacccgccgtccatgcgcgccacgaactcgctggcctgcgccacgtcggcggcggccttgacgcgattcagctgctcggccggtatatcggcaccttccgcggcctcgccagcggcgatcaacgcggcctcgcgcttgcgcccggccggggtggaggtatcggccatctcgacctccgccgggtcgcccggctgatcgccgtagctcacgttggaggccacggtgcccttgaacagcacggactgctgcggcacgtagccgatcttgtcgcgcagggccttcaggtcgtagtcgcgcacgtccacgccgtcgaccagcacctggccttggctggtgtcatagaagcgcggcacgagattgataagagacgacttgccggagccggtggagccgatgaacgccaccgtctggccctgctcggcggtgaagttgatgccttccagcatcgcctcgcgcgaatccgggtaggtgaagctgacgttgcggaattccacggtgcccctctggccggttttggccacgtcggcggcggttttggtgccgttctcgacgattggctcagtgtcgagcacctccatgatgcgctgcgcggacacgtcggcgcgcggccagagcacgaacaccatgctcatgagcaggaagctcatgatgacctgcacggagtagttggagaacacgaccatgttggagaacacggtgagcttgtccttgagcccggcggcgtcgatgaggtaagcgccgatccagtagacggcgagcatcaggccgttcaggacggtgttcatcaacggcatcatgaacgccatgacgcggttggtgaacagctgggtctcggtgaggtccttgttggccttggtgaatttggcttcctggtagtcctcggcattgtaggcgcgcaccacgcgcaggccggtgaggttctcgcgggccacgaggttgatgttgtcggtcagggtctgcatgaccttgaacttcggcatgaccatggccatcatgacggtgatggacaccagcaggaccgccacggcgatgccggtggcgagcgtccattcgaagccttcgccggcgatcttgcacacggcccatacggccatgatcggcgacttgacgatgagctgcaggcccatggtgatgaacatctgcacctgcgtgacgtcgttggtggaacgggtgatgaggctggcggtggagaacttgctcatctcggccgggccgaaggactcgaccttgcggaattcgagcgagcgcagacgctgggtgaacgaggcggccacgcgcgcagcgatgtagccggtgatgatggcacacgccacggatccgagcgagatgagcagcatcttgccgcccgcgatccagatgtccttcatgtcgctgcccggcgtctcgaccagcgtggtgatgtctgacatatagtcgggcagtttcaggtcgaagtagacctgcccgacgatggtcaccagggcgatgagcatctgaccgatctccgctttggagaggtatttcatgatgcgaaacattggtttccccttgtgttggttgggttggttattggttattggcgattggttcttaagttggctgggttatcggtgattatcggttcacgatgtcttaatagtttccattgtttgattacttacactgtgagatattatacgcacttctgtatgttcgctgtgagcgtcctcaattacctttacctccctctgacgagggaggtgtcaccgcgcagcagtgacggagggagagacccgccagcgggaggaagctagtctcgctcagcctccgcgcgcttagctgccatgtgttcagccacgcgcttgtcccgctccacgaatgcctcacgcacttgttcagccgtcggccgaggccgccccggatggcaaatcgacatatatgtggtgaactcagacaccaggtcaacgaattcgcgcgtgcgccgctcccccatttgcgagaaaatccagcaaattgcggaacgcatttcctctatcatccgatgagactgctcgcgcccggaatcagtgagattcacgcgaataatgcgccgatccttggaatcaatgtcacgcgtgacccagccttttttctccagagacgacagcacagtggagatgcggccggaactggcctgcagcgccgatgccaattgcgatggcgtttgcgtccccttcatggacagctcccggagcacgaactgctcaccatgggctccacgagtgaattccctctgcattgtcgaacgattgccccacacgctggcatacagttcactaactgcttcctgctcaaatcccataagagcaccatccattcccattcgccacacggcagagcgccgcaaacaccccaagaatatctcacaccgtaaacaattcattactagaaactatttttggaacgcataatgcacacactccacgctctttgatattctgaaagccgcatagatattcacttcggggcgtcgtctaagaatatttgctgggccaacggtagcgacgttggcattgtgctccatgaggtatctggtcgaaaaggcggacgaagacaggccagttgggcggagcgcgcccatacctcaaaaccattgcaattattggctttgaccattttcgtggagtcacgaaaatggtcatgaaaaacataaggacacacccatgaaccgcgacgaaatcacacgcaaaaccagcgaactcagcactatcgcacacaccaccgaggactccaaagttgagtattggtatgcacgcgagctaatgacctatatggggtacgacagatgggaaaacttcagcaaagctattacacgagccaagcaagcttgcgacaattccggcgtatccgttgaatcccatttccatgacactacgcgagacgtgactctcggcagcggtgccacccgctccatcgcggacgtcaagctcacccgatacgcctgctatctcattgctcaaaacggtgatccaaagaaagaagaagtggcacttctccagagctattttgccgttcagactcgcaaaacggaaatcattgagcaacgcatgggagaaatcagccggctcgccggccgagaggcccttgccactgcagagaagaaactctatccgtatacccaaatcacacacaacaaaaccgcacaagagcacatgtacacgcccaaccacgccgcagaacgccggcaaggatgtgatacaggccacagaaagcgttgtaccgcctaggcaatgcaacaattgtccgctatgctctgaaggcagatggcggcacggatgccatcccaaagagggggtatgaccatgattcggggtatgaacctatgcagcatcgccggctgcacgcacgaagcagaagaagcgggcatgtgcaacatgcatttcacatcggcgctggttcacggagcgctgcactacactgcggacggacgtccgtcgcactgctgagcgcaacaacaaagcaaaacaaccagtaacgctcaacggcttccacatgttcatgctctaattgcatgtacttgcagacacaatggccggtctgagccagctgccctcgcatggagcagctggctcagaccggccattattgttgctttgtactgtttgcactgtattgcgcctgcattgcgcaagctcggggtagtgcccgaaaagttgcgcactttggatcgtggccgtccatggcgcgatagtcagttcgcttccacgaggttgtcaccgagccgggacatgtcgagatagcggcgggtcgaccattcgttcgcggtgacgtgacggatgcgggcgcatatgagcatcaacgcgctgttcccgtcggggaagccgcccaccacgcgcgtgcgccggcggatctccctgtccggccgctcgatcatgttgttcgtgcggatcctcctgcggtgcccgtccgggaactcgtccagcaggtaggtcgtcgtctcgccgacgccctcgcgcaggcagttcgcggcggccttgagcctcctggattccatctccgtggcgacctgttcggccttggccagggcggattcccgggattccatggcgaatatggccttgagggcggcggacgcccattcgcggtgtgtcggcggcgtcctcgagagcacgttgcgcatgaaatgcaccatgcaccgctggtatctcgccttgggcagcatcgagccgaccgtggcgacgagtccggcgcaccggtcgccgaccaccaggcgcacgcccttcaggccgcgttcgatcatggagcggacgaactgctcccagctgtccctgtcctccttcatgccctcggccacgccgatcacctcgcggtgcccctccgcgttgactccgatggcgaccaggacactgacgttctcgaccgagccgccccatgaacgcttgtgccacacgccgtccatgaacacgtacgggtactcgtcctccaacggcctcgtgcgccacgcctcgatctccccgtacaccttcttgagcttgtcgctcagggtctgggacggcatcctgtcgccccacagcaattggctgatgtcgtccacctgccgggtgctcacgccggccaggtacatgtcgatgagggcctcctcgacactctcctcgcgtctccggtatcgttcgatgaccgcggactcgaagaccgcgcccttgagtttgggcaccttcaacgcgagcctgccggccttggcggtcaggctccggtcgtagtggccggccctgtacgtcttccgctccccggtgcgctcgtacttggcggcgttggcgatctcgtcggcctcggcgtcgagcatcgcgttcaatagctcggcgaccttttcggcgaccaagcggtcgagcctggtctcgagcaggttctggtcgatctgtatgatgttcgagggtcttggttccgtctcctggcttccaatcgcggttttttgttttggcgaatgaaaatcgtacacaggacgcgggccatgccctcttacgtcagacccggaatccgaaagtgcgcaaaaaatcgggtgttatcaccacaaacgacgcacaaagtcatgagccattcgaattgcgctggcccaatcgctacgaatcatatttgccgtagcccttaagtgaatcccactgcatcgagatatcgcgcccgctatcccttccgataacgccgaccacg

SEQ ID NO: 2715 - DNA, 3087 bp, Unknown
  R36_18m  MAG No. k141_9445
ggcaattggctgtacttctgcacggtcaatctggacaccggcgaaaccaagttcgccgcaaccgccgatgaacatgaccagaacgtggccgaactacgcaagtggcaagccgaaaaccagtagtcatcccgttagcttccttcgcttggggaagctgatcggacgttagtctcttcattggctccctcgccgaggggagctgtccgcaaaaaagcggactgaggggagcactgcagggaatgtaacgctcaacttaagcccggggctcccgcgaagcggatggaagaaatctaggacaacaccccaacagccaccgccacaatcgcgcccgccaatatcaccggcacatacggcaccttgcccgcatgtgccggtgatgtgcgttgtgggtcgaatcgcgtccacagggcaatccatgtgatgccggcaacgcccatcgccagccaccagaccaccacaggcaacaggccaaacagtccgacagacaatcccataggtatcaaggcggtcacatcgccgaatcccaatgaccgcggcaccagcaacgccaacgcgaactggatcaggcaacatagcacggtgaacaacagcgcctgcaacagcacgaacaggtcgttcgccaccactccatgcgcgaaatcggcggccaactggattaacgcgcccacggccacccatgcgatcggcacccgccgatgacgaacatcctcaatggacagtgcaagcccacatagcagaccgggtagcgtgaacaggtatggcatggcttaacattaacccctagttagacgtacacatagacgtacacacatgaaacgagggaagttatgctgcgttggcagacggcaggggagtctcacggagaagcattggtggccatgattgaagggttgccggccggcgtgcgcattagcacggacgatatcgtttccgcactggcacgccgtcgacttggatatggccgtggtgcccgcatgaagttcgagcaagacaaggtccgtctgctgaccggtgtacgccacggcctgaccctcggctcgccggtggccatcgaaatcgccaacaccgaatggccgaagtggaccgaggtcatgagcgccgatgcactcgaccatgacctgccgcgcgaaggccgcaatgcgccgctgagccgcccgcgcccgggccacgccgatctgaccggcatgcgcaagtatggttttgacgacgcccgcccggtactggagcgctccagcgcccgtgagaccgcctcccgtgtggccttgggcgaggtggccaagcagttcctggatcaggcgttcggcattcgcaccgtagcccacgtggtggcgctcggtggcgtgcagaccaaccctgatttgccgttgcccacacctgacgatctggaagcgttggatgcctctcccgtgcgtacgttggataaagaggccgaggcccgcatcatcgaacgcatcaacgaggccaagaaggccgccgacacgttgggcggcgtgattgaagtgctggcttacggcgtgcctgccggcatcggcacgtatgtggaatccgaccgtcgtctggacgcggctctggcctccgcgattatgggcattcaggcgttcaagggtgtggagatcggcgacggcttcctggaagcctcccgccccggttcgcaggcgcacgatgagatcgtggtcaacgccgacggccgcatcgaccgtctgtccaaccgcgcaggcggcattgaaggcggtatgtccaatggccaggtgattcgcgtacgcggtgccatgaagccgattccgtccatccccaaggccctgcgtacggtcgacgtgctgaccggcgaatccgcacaagccatcaaccagcgttccgacagcaccgccgtgcctgcggcatccgtggtggccgaggccatggtgcgtctgactttggcgaagtacgcgctggataagttcggtggagacagtgttgccgaaacacggcgcaaccttgagtcgtatctcgcctcgtggccggagcacatgcgctgaacgaagtggagtatggttccgagacgactgccgcggaaccatcagcaactgtacccaccaatcgtcgagaggattcgtagattatgaccgcacgcccccgcgccgtcatcatcggcatgatgggagccggcaaaacacgtgtcggtaaggaagtggcgcatatgttgcgtctgccgttcgccgatgccgatgtggagatcgaacgtgaagtgggcatgaagattcccgcctacttcgatgaatacggtgagccggcattccgcgaggtcgaggccgatctcatcgccgatatgcttgaggatttcgacggtatcttttcgctgggcggtggcgctcccatgacgccatccacccagcatgccctcgcctcatacatcgaccatggcggtcgtgtggtctaccttgacgccgatccggcggaggccatggaacgcgcgaaccgcgggggaggccggcccatgctcaatggcaatgccaactcccgttggaagaaactgttcaagcagcgtgacccggtattccgcgaggtcgccaacgttcatgtccatacccgggggcttacgcctcagggcgcagcgaagaaagtgattgatatggtatctgagcgagcagtgcatgttaccggatcggcaattgagccgtatgatgtggtcattggcgaaggtgccatgaatcatctggtcgacgtgctgggacccaagcccgccaaaatcgcgcttatccatacccagccggtgcagcgacactccgatcgtgcccgcgccctgttgcgtcagggcggctatgaggtttccgacatcgtgattccggatgccgaacccggcaagaccattaccgtggccaacggcatttgggaacgccttggcaacgaaggtttcacccgatccgatgccgtggtggggcttggcggcggtgccgcaaccgatttggccggttttgtggctgccacgtggatgcgcggcgtgcgctatgtaaactgcccgacctcgctgctggccatggtcgatgcctccaccggtggcaaaaccggcatcaacaccccgcagggcaagaacctcgtcggctcgttcta

SEQ ID NO: 2716 - DNA, 9503 bp, Unknown
  R36_18m  MAG No. k141_9465
gcacatcgaatcgtgcggcaaactcccgttcgcattcggcaccggccaatgcgccaatgctgaagttgctggagttcttgccaagatacgtttccggatcggcgtcgctgcgcacaaagtaatcggcgatgttgcgcagggcatctgccgcggactcgtccttacgggtggcctcatagcggttccgggtgtcggctatggcattcggatcggggcgtttgctctgatagatggcattaagccgtgccgtgacagcctcgatgcggcgttccgtgccggccgtggagtccaagcccagtatggccaacgtctgggcattgtgggaaagatggtccagcccttcctcgctgccttgctgtgcaaccgcatggatgagggttccgaagctggtggccacggagctggggcgaggaccggcgaaccggttctccagcatccagcacaccggacatgcccataggctgtcgaccgccgatggagacagggtgaccatgggtgcggcctgcgcatccgtcttgcctttccccgtttggataccgccagatgacgcaccgccagatgacgcgctatccgattgggccggcgattccacgaacgcccagctctgcggatttgcggcgcgcacaccatgctccgacaggagtgtcaacgcaaccgcggcgtcctttgcggcagcctgctgcggttgagcagtggccagaaccgcgcgggcggcgctgaccaacccacgtgggtcggcgtccaatccggccagatcatattcggcggatcctgtatgcgcccccactgtggtgaaaggcgcctgttgccggttgcgcggatagtattccggcagatacccgaaaagaaagtccgaggggctcatgctgtcgttccataccgcgctgatcatgattcgccgtgcacgggtcagcgcgaccaggaaacccttcttctcgcccgacagcacagccgcgaactgcggatcatgcccggttttgtcactttcttcaagcgctcccctcagcacgagctcggcaaggtcttcaccaccgaacatggtgttgcgcccggcgaggttcggccacacgtcttgctggaccaccggtatccacgcatatccccagtggcgtccggccgcgcctgccggcgtggtcaatgtcacagcgtcttccaccggccctatgtgggccaaggaatcggcctgcacttccatgccccgaacctgtgccatgaatgacgtgatgtctcggctggcggtggaatcatcggcgaactggaacaggcgcattgccgcgtccagccggtcattggccgtgcgcccctctgccgtgttgaataatgccgcacgctgccagaccggtgccagaccggtggcgttccaggcaacagacagtgcataacgcggctgtacgcgctggcttgccggcagccgctccaagccggaagcaacgctgcccaccagatgccacaggttcgcaaaagcgcgggcctgagggtcgttgccaagcaccgcatggatggatgcgagcgcagcctgcgccggcgcggcggcatcatcaacggcaagcatcacgtacagcgcgtcaacgccaaaggccaagtcatcgtcggacggttcaccgagtatttcgacagacactggcgacggaaccactgatgaggatgtttcacgacctgtttcacgccgtgtttcatggtatgtttcacgcaatgtttcccatgccgtcgtcagagaggtcagcatggcatcatccgtggcgagatgcgccagcgactccaacgaccccatggccgattcgatcggcgcaagccttgcgggacgcccttgaccgggtctgcccccggcactcaccaacgggccgttcatcaacgtgaccactctagtccttatatatgccgcgcaggaagccaacgtcatctggcattccgccatcccctcggcacgcaatcgggcaagctccacaagcgcgaacaatccctgcacgaaagtctcgtccttcaaaggacgggtgaccgacgaataccgcaccggtacaccatctcggcgcagtcgttcgccgaacagccgcacggcggcattgtcgtgggtgatgaccgccatgtcgttccaccgaatatgccggtcaagatgcgcccgcttgatgcgccagaccacatcatccagctcctcacgtgaggatcggtacaggccggcggtcaccgtgccgtccgcctgataattcgctgcatcgactccgcccagtatggcggtcagcttgccgggacgctcggccggaggcagcggctcgtcttccggcgagggaatcgacagcgaaatacgagacgcgatcacatcagccatcgtcatgtgcgactgatcagcgacggcactgccgccaaccagctgttcttccttggccttcagccgcccttccacggcacggcgcatcagatattccggatacgatccacggaaggtctgcaccgattcatccgggttgccgaccagcaccaacttgacgccggcattccccaactcctccaagaagcgcatgccggccagcgtggtgtcttgaacatcatccacaaccagcagccggggcaagcccaacgcctccatacgcataggccggtcggaatcatccgcgtgatcggcggcgaatgcctcatgcaccacacgagctcctgccaccagcaaatacgaggcatccaaacggtattgccccggatatgccgcgctttgggctgcaatatattcacggcgcaatgcgaaagccaaacgccattgcaccgacaatcgcgcgtcctccgtcacggcgtccaagagacgtggctcttcgtgaacgcctacaccgagctcgtccaatcgggccagcatatcgcgcaactggccgataaacgcatctgaaataccgcgagtgaacctatccgcgctggtcgagccgcctgccgacgtcggagacagcgaatccgacccttgttgcgagaggcttgattgtgcggaagcggccgagccgggcatctcgccggcaccggcatcgcgtatgagtttcgcccagtcatcctgggcaaagtagacgcgtagcaaatcacaggtgccgcaatcatctcccgctacggcatggcgcagatgcacggccatgacttgacgcagcaaagcatcctgttccgcaccgttcaacaatcgaggcgacggcaatccagttccctcgcgcgaagctgatatggcccggaatgccacggcacccagcgtggtgaccggcctggcctgcacggaaaacccgagctcacgaatcacccgattgcccaatgcgtcggcggccacacggccggatacggccatcaccgcctgcgtgccaccgtagcggcgcagccccgccatcaacaccgataaggcgaattcggttttgccgcttccaggcgtgccgacaatcagcctcgccgctccatcacggtcgatgccgtccagcactgttccaggttcaagtctcgtcatcatggctccagcctaaacccgaccgtcacagagggaaaaattttaccgaacccgacgaagaatcgtacccttgacggtatcctgtagaacgaatgcagggagagcgcattttccaaggagggagggaacagatggccaatattccgatgaggccgccgaagctgcccggatatgatttcgtccagatgttgggaagcggtgccaccgccacggtgtacctatataaccagcgtatgcccgcacgcccggtggcggtaaaggccagcgccaaaacccttgacccacgggccgctgccctgttcaaccgcgaggccaacttcatggccaagctgtcatcccacccgtacattctgccggtatatggtgccggcgtcacctccgatggccatggctacattgtcatcgaatatgcgccgggcggcacctacaacagcatcatgaaggcccggtccatgacctgcgagcaggtactcgacctcggcatcaagctgtcaagcgcgctgttcaccgcgcatcgcagcaatatcatccatcacgacatcaagcccagcaacattctcatcacctcgcagggtttgcctgttctgggtgatttcggtatctccaccgatgtgtatgaccgtaccgaaaccggattctcgccgccgtgggcaccgcctgaagtgcttcagcatctgaccaatggttcggaagccgccgacatctattcactggcggccaccctgtacgccatgttcgtcggctgctcgccattccagcacgattatcacccgcgttcgcaatcggaactgatttcgctgatcgtcaaccagccattgcctcgcctcaaccgccccgacgtgccggccgatgtggaagcggtgctgcgccgggccctgaacaaggaccccgaccagcggtactactccgcgttggagttcgcacgcgccatgcagcgtgtgcaattcgcatatttcgggcatgccactcccgttaccgtggaagggatgccggcctaccccaaagacatcgagcgtcggcgccgggccacggaccagcgagatcagaccacccgttcgtcacggcgatgggtcaaaccggtgggtattaccgtcggtatacttgcggcgatcaccgcagcggcactgatattcgccttcgtggtcgttccccgcatggacagcgccaccggatcagataccaaacaggtggcgacgcccggcaccaaggatgatgacaacaaccgcaataatcaggatgacgtgattaccgataccgcgaacgcccagattccttccccggagaatctgaacggcacctatgcggcggatgggtcatccgtgacgttcacctggacgaatccagacccgcaaagcggtgatacctatgcgtgggccatagtgcagggcagcaataccgaccagagcgcgcaaaccgtcacaacgtcagatcccacggtgaccgtcaacgcgcaggaaggctcgcagacctgcattcaggtgtccattgtgcgcaagaaccgccagatgtccgtcagccccgccatcgcctgtgcggccaagccgcaagagtgatccgctcgccactgccgggcataccaccttggcattgcgtatcgcatcaggcatgcgaccggcagtggcgaattcaccaaatggacaacaggaacggcaggtattggaaccgtaaagcgttgtcattacactagcaaccagagaaaccagggttcagggagttcagatggccacatcgtcccagtcatacgatcgtcgccgacgcatcagcgcggctttgcgccgccttatgccctccggagggcatacgtggacggttcccgtaatcacgctcctgctgcttctgggacttgttgccggcgcggtgatcatgagcaccgtcacgcgccgccatgtgcaactggacgatggcaccgtgtgggtcacttcgctgaagaaccagaaggccgcacgattcaacgtaaagaacaaggaggccgacgccggcgtctcctcctccgccccacgattcgacatcgcgcagcataatggcgacaccatcctgaccgaaacgaccaaagcctccaccatcaaggcatccacggtcagcaccggtgtcaagaccgacatcaaagccaacaccaccactgtggtcggcggggataccgtagccctgatcaacgagaagaccggcaatgtgtggaccggcttgtcggaaaaccttgattccgtggcccccaccacttccgatccgaaaatgaagctgggcgagggcgggcgcatcgcagtaacccacgatggcaaggtctacggataccgtccatccgacggtatggtgctgcgtcttgacaatcccagcagcgccaaggccaaaaccctcgaatcgctgaccgacggcaagcagcagaccgttgaaagctttaccgtcatcgggagcacgccggtaatcgcaaccggcaaaaccgtcatattcaagggcggccgcgtcgatgtcgacacgaccggcaccctcacccttcaggagcctcccaccgatgacgtacagtccgattgggtggccgcggcatcaccgagaggccttacgcttatcccgttgaagtccaatgccaaggcgaatttcatagccaacgggggcaaggcgaatccggcacgaccggtatcgtccaagggctgcgtgtactcggcttggagccagaaggccagcaactacattcgcgcctgctcccccgcggataccagcgtcaagccgcaaaccctcgaatccgtcaatactacttccgaattggtgttccgcaccaaccatcgccttgtggtgctcaacgacacggttaacggcaatgtgtggaaccctgaggattccaccaaagtcatcaaaatacagtggaacaaaatacaggccgagcagaccgagaaagaacagcagaacaacgactcggccaacaaccaccacgacttctccaagacctgttccgcacaatccggccaaatcaaagccgaggatgatgaaatcggcgcacgagccggttcggaacagattctcgacgtgctgcgcaatgacgagcagaccgattgttccgtgctgaaaatcaccaaggttggcgcaccaaacaacaaagacgtcaccatttcgccgatttacgacggccggtatctgcaactcgatgcctccgccacatccgcaggcaccgttacctttacttacgatatttccgatggccgcggccagacctcttccgccacggtgaccgtaaccctgaatgatggaggcaaccacgctcccgtacagttcgacactcctcccgagatcgatgtggagcagggagccagttataccgccaatgcgctgagcagcttcaacgatccggatggagacccgctcactctggtctccgctgtggcccagaacaccgaccaggtgcaggtgtccacccgagccgacggccagcttacgttcaacaccggtgcgctggcgtcgggacgcgtgggcgtcgaggtcaccgtctccgatggcacggcgaccggcaccggcatggtgtatttctcggtcaagcccgcgaacaccttggccgcggtcatcgacccggtagcgaaaaccaccgttcccaacacggataccgtcgtcaagctgtcctcttacgtgcatggcacttccttgcagccggcacagctgactcaggtggatacgcccaacggcgcttcgacgaccaccaatgcggcggatatgtcgttgacgttcaaggccaccaatcccggcacctattatgtgccctacaccattactcaaggctcgattccggccaccggattggctcgcgtcgaggtacagcccgccaccggcgaggccgccaaaccggttgccgccaacgatgtcgccctgcttggcgcggataataccgccattgtggagccgctcaccaatgacgtcgatccgatgggcggcgtgctgtccgtcaccacggtgagcgcaccggccgactccggcatcaaggttggtctcgtcagccataagcgcgtgtatatcactgcgcgtcaggtgcccacgaaacccgtcgcccttacctacaccgtggccaacgcctccggaaccgccaagggcaccatcgtgttgcagccaccggctctgaccacctcgaattcagtgcccaaggccagcaatatcaatgcccaggtgcgcaccggcggcatcgtgtccgtggatgtgcttgaccatgtggcctactcggatggcaccacggtcaagctcaagaacaacctgcaatacgacaaggagacgttcaagggtctggccttcgtctctggagacacggtccgctaccaagcatccagcgagaccggcaacttccccatcacctatacggttgaagacaatctgggtaatgtggcttccgccaatatcaccattaccgtgcataagagcgacgcagcgagcaaggccgcgccaaccccgcatgacgccgaagcgcaggttgccgccggacagaaggtccgcatccccatcacactgaccggcatagacacggatggcgacgacgatcagctgttgggtctgggcaacaaggcacccacgctgggccgcatatccgaagtcggttccgactacttggtctatgaagcgtatccggattcgtccggcaccgacaccttctcctatgccgtggaggattggaccggtcagcgcgcacaggcgcagatccgcgtgggcgtattccaaggatcgtccgactccggcgtatacgccagggatgacgaaatcacgttgaggcccaatacggccgcaaccgtgccggtcgcgcagaacgacatctccggcgacaacaccaatctgaccgtcgacaagcatgtcgaggtccaaggtctcgacggggtgagcgtgaaagacaacatgatctccttcaccacgcccggcagcgccaccaccgcctatatcgcctacacggtcaaagacaaggccggcttgtccgatacggccaccctcacggtaaacgtggatccgaatgccgccatcgagccgcctaccgcctacgactatcgtgtgccgtccgccgccaccatcgataagaagtccgtggatgtggatgtttcccagtggatcgccaatccttccggcacagccaatgagctcaaggtcggcgttcatccctccgccagcgctcacgctcacgtcaagggcggtgagcattcgaccaccatcaccgtcgacctgacgtcacaggcgcgagccgtgccttacacggtgaccaatacgaaatacaacatcacctccaccgcgttcatccaggtaccggcctatggtgtctttccgcccacgttgcgtcccaaggcaccggaattgaaggtcaattcgcgtgagaccattgaaatcaacatcaatgactatgttcgcgtcggtgccggcaaggaaccgtatatcgaaagcgctgattccgtcagcgccaccaaggcttccaactccgatttctacgtgaacgacaagaccctgaagttcactgcggcaaaagactacgcaggccccgcctccattacctttaccgctgtggatggcaagcagggatcggataagaccaagattatcaattccgcagtgatcactctccagatcacggtgataggccgcgatgtgccgccgcccacgttctcgtcctccactattgatgtcgaggcgggcgcgaaccccaagaccgttgatctgacggcgctcacccatgcaccgtccggcgtgtatgacgacgagaagcaatacacgtattccggcggaagctcatcgtccgggcgaatcaccgctaacctgtcccgttccggcagcttgcaggtttccgccaccaaggatgccgctcctggcaccaccgcgtccattcccgtgcaaatcgcatacggcgcgggcaccgtgaatgccggtgtgaccgtgcgcgtagtgtcttccacccgtccgctggcacgcgtcggcgacaagacgctgaagatcaaggccggtgccagcgatgccgtgaacgtgcttaccggcgcgtacaatccgttccccgattcctcgctgaccgtcatcagctgcaaggcggatgacgccgccaaactcacta

SEQ ID NO: 2717 - DNA, 7320 bp, Unknown
  R36_18m  MAG No. k141_9597
agaaccgtacgaagcgatgtatcagccgatgatggagatggtctggtgcatcagaagaaaggagtcattatggcgaagaaacgggtgctatgaagaggagtgagatatgcgttgcgctgacgattgagagtcgttagtgagctcgctgtgcgacacgcgagcagaaaacagttacgctaatcacacacttgtagttttggcgaaaaatagccgaaaaaccctataaatagttcgacacaccactgttgagcactagatatagtggtggagatgccgtattcttctagaggttcaaaaaacgacatcaatgtaatttcgtgtggcccacgtcgagtgcggccaaaatgcggaactcaggagagtgttcgccttataggaaaggggtgcccgatgggcgcacaggtgttggaggaaatcgtcaccgataacgagaccaaggtggccgccaaggcctccaccgtgctcgttgagaagcgtgatggtcgtgtggtcgacttcgaccccatcaacatcatctctgcggtcaagtctgctttcggcgacctgaacaaggaagtcggccccgaagaagatgccatgatccgtggtttcgccaaccaagtcgaaggcgaaatcaaggggcgttacgccggccccgccaagatcgaggacatccagaacctcgtggagcacgccctcattgacgcccacctgtacgatgtggctcgcgcctacaccaactaccgtctcgacaaggacattcagcgtgccaaggccactgatgtcaacgaggccgtttcccgcttcatcaaccacgacccgaccctgattcacgagaacgcgaacaaggattccaacgtctactccacccagcgtgatctgctggccggtgccgtgtccaaggccgccgcgttcaacatgctgccgccggcggtgtccaacgcccacatgaagggcgacattcacttccacgatgccgactactcgccgttcactgcccagtccaactgctccttgccgaacttctgggacatgttggccaatggcttcactcttggcaacgctccgatggcttccccgaagtccatcgccattgcggccacccagattacccagatcatgaaggacgtggcctccagccagtatggtggccagaccgccaaccgtgccgacgagcatcttgcccagtatgccaagaaggattacgagaagttcctcgaggaagctcgtgagaccatccccgacggcatgccagttgaattcgcccgtcgtcaggtcgagagcgccaagaggaacgagcccgccaagctgcatttcggttcccgcgaaccgctgccgatggacaccccgttccacaccgacgttgacgaacttgagcaggagcgtgaaatcctcgccaagattcgtacccgcaaggccatctatgatgccatgcagaccatggaataccagatcaactccaaccgtgtgtccaacggccagaccccgttcgtgactgtcggctttggtctcggcaccgactggttctctcgtgaagtgcagcgcgcgatcctgctgaaccgtattcgcggcctcggcaaggaacaccacaccgccatcttcccgaagctcgtctttactgtgcagcacggcgtgaacgccgacccgggtgacccgaactacgatttgaagcagctcgccctcgagtccgccaccaagcgcatgtacccggatgtggtgttctacgagaacatcgtcaagatcacaggctccttcaaggctccgatgggttgccgctccttcctgcagggttggatcaacccggagaccggcaaggatgaagaagacggccgtatgaacctcggcgtggtcaccgtcaacgtgccgcgtatcgccatcgaatcccacggtgacaaggctcgcttctggaagctgttcgacgagcgtatggaagtcgcccatcaggccctccagttccgcatcatgcgctgcaaggaagccaccccggtcaacgccccgaccctgttccgcttcggtgcgtttggtcgtcttggtgccaacgacaacgtggaccagctgttcaagaacgagcgtgccaccgtgtcgctcggctacatcggccttgccgagaccaccgcggtcttctacggcaagaactggattcgcgaccacggctgggatccggaaggcaaggagttcgcgctgtccatcgtcaagcgcatgaacgagctgtgcaagcagtggagcaaagcggagggctaccactattccgtgtactccactccggctgaatccctgactgaccgcttcaaccgcatggaccgtgaaaagttcggccgtatcgaaggcgtgactgaccacgacttctacaccaactccttccactacccggtgtggttgcagcccaccccgatggagaagctcagctacgagaaggacttcccgtactacgcttccggcggcttcatcaactactgcgagtacccgtgcctgcaggacaacccgaaggcgctcgaagccgtgtgggattacgcctacaacatcggcatcggctacctgggcaccaacaccccgatcgaccactgcttcgtgtgcggcttccagggcgacttcgagccgaccgaggaaggcttcaagtgcccggagtgcggtaactccaacccggacaagtgcaacgtcaccaagcgcacctgcggctaccttggcagcccggtccagcgcccgatggtgcacggccgtcacgaggagatcgcccaccgagtcaagcacatgagcggcgaaaccggtcgtgtgacgctggatgacggcaccacccgcgagtggttcgaagaggccaagtagggttattcgtgagtaggctcccctctctgaggggagctgtcagcaaagctgactgaggggagtccgaagagctattccgaagctcccctcagtcgcctacgacgacagctccccctcaaagaggggagctaatgctttccgcaaggagggaatcatgccggagttgcatacgaccaagcccgaacccaagcgccatgactttgcggccagcgagaccgggcgtggcccctccgtaccctccaacggtcttgccaacgatccgaaagccggtcaatgggatggccggcgcatgtccaagcggatgatcgccgactacaaaaccttcatcgtcaccgacggagaaggcgtgcgcaactccctttacgtctccgggtgccccttccactgcgtcgactgcttcaacgcctccatctgggacttccaagcaggccacgaatacacgcaaaaacttgaagacaagatcatcgaagacctgaaagcgccatgggtgcaaggcattacgttccttggtggcgagccattcctcaacactcctgtgctggtgccgctcgcacaacgtatccgtcaggaattcggccataccaaagatatctggtcgtggaccggctacacatgggaagagctcatgcgcctcggagaaacaccagacaagcttgaattgctgcatcttatcgacatcctcgtcgacggccgctacctcaaagaccagaaggactcgctgctgcaattccgcggctccagaaaccagcgcatcctcgatgtgtccaagtccctagaagccggcgaaccggtcatctgggccaagctccacgatcaagaacgagatatccccgaaatctatttgagagaccgcgaagccggcgaaggccaacaggcctcgtagtagcaggtccggaatgccgcactcagcaatatcgtcggaactgttggggaacgcccttcccgtgagcgaaatcaccatgcccggcgtcacgttgggcaggtggtcggactaatattccagaagaagtagccgggcgaagccgtccgcaggtatctgccagccgtcccgaaacggctcatggtgcctgaaggcgcacatacccggaagtcggaattaagaggaacacatggttgacatcgtcactgacgcgagcgtaaagcccgcttcacacccgaagcccctgcgtgtgggattggacatcggttccaccaccgtcaaggccgtggtgcttgatcagtccgattccctgaaagacaccctcttctccgattaccgacgccaccacgccaacgtgcgtgccaccgtggccggcctgttggtcgacatccgtaaagagctcgtggaactaggtcgaggcgatgagccgattcgcctgtctatcaccggttccggcggtctggcgcttgctgacaatctgcatgtgcctttcattcaggaggtcatcgccgaaaccgaggcgatcgacaaggaatacccgcaggccgacgtcatcatcgagctcggcggcgaggacgccaagatcacctacctgaagcccacgcccgaacagcgtatgaatggttcgtgcgcaggcggcaccggcgcgttcatcgaccagatgtccacgctgcttgacaccgacgccgcaggcctcaacgagatggccaagagctacgagaacctgtatccgatcgcctcgcgttgcggcgtgttcgccaaaaccgatctgcagccgctgatcaacgacggcgcggccaagcctgatctcgccgcctccatcttcaccgcagtggccacgcagaccattgccggcctggctgctggccgcccgatccacggtaccgtcatcttcctcggtggcccgctgttcttcatgtccgaactgcgcgccgccttccagcgtgcccttgaaggcaaggtcgacgagttcatcgtgccgaccgacgcccacctgtatgtggcctacggttcggcattgcaggccgacatggattccgacgatcagggccaccatttcgaggcccacacctgcgatgagatcctgaagcgtttggacgagctgaagaacctgccctccaacacgcccaccatgccgccgctgttccccaccgaggccgaccgcgaggacttcaacaagcgccaccacaaggaacacatccacatcggcaccctcgaaggcgcgcatggcccgcacttcctgggcatcgacgccggttccaccaccatcaaggccacgctcgtcaacgacgaccgtgaaatcgtctggtccagctacgccaacaacgaaggcagcccgctgaccgccgccatcaacatcgtcaagaagatccaatccgagctgcccgaaggcgcatggatcgcacgctcctgcgccaccggttacggcgaaggcctcatcaccaccggcctgcacctggacgagggcgtggtggagaccatggcccactatcgtggtgctgaaatggtcagccccggcgtcaccgccgtcatcgacatcggcggccaggatatgaaatatctggccatcactgacggcgtcatcgactcgatcgccgtcaacgaagcctgctcgtccggctgcggctcgttcctgcagaccttcgccatgtccatgggcctgacgattcaggaattcacgcaaaaggctctggcttccacccatccggtggacctcggttcgcgctgcaccgtgttcatgaactcctcggtcaagcaggcgcagaaggaaggcgcctccatcgaggacatcgctgccggcctatgctactccgtggtgcgcaacgccctgtacaaggtcatcaagttgcgtgattccggcgaactcggcgacactgtggtggtccagggcggtacgttcctcaacgacgccgtgctgcgcgccttcgagctgctcaccgaacgtcaggtcacccgcccgaacatcgccggcctcatgggcgcgttcggcgccgccctgaccgcccgcatgcactatcaggatgaggccgaccacttggatgtggtggttaaggccgatgggtccgaggaacagtccgaggctgagcccgcacccaagtccgagcccaaggccgcagccttcaagaagaccgagccggccaagcccgaagtccatgtcgttgtcgtggacggtgtgacccacaccgccagctccatcctgaccggcgacgcactcgacaacatgagcatgaccaccgagcgtgacgtgtgcaagctgtgccagaaccactgcaagctcaccatcaccacgttctctgatggttcgcgcttcgtgaccggtaaccgttgcgaacgcggtggtgacgccaagaagaagcgttccgaccgtccgaacctgtacgactacaagtacaagcgttgcttcgcctaccgccgtttgaccgacaagaaggccactcgtggcgagatcggcattccgcgcgccctcaatatgtacgagaactacccgttctggttcacgctgctcaccacgctgggcttcaaggtgatgatctccggccgcagctcccacgagctattcgagaccggcatcgaatccatcgcctccgaaaacatctgctacccggccaagctggtgcacggccatatcaagtggctgctcaacaagggcatcaagaccatcttctacccgtgcgtgagctacgaggagaacctcgtgcccaacacggacaatcattacaactgcccggttgtggccaactatccgctcgtcgtcggcgccaacgttcctgagctgcgtgaggacggcgtgcgctacatgcacccgtacttcaacctcgccaaccatgagctcatggttggccgcatcgtcgaagagtttgcgtgggccaacgtgacccgcgaagaggccgaaaccgcggtcaaggccgcctatgccgaagacaaggtcttcaagcacgacgtgcagcaggaaggtttgaccgcgctcgcctacatgaaggagcacaactgccgcggcatcgtgctcgccggccgcccctaccacatcgaccccgaaatcaaccacggcatccccgaaaccatctgctcgctcggcatggtggtgctctccgaggattccatctgcgaactgcagccgggggagaagctcaacctcaccgaattcctctcggaaggcgaagccgacccgcgctccaagaacgccgccggattccgccacgtgggagaccgcacagtcaccaagatgccgttgcgcgtcaccaaccagtgggcctaccactcccgtctgtacgcggccgcacacttcgtggcctcctacccgggcctcgaactcgtgcagctcaattccttcggctgtggccttgacgccatcaccaccgatcaggtggccgaaatcctggcagacaaggcggacgtgtacacgctgctgaagattgacgaggtctccacccggggtgccgccaagcttcgactgcgctcgctcaaggccgccgtcgaggaacgcgaagccaacaaggcccgcgaagccgccgcggccaaggcatcccaggccgccgcgacgaaggccgtgcaaggccccaagtccaccggattccgcacgaccggctccaccgcgccaaccc

SEQ ID NO: 2718 - DNA, 13103 bp, Unknown
  R36_18m  MAG No. k141_10128
aggttgcggggcacggcgtccaaggcgacaaaatcacgttggacgaggcgttttcgttgtccgaggaaaccggaaacaccattttggatggcttcatgccgaccatggcgacaagacttaaggccaccggcgtgcagccgcaactatggataaccagcaccgagggaacggcagaatcgacgttcttcaaccgtagacttgacgcttgcagggctggcgaacagtcgcgccgcacgtgttggttcgacttcgggttgccagccgacgaagatccggagaatctggacagcatcatgcgctatcatccagccgccggactcttgtggaacaaggcgcagttggccgacttccgcgaacagttccagggcaacccggcaggttgggcgcgcgcgttcggcaaccgtcgggacgagggcataaccgacagggcgatagacgaggcgttgtgggcggctacggtaacggcaccggtgacgcccggcgacttggacggccggccggtggtgttcggcgtcgcggtggacgtggacgggacgcacacgagcgtttcggctggcatcgccaacaatgacggcaccataacggtgcaattgctgagaatcttggacggcaccgggtacgcgccgaccgaactcacccgcttgtgctcgaagtacagcgctccggtggtgatcgacgcgcgcggcaccgccgccgatttgtccgaccggttgcgccacatgaccgacgacgcgggcgacccgctgctgcggttcgtggacatggacgcggccgactacctgaccaccggacagagtttcgttgccggcttggctaaccacgcgataacccacgcggcagaccccgagttggacgccagcgccgcgaactcggcgcgcaaatgggccggcgacgcatggcgcgtgagccgacgcggaagcaccggcctaacgtcaccgttggaaagctgcatgttggcggcttggggagccgcccacaggcccgaggaaacggggccgctgcaaatctactagccggtggcgttcggcgtcgcgtggcggcattatgcggcgttggacggcgggcttgtggcgggcttggcgcttggcggtgatacttggccgcatgaacatttgggagcgtgtgagaatggcgggccgcgtgctgacacgcggtgccgacgcggacatgccggacggcatcaagccgcccgcacgattggggaactgcgacccgttaagcctctcaaccgtgttccgtggcgtgcaagtgctgcaaaccgccatcaccggtttgcccatccatgaaatcaggggaggcgtgaagctcgacacggtttcctccatcgtgcttcagccggacgtgaaccgcagccgccgcgacttcctcgcggacatggtggcaagcatggtattggacgggaacgctttcgtgcgattggtgcgtttcgatggcgaagtggtctcttgcgaggtgcttccaccatccctcgtgaccgtgagagacgacagcaacgacccggccgcgcccaagctccgctatagctatctgggccatgattacacggccgaccagatcgttcattgcaagtttttgaacgtgccgggccggttgcgtgggcttgggccaatctcggcggcgcgtgaggaggtggaggccgcgcagatggcccgcacctacaaggccaagttctatagcgacggtagcaacctcaagggctatttgcagacggatgaaaaggtgacgccgcaggtggccaaggacgccaaggaggcgtggaaagccacgggtgaggccggcgacgtgaaggtgctcggctcgaaactcaaatacgtgcccttggacatgaaaccggcagatttgcagtttttggagacgcagaagttcgacaccactcagatctcgcggcttctaggcatcccggcgagcatcatgttggcagccgttgacggtagcaaccttacttactcgaatatcgagcaatcgtggatcgagttcgccgattacacgctggcggcttatacgggcgagatagaggaacttttcaaccgattgctgccgaggggccgcacggccgcgttcgactgggacagcagccgccgcgccgacatggccgaccggttcaacgcctacaagacggcgatagaggccgggtggatggacgttaacgaggtgcgcgcaagggaggcgttgccgccgcttatcccggcaccgcaaccggaaccacaggagcagccacaaggacaggagacagcggaatgaagcgtgaaatcggattacggggcgtgtgcctgagagcggccgaagagggcgacgggcgcacgttggagggtgtggccgttccctacggcagcgtgattagcacatgggacggtgccgagacgttcgacgccgactgcgtcttcgatgatacggacacggcaaagctctgctaccagcacggggagcttatcggccgcatcaccggcgcacacccccaagaggacggcttgcacatcacggcgcacatcagcgacacgcagcgcggccgggacgtggtggccctgttgcgcgacggcgcgctggactcgctcagcgtcggcttcatgccgattgagggcgaaaccgacaagcagggcgtcacccaccgcaagcgcgtgcgtctgctggaagtgtcggtggtgtcgtggcccgcctacgaggccgcgaagatcacttcgcagcgcagcagcgaaaacattcgggaaaccggaaacaacaggaaaggaaacgaaatggaccttgcggaaatcaacgacaagctgaacggcgtcatggacgagcagcgcaacatgaaagccgccattgccaggaacactgaccacgagcaggccaaggtgctgggcacggagtatcgcacggcgggcgactatcttcaggcactctaccgtggcgacgacgcggccgtgcagctgatgcacgagtgccgcgacctcatcgccaccggcgacacaggaaacacggtggcgtggattagggatgatttgcggctgatcgagcagcgccgcaaggtgaccaatatcctcacccatgacacactgccggccaccggtatgagcatggaatacaacgtggtgagcgaggacaccacggccgtggacaagcagaccaccgagggcgcggccctgaccttcggcaaagtgaagttcggcaccaagaccgccgacatcaacacctacggcggctacaccacgctttcgcgccagaccatcgagcgcagcaccacgccaatgctgaacacggccttgcgcgccctgaacaacgcctacgcgaaggccaccgaaaacgccgtgcgcacctacctgtacaacctcatcaagtcccagcgcgacgcgaccagcgacgccaacaagatcgacgcccccgccgcgttggcgaaaatgaccccgaacaactgggccggcctgatcttgaacgccgccgaagtcatggatgaccgcaacgcttcgctgacccgtctcgccgtttccaaggacgtggcgcttgcactggtgtcgctcaccgattctggcagccgattcctggacatttccggcaagggttcggacacgttgggcgcgttcgacctgaccggcgtcgtgggcaacctcatgcgcgtgccggtgtacctgctgccgaaggccccgaccggcaccgccgcgttcatcgacccgaccgccgtcaccgtgtgggaaagcggcggccccacccagctttccaacaccgaccccaccaagatcgtggacaactattcggtgtacggatacatggccgtggccgcgaccttcaccgacggcctgttgcccatcgcgttcccaaaagcgtgaaccagctcgcctacggccccagcggcacgatcaacggcatgacggccaacgtgaccgacctcggagcattgaggatcagaagcgacgcccttgacgctggcaagggactcaaatggccgttgggcacgctcaagccgggcacctacctgctgaccgaatcaagcggcaacctcaccgacgacaacgtgtacatcgccgtcttcgaccagtccggcaaccgactgcaatacgtggacttccagaaccatgccaaccggacgttcacgctccgtgaggcgacggactgcacgctcggcgtctacggcaagatccattccgccggcaaaccatgcgacatcgtgttgctgccaatgctggtggacatgaaggaaaccgtgaccgcttggcagccgcccgcgacactcgacgcgaaagcgattgggggggggtggcaccagaagtgaatcttttgactaaccccggcttcgaggaaggtcttgcacactggaccaagatcaccagcgacgccaacgtcttcgagaccgacccgaacggtgcgaacatcagacctcacagcggcacgcgaatgctctatgtcggcgcgaaatcggagacattcgagattcaaggcagcgttatacacgtgtcgttgtggtacacgaacgccgcagtatccagatccctgcacgtgcaaatggtgttcgatgacgggactccacaggatctcatccaattatggccggccgacccaccgacgatctggaaacgttacacagcaaccatcaaagtgccgccaaacacaacgaaggcaaggctcatcatcaatacggagttcggccgcatcgatgatgtggaagttacggaggaaatctgatggatgatctgaccctgattgaggtgatctgacatgtccgacgaacagttgttggcccagctgcgcaacgaagtgagcgtgcccagcggcgacgatgaacgactaaccgcgaagctggccgccgcaaaggcatatgtggcaagcgccgtgggcgcgacgtccatcaaggacgaagtgctggccgattgcatcgtgagttgtgctgctgacttgtacaacagccgcgacgcccggttgggcgtcatggacgttggcgacggcaccaccgaaccgttccgtgtcagcacagacccgttgcgttcggtgtggccgaaactcaatgcggctggcgtcctgaccgggagcgtggtgatcgcatgagcagccaagtaacacgagagcgcgaagcccttatggacatgctgacggacgccatgggcgacctcgtttgcgtcgtcaccatcgacgcgcaggacgcccgcccgttgccaggcaaaatagcggtgctgatagacccgccagaactcacgttcgagggctggcatatgcagaccatcacttggacggtgaacctcatagccggcaccatggccacgcagtcgctcgccctggacctgttgaccgacggcgtgcaacgcttgcacgaccgccaagtgaacttgcgggacgcgaaaccaagcacgttcaacctgaccggagggggcagcctagccgcctacaccataaccctcaacccgttggattagaaaggacacaatcatgactggaaagatccgcacgctcggaccaggcatcttcaaaatcaccgacaccgcaaacggcagggacttcagcgccgacctgaccaaggcgcagctgaacccgtcgaacagcagcgacgacccgaccacctttttggacggatcagaggaaacgaacaccacgaccacatggaccttcgagggcaccgtcgacgacgacttcagcgaggacggtctggccgtctggctcttcgaccacaagggcgcgacgctgccggcccagttcgtaccgaacaagaccggcaagatccagtggaccttcaacgtcaccatcgcgccaatcgccatcggcggcgacgtcaaatcgaagaacacgaacgatctgagcttcgccgtcacgaacgtcgcacacgcggtttactcgggtaaatgatggctgccaaggcattgatggtcgtcggccagaaacgcttcgtgcagacgatgcgcaaggccggcgcggacatggacgacctgaaggaagtgaaccgcgaggccgcgcagatcgcactgcccgccgtccgtaacctcgccccacgaggcagaaccggccggctggccggcagcctgcgtgtcggagcgacgaaacgcgccggcgtcatccgcgccggccgcaaggccgtgccatacgcgggcccagtcaactacgggtggccagcccgccgcatcaaaccgcgtctcttcgtcaacaacggcgtcgcttccaccgagggccaatggcaaaaggtctacaaggacttcatcgacaagacattgaagcaagtgaaaggaaaataatggcaaccacgagaatcacctacatggacggtaccagcgaactcgtgccgatcacgatgcgcgctacatgcaaggccgaggcgcacgccatcgacgcgggctgggggccaatcacccagtcccccgtccgttccggcgcgtacgcggcctacgcggccctgcgcatgactgggcgcaccatgcctgatttcgagcattggctggacaccgtggcgtccttcgaccttgcgtcagcgaaggaggagccggaagagggaaaccctacggactagccgcatggccccaagactcgctcggccgtctctcgttcctgctggcgagccgtttcggcggcacgccatggcagtggaggaacgaggccgacgaattggattggggcaccggactggccgaactgctcaaggaagcggaagaatcgcagaaggagtgaaccatggcgcacagcgcgatcatgagcgtgcgcatcaccggcaacgccgatgatgccgtcaaggcgttcgagaagaccaccacgaaggcggccgctttcggcagcgccatcggcggattggccgtcaagggcgtgaccgcgctgtgggacacggtaaagggcttcgccggcgacgtggtgaacatgtcggacagcaccgacaagttcatgaacaccatgagcttcgccggcatcgacactaaagccgtgcaggcagcagcgaaggaaacacgcaaatacgccgacgccaccgtgtacggcctcgatgacatccagaacaccaccgcgcagctcgcggcaaacggcatcggcaactacatggaactgaccgaggcggccggcaacctcaacgcggtggccggaggcaacgccgacagtttcaaaagcgtcgcgatgatgctcacacagaccgccggcgcggggaaattgaccacggagaattggaaccagctcgccgacgccattccgggcgcgtccggcaaactccaggaggcgctgctgaagaacggcgcgtacacgggaaacttccgcgacgccatgtccaaaggcgagatcaccgcagacgagttcaaccaggcgctcatggacctcggcatgaccgacgtggctaaacaggccgcgacatcgaccagcaccatcgagggagccatgggaaacctcgaagcggccgtcaccggcggcctgaccgacgcgttcaacctgttcaaaccggccgtcaccggcggcatcaacgcggccgcggcggcagtcacgaacctcgcgcagaccggcacgcagggattgcagacgttcttcacacaggtcaaggacaccggagcgttcgccgcattgcagacggccgcacagtcggccggcggcggcctgcaatcattgtggaccggcatcatggccgtcgtgaacgcgatgaccggaggacagccggccggaacctcgttcggcaacgtgctcaacgccgtcgccacggccgctcagacggtcggcggatggctgaagaccgcaggcaactggatcagtcgaaacacggatctcgtgacgccactcgtggccgccgtcggcggagccgtggcagccgtcaccgccgtcaccaccgccatgcggattgccgccgtcgctcaggcactgctcaacgcggtcatggccgcgaacccgatcatgctggtaatcacgctcatcgccgcgctcgtggccggactcacctactttttcgcctgcaccaacaccgggaaggccgtgtggtcgagcttcacgggtttcctgtccggctgcgtgcagggcatcatcggcttcttctccggtctcggttcaaccatcgtcggcattttcaactcggccgcgaacggtgccaggaacgcgtggaacggcgtagtcggctggtttcgtggactgcccggctccatagccgggtgcttcggcaacgccggcagcatcctgtacaacgccggagcgagcatcatcagcggtttcctcaacggcctcaaatcgatgtggagcaacgtgaccggctgggtcagcggcatcggcgactggatcaaggaacacaaggggccgcccgcctacgacgccatcatgctcgtcaacaacggccggctcatcatgaagggcttcgcacgaggcctgcgcaccggcttcgacaccgacgtgcgccgcaccatcggcagcatcaacggccgcctatccaacgtcgtgttcaacggcggcaccaccgccggcagtcaggcggccagtacgaccaccgttttcaacgtcacgttcaacgcgcccgtggaccgcgagggcgtggcacgcgaaatcaggaagattctccgcgactacgaccggaagcgaggcaactgatggcgcagcagtgtttcatgttccttgactggggcgacggctgggttgccgtcaacgaccacgacaacgacgtggccgcgttggacggcttcagcatccagtggggcaccgacggcatcgaccagcagcccgacccgtccgtgatgaccttccggctgcgcgatgcgaccggttggctcaccggccgcgcgctcacgctggacggcgcgcgcgtgctcgtgcagatctcagaacagcccacatggggcatgctccgcgacgacatgggcgcatggtcggcgcagcgcatgcgtttggacgcgatgcaccaggcatacacgcccggcaacccttccgacaagtcaagcacggcgacgacattgttcgacgggctggtgcagaacggcggcgaagcccggccacatggcggcggctggctgttggagctcagcgcctccagccgcatgatcctgtggaaaagattgcagaaacaagggcccgtatcatccgatgcacgttacacgggcctgcactgggtcggcaccacagcagaacggctgacggagctcaaccgacgcgccaaggaggcggacgcgccacaggccaacgccaacggcctcgacaccaccgcatccgtggcaccctaccggaccgacgactacccgtcacagctcgccctgctccaccgtctctacgcgcactcacgaatgtggccgctgtggtatgaataccccgaccgcgacgcgagccgcatcgactacatgccgttcggcgcgcccgccagcatcggcatcgacgacacagcccgacttaccgtgaccgactggacgggcgagacgctggacggcctggacgccgccgacgtcatcaccgacgacgaacaatcattgacgatcccggaacccgtcacccagttcgttattcagggcaagacagcgaaagcgtccgacggcgcgcttgagttcgaccagcacgaaactgctttgacggacatgggccggctgccggcgaacctgaaggccacgcaatccagcgtcaccgttgaggccgacgtggtgacggccgacgagtcgggcggcgtatggggccgcgcgggcggcagcgtgtgggccccgaccgacgcggatcgtgacgcgttcgcccgactgctcgtcaccatcgaccggcggttacggccggcaacggtggtgttcgacggccgcaagctggacccggccacgcacgcgcgcctgtatctcaccgccagttccgggccgctcgtcatccagggcgccacgtcgtcacgtctcaccggcgacgacggcatacccgccacgggcggcgcgtgggcgaccatcggcggcacgctcacctaccagtggtcgagcgggcggccgttgctccgcaacgaggtcacgttatggccgttgcccgtcaagaccgataccgcgaccacgtgggcggatatgggtgcatggcccgtcacatgggacatgtgccggttcacactagccgagctcgcgttaattcgacaattctcacaaccaacacaggaaggatcacaaggatgaagaccacaagcgtgtacggcatcccctatatcgaggccgatgacctcgtatcgtccgcccccacacagttccgacagacggcagaaggcgtcgaaaaggtcttgcgcgaaatcgacgcgcgagcgacccccgaaggcgtatcgccagtgactgcaaccacgctggagacattggagtcactggaaggcgtgaatggacaatcaggcgtggtcaccggtgacaccatgcaacgcaatggtctgtactaccgtcttggcgacgcctggcaccccgtggagattcgacagaaacgcacgtggggctgccggttcaaaagatccgcgaacgacctcatcctgaacaacggcgacacatacatgatgttctccaacgtgaccggaagcgccgacatcaagacgactgccaatagcaagggcgcgtatgcgattctgccggccggccgatggctggtcaaagaatacatgcagttctccggtatcgcagacatgacatggctaagcatcggggtggcgacggtaggaggcgcctcgtcactgctcccgagtgcggcggaatcaagcacctctggtaatgcgttcagcgcaattgagtgtgtgaccgtcatcgaatccgacggcaccggcggaatccaggtctcgttccactccaacaacagcggcataatgcgcgtggccggctatctcaacgtggtggagctatgagcgaggaagtaatcgtgtcggtggtcggcgtcgccggcgtggtgctgggcgcgattatccagaccgtagcaaccgcctcgcgcgaccggttggaggcgtaccggctcgcgcaacagatgcagaccgacaattccctgttgtggcaatggaaccgtgctctcgtggatcacatataccggcgagcaccgccaccaccgcctgagccaccggaagggcttttcgagcatcgagacgattgaaaggagacaaatgaatggtcaatagcacatggataggcagccccaaccactacgcgggacgcaacggctacgaggtcacgcacatcaccctgcacatcatggtaggccgtctcgccggcaccgacgcgacgtttcagaatccggtgcgccaggcgtccagcacatacggcatcggctccacgggcctgatccaccagtatgtgcgagaagctgacgcgccgtggaccgacagcaactatgcgtcgaactgccagaccatcagcatcgagcacgaaggcggcatggccggcgtcccctgcaccaaggcgtgcatggacgctagcgccgccttgtgcgcggacatcgcgcgccgatacggctggccgcgcctatggcacgacgggctaaaaggcaacgtgtggttgcaccgagagataccaggcagcgatcacgcaggatgtcccgaccgggccgcgaatggtctggacgtggattatgtaatcaacaaagcaaaccaacttttgacaggagcaggaacagtgagtgcgcaagacctttacgagaccaagggcaacgacggccgcaatctcttcgatggaatcatccagacccggaacgagctcaaggaccgggccgccgacgcgttgatccagaccaagggcaacgacggccgcaacgtgttggatagcgtcatccaggcgcgttacgacatagccgacctcaaaacccagctgacggcgcagaccgccgcgatcgaggcgcttagcaaggcgctgggagcgaacccggccgacatatccaagatcgtcgcggacgccgtgcgcgcgaagctggactcgctggaaatcagcgtgaccgccaccgacaagaccaccgaaaaggaaggatagccatggaatacgaagaacaagtggagggcggcgacacccgcacccccggcgtcagcgccgcgaccatcgcccgcgccgccgtgctgctgctcggcttgattaacgcttgcctggtcatgttcggcgtcgataccatccccatcgctgacgagacggttaaccagctcgtcgccctcacatggaacgtgggcgccgcgctatgggcgtggtggaaggacaacccaatcacgcccaagtcgcgcgcgcagcacgcggcctagccggccaacgtcaccgcgtccagaccgacgcgcagacggctgtccggcatcgccacgtagatttgcgtggtctccacgctgctatgtcccagcagtttcgagaccagcagcagatcgtgcgtggtctcgtacatgcgcgtggcgtaccggtggcgcagcgagtgcggcccccaaccgtccggcagcagccgtgtgaggtggcgggacacatacgatttttcgacgtgtccccgccaccggccggggaacagccaaccgggcgcggccgttatccgcttcgccaggtcctcgcttatgggcactatgcgctgtttgtcgcccttgccccgcactatcagcgacgggccggcgtcgccttccagcacgtcgcgcgagtggacggccgcgatttcggacagcctcaacccggcttctgctccgagacgcagcatgagccgttccacatcgttcgcggcgcacatggcagcgtatatgtgcacgtcggggcacgggcggggatgcggccgcgtcttgcgcaccttcggcagcgcggcggccggatcgtccgcgcgccggcccgtggcatgcagccaccggaaaaaaccgacgagcgtgtttcggtagcccttgcgcgtctccgccttccatgattgcgaggcggtccaatgcactagatcctccgacgtcacgtcatagggcgatttatccaggcaccgcgccgcgtggcctatcttgcaccgccgcgtgttgacggtgtcctgactgaggcccgccgccgtgagcgattcgagccatagggtgatttcgtcccgccactgagcagggggcagctttttgtgcatactcacggccggcatccttggcggccggcggcattacgccgctaggataaaatcaaataatcgggcttcatggatttgaaccgtggacctctgggcaacaacgttaccagaggtccacggttcaaatccatgccccgctactgcgggcgaggccgtcacgattattcgtgacggcttttaggttatacgcc

SEQ ID NO: 2719 - DNA, 3966 bp, Unknown
  R36_18m  MAG No. k141_10172
cggttgcgccgttcgccgccgcgccctcagcgcccgcctcggcattcgccgcgttcgccgattcaaccgactcattggagtcaccggtaaacacttcggcatcgtcgtaggccttctcttcggccgctttgtcttcgaccggagtgacttccgcgctgtccgccaaaagtcggtgggcttcttcattgtcatcgtccaaggacttggccacggaggtcacgagtaccttggttttcgacgcaagatccagcgcctcgtccacgctgccgttggccgcctcagcctcgaccttggcacgttcgcgcaggcgcttggccagatcggccgaatactgcgaagcgtcacgttcgtccaaatgcttgaccacgccatcggacagttgcgaatcgacgtgatacatcgaccccttgccgagattcacggagaaccagtcggcgaaatgttccagcagccagatacgttcggtgttcacgccggtactcggcaaatccacgacttcggtgatgcggttacgaccatccgtgcaggtggcctcgatatccgtcaggttcacgtcggcgcgtacgtgcacgcccagcgggtaggcgatgcggtgcatcatttcacgcacgcggaaggagccggtgccggctcccaggtccaacatgccgactcgtacaatcacgctggctttggcggcgataccggcgtccaccaccggtttttcccaatcgcgtgcaatatcttccatgtccagcggaatggagtgggtgtggaatttacgtacagccgttgcgcctttcgcttcgggcgcactttttttcttctgttcgctcacatccctcattactactccctgcctcccccgccggcaatcgtaaggcgctcaaatcttccgcgaatcggacagtgtctcatatgctgtccgatattcggtctctataggtggacaacttggcgcactatatggactccgtaacgcaaatagcgatttcgcggggatacactattgcccacacaacaaccacgttgaatatgggctgtgggctcgcaacgactggcctcaacaactgcggaggagccgcagacgaccggtagaccgagcaacctgttattcggcaaaggaggttatatggcaacacctgaagaacagatcactcccgctgacgccgccatcgtcactaccgggaccggccgaaagggcccggaggagcatgatcttcccgaaagcctgaagtacgacatggatctgtgtcttgagatcctgcgtaacgtactgggcgaatacaaccccgaactgctgtctacgttcgacaccgtgcgtcattacgcggtggaggccagcgccgagcatttcgccgagctgaaggatccgaaccccgaccaggatggcctgaaggaggccgtgaacgtcatcgacaacatgacgttgcacgacgcccagctgctggcccgcgcattcgccacgtatttccatctggcaaacctgtccgaggagaactaccgcgtttccgtgctccacgagcgcgagaacaacgtgcccgttgaccaggcggtcgatccgatcaacgagctcaccgtcgcctaccaccagctcatcaatgagactggcccggccaaggccaaggaactgctcaaccagctcgaattccaccccgtcttcacggcgcaccccactgaggcccgtcgtaaggccgtggaaggcaagatccgccgcgtttccgaattgcttgaggagtacaagcgcctcggcggctcggataagaaggaatgcctgcgccgtctctacaacgagatcgacgccctgttccgcacctctccgatcgcgctgaagaagccgaccccggttgaggaagcggacacgattctcgacatcttcgacaacacgctgttcaacaccatccccaaggtctaccgtcgcttcgatgactgggtcctgggcgataaggccggtctcgtcgagcccgcttgccccgcgttcttccacccgggcagctggatcggctccgaccgcgacggtaacccgaacgtcaccgccaaggtgagccgcgccgtggcccgcaagttctccgatcacgtaatcgccgcccttgaggaagccacccgcaccgtgggccgcaacctcacgatggaagccgagaccacgccgccgagcgccgagctcaagagcctctggagccaccagaaggaaatgagcgagcgtctgaccgacaaggccgccctgatctccaccaaggagatgcaccgcgcggtcatgctggtgatggccgaccgtctgcactacaccatcgagcgcgacgccgacctcatgtaccactcctgcgacgacttcctcgccgacctcaaggtggtccagcgttcgctggccgccgccggcgccaagcgttccgcttacggcccgctgcaggatctgatctggcagaccgagaccttcggcttccacatggtggagatggagttccgtcagcactccgtggtgcatgcccgcgcccttgcggatatccgcgagcacggtctgcacggcgagcgcggcgaactgcagccgatgacgcacgaggtgctcgacaccttccgcgctctcggtgccatccagaagcgcaacggcctcaaggccgcccgccgctacatcatctccttcaccaagagcgcccagaacatcaaggatgtctacgagctcaaccgcttggccttctcccacccggaggacgtgcccaccatcgacgtgatcccgctgttcgagcagcttgaggatctgcagaactcggtggacgtgctcgaggaaatgatcaagatccccgaggttcaggctcgtctgaaggccaccggcaacaagctcgaggtcatgctcggttactccgactcctcgaaggacgccggcccgacctccgccacgctggccctgcactccgctcaggagcgcatcgccaaatgggctgagtcgcacgacatcgacctgaccctgttccatggccgcggcggtgccgtcggtcgtggtggcggccccgccaaccgcgcggtgctcgcccagccggtcggttccgtcaagtgccgcttcaagctcaccgagcagggcgaggtcatcttcgcccgttacggcaacccggtgctggccatccgccacgtcgaatccgtggctgcggcgaccttgctgcagtccgcgccgagtgtggagaagcgcaacaccgagatgaccgagaagtatgccgacatggccgctcagctcgacgaggccgcgcacaaccgcttcctcgacctgttgaacaccgacggctttgccccgtggttctcgatcgttacgccgctgaccgaaatcggcctgctgccgatcggctcccgcccggccaagcgtggcctcggcgccaagtcgctcgacgacctgcgcacgattccgtggatcttctcctgggcccaggcccgcatcaacctggccgcttggtacggtctcggcactgcatgcgagaagttcggcgatctggagaccatgcgtcaggcttacgaggaatggccgctgttctccaccttcatcgacaacatcgagatgtccatcgccaagacggatgagcgcatcgccaggatgtacctcgccctcggcgaccgcgaggacctcaatgagaaggtgctcaacgagatggagctcacccgcaagtgggttctggccatcgtgggcgacaagtggccgctgcagcaccgtcacgtgctcggccaggccatccgcatccgctccccatacgtggacgcactgtccgtcacccaggtgctggcgctcaagtcgctgcgcaagaaggtggacaaggaagagctctcgcaaagccagcaggccggattcatctatctcatcctgtgcaccgtttcaggtgtcgccgctggcctgcagaacacgggctgatcttcggatgaccgattgacaaaagcgagcggggaggttccgtgccgatcgacggcgcgggcctccccgttcgcgtcgcacggccctagactggccggcga

SEQ ID NO: 2720 - DNA, 6157 bp, Unknown
  R36_18m  MAG No. k141_10230
caactggcagtgcggcatcgacatcgccaacacgcaggcagacttcgttgtcgtcggcaccacatggggcacgggacaggtgtataacaactgtctcgtgtccggcgtcaacacggacgccaaccgcatgatcgcccaagcgcaggcatccggcaagaaattcggcctctaccactacgccatgggaggcaacccggaggccgaggcccggttcttctacgcgaatacgtcgaactattggcgtcacggcatcgtggcgctcgactgggagatggacgataatccggcgtggggtaactgggactgggtgcgccgcttcatggcggaatgcgaacggctctcgggcggcgtcaagccgctgctctacaccggccccgtggccggcaccatccccggcgacatccgcgccaactacggtttgtggatcgcgcagtacgcgaacatgagcccgaccggctatcaggccaatccgtggatgctgggcgcgtacggtgaggccatgcgacagtacagtggcaccggtgtcgtcaacacgtggagtcccatcgatctcgacgtgttccgtggcgaaggctggcagtgggatttgtacgccaacccgaccggcggctccacgccgccggccacaccggccgcgcccgtgcagccgaacaacccccagcccactcccagcacgggtggcatcagccacaccatgcagtggggcgagaccatctggggactcgccgtcgcctacaacgcatggcccctgttcgcatggcacacgcccagcggtgacatcaaccgctactacgtgggcgatgtcgtcacctacggcggcggctctactgccacccccgcaccgtccaccgtggtctccaagaccctccagtggggcgacaccgtgtgggagttcgccacctcacacggttacagcgtcagccgctgcaccgtcccctccggcaacatcaacgtctactacgtgggcgacacggtgacctgccgctgagactcaacagatgccgccacccgcttgaccgggtgacagcatcaccccatcatcatcccttattgatcggagcaaacatgaccgacagcaaaaacacgaccgacaccggcgaaacgcttcccggcgtcgatgtgagcgactggcccgagacggccgacgtcacccatgacgtgcccgactggctcatccccagccgcgtctacgatgtgctcaaatggctcggcctcatcgtcctgccagcactcgccctgttcgtgggcacggtcggtcccgcatggggctggactcacgtggacgcgatagtgaccacgctcaacgcgctcggcatcctcgccggcgcgctcatcggcgtcagcgccatcaaacaacgcctcgaccgcgccgcataaccacacatagttcggccccgtccggcatcgcagacagctcgcacagagctcgactgctgccggacggggccgattttctaattccctagcagatcgggccggacaagtcgcgttcgccagagagtcggaagacaaagctgattgccgtcattatcattcttatcgcccccgaaatcggttatgataagtcaccgatttataacacataatcggatatgtgttataaaacacgtccgtatgtaacgcctacagctgttcgtcatcggtgtacaggattcgtgcgccggagagctcccgtgcgcgttgggcgatggcacggtgccacgcggcgggcatatcgccggtcgattccggctcggttctcggcacgatgacggcggcctcctcaccggcttcggcggtgacggcggccgtgtgccgcacttccgcgtcgaagcggcgtttgagcccgcgcaggtcggtttcgagattgtccggcagataccggtcacgttcccagcgcttcacgctgaactcggcgacgtcccaccgggcggccagccatttcgtggtcaggcccatgctctcgcgcaggcatttcatctcggcgctcgtcatcgtcatgatgcatcctccattttctgcttcttcaatgattctgccacggcgacgctggcggtgttctccacagcgagcctgttcatgtcgtacctgtcaagcatctcacgggtactccagccacccgaggccatgatctccctgtcggggattttgcggcgtcgtgcttccgtggcgaacgaccggcgcaacgagtgcggcgtgactctacgcgccgaacccactttctcgcccaagacggccacgacgcttgcgagctgcggataggtgacgcgcttgcccctccagacaagcagcggccctttccgacgttcgcctatcgctcgttccaccgccttggcggcgcgttcggacaagccgacctcctgcatccaatcgaacttcctgttgacatgcaccaccggcgtatcgcccacacggtagtagtcggatatgtccagtttcagcggttcgcttgccctcagcccgttgagcaacagcagacaacaagccgcgccgacgaaagccctgtggtcggcctcagccaggtcaaggaatggcgcggcctgttccggtggaagccacgagccgtcgctccaacggcgcagcttgggacgtttcacatgttctgccggattgcgttcgatatactgctcctgccacaggtactcgtaaaagcagcatatcggcacaagctcgctcgccacggtggccggctgtttgcccaaccgctctatcctccacaccctgtaggcatcgatatggaaacgacggatctgcagcacgttcaacctgttgtcggaacaccatttcagccacaagcccagcacccgcttatacgcgggtcggcttttcgccggaacgctcgccaagtattcggctatcagccgtgtcactggtgtgtccatacgctcaccgcctccttgatgaccaacggcccgtcttccgggcctctcacgaacggagcgacccattgccgtctgcgtttggaatgcgcaggcccgtacgcttggttgcgccagaacccacggacgaaataccggtactcgcatcgtcttctcgaacgctgcgcccattccgaagattggcttctgggccccggacgcagcactatcatcttcactttcgcggactggcgttccatgctcacggggcgggggccgtcccgttccgtccgccaaacgcacggtttgaccgcgctgactcgcggctcgcgcatcaacgccatagtcacgtcaagcaccacgcccaacgcggtgggcaccacctccacgtccatcggacaaatgggaaggcgcttgtcgagaaccgtgcgccgcaccgtatccgggtccgacgtgtacaggcgcaaacctatccgcccagctgttgcctcccatgcgacggcgttgaccagcatcgtgccaaggttcgtgatgcatgagacaccgtcctcgtacacgacgaaaccgttggtcgtgggatattcggggggttcaggcaactcgcccgacctgaactgggcttccacgactttgcacatgtcgctgttgacccaccacaggctcgccgcctccaaaccatccaactcgccgtacatggaatcgaccagttcgcccaccggcagcaatccgcccgtcttggccaaggcggcgcgttgccggccatcctctaccagatggtcacggatgaccggcagccaggatggggtgagccgcagtttcctccgccggctcatcgcgctagtccagttcggtggcgaacagcgaggtgttcgggctggggttgtccgcgtaatcgccttcgccgttgatcatgtcgttggcgtagtcgatgaggtaatcgatgtcctcgacctcgtagaccggctcggatgcgctgagatcatgcttctcgagcagtgccgcgtaggggccgtcctcgggccacacatccgaatcgtcgttgagattctccagctcgccgacgttccagaaatcgaggctccagtcgggcgaccagtcgtcgccgtcccagttcctcagctcgaggttgacggtgcgcttgtgatcggtgaatacggtcatgatgactccttaaaaacgtgaaaaaaggtgtgctttcgcaggcccggccccgcggccgggcatactgctgccaaaaagaattcaattcgtgtcgaagattgggcttcgaaccgccatccatgcgcccatcagcatggcagcgaccggtatgattctgctcctttactcgtcgcgacccgccgccacgccgtcatcatatgcctccttcagcaggtcaacgatctgcgcgagctgttcgggcgtgcaggtatcaatgagcgacggcgtgagcctttcccacagtcgtccgaacgtgagggtgttgtccccccatttcgacaggcgtcgtacccgctcgcccccggcgatggagttctgctccgtcctcgtgagaccgcccatggcctcgcggttgatgacctcggacggtttgacgcgcctgtcgtcgggatagggctcatgctcgtcgaccacccagtcgcgtccgatcttgtgggcggtgcgaaagcccccgcgctgggcgagctgtctgaccgacaccggggccttgccatgccgccccgcatattccttcaatgtgatctccgccattatgctctcctttatcagcgctgcgcgtcgcggtagtagtcgatcgcgccccgcacgttgccgctgtcgcggttgtcgatccaccatgaggcgcgcgtctcggccttggccccgtcgatcacctcgctggcctgccggcgaacggcttccggagcgtcgacgggaatcatgtcggcggcgatttcgaggccggcgatggcctcgcggcgaatggcctcggcccaggcgacctgcttgtcgctgccggccaaggtggcgcagccgttgtcggcgcaccattgggcggcttcggcctttttacagtcggggcagtcgattgtgccataccatgcggccttgcggtcgcgttcgccgtgcacgttggtgccgtagatctggacgttgtcgctgtgtccgcacttgtaggtgatgtatgtgagtgccattttggggtcctttccttgctgacacctctataatacatcgcttgagatgtattatcaagtaggcaatacaccgcgcgtgtcgaaatgctagactggaccagtccaccttgctgacactcggaggacaatgcaaaagccccgcaaccatccgatgcggggctcaatttttgcccacattttgcccacattattccgggaaaccgagggaacacgagggaatcggcgggaataagaaaagccgctcaaccctgctcccgcaaggcaaagcggctattttccactggtcgtaaaatcaaggtgcataaactcggggactttgtaccacttgaccgggtagccggcgccgtaggcgcagaacacagaatcggacgtgttctccagattggcttccggatcgtacgcggcctcctcgatcacgcgccgttcgtcgtggcagggccggtagccgccgaacgaggcggagaagcgcccacggccgtgcgtatacgcgttcacgtccatcgcgtagtcgcgcatctcgctcaccggtgccccgcctgcgatgacggcgtattcgccgtcgtccgtaggcgggtcgaacgtgccggacattcgttgcacgtcggtcatggcgtgaacgacatgcaccaaaggctcgtcaaggcgcggcgcatgatccgcaggcgcatccgggagggccaaccgttcatgttcctcgacgaggggctcgcggcagccggcccagtgccgtccacgaacaacctcgtcgaatcatggaacgcgcgcctgcgcgacatgccgcgccgccaccgcggactgcggctggtcagacggctgaaggcgatctgctggtggtgccaccagcacacggaacggcccgaacgcgacgcgtggctcgcggccaacgcgatgaccgacgaacgactcgagcgcctctaccggcgggcatgggagagaagcccgcagagcatgcacgagacgttcggcattcccatgagacacggcaccggcatcgactggaacgagttccacaccagggtcgaatggcagtcgaacgactagaccaccagacacacattttggcctataaccccacatcttggcctataacccctataaccccatttcggcctacaccggctggaccgaaacgaaaagccccgcagaatcatctgcggggcttca

SEQ ID NO: 2721 - DNA, 4799 bp, Unknown
  R36_18m  MAG No. k141_10246
aacccggcctgtttgagcagccgccgccgtttggatgcggcccggctcgcgttctccttctcgaacaggttggccaggaagccgagctggccgggcgtggcgtcctccagggccttcccgggcacgctgtgtgtcaacggcaggttgcgggcgaggcccatgacctgttccggcgtggccttgtcaggaacgcggccgccgcgctgccgcggtttttgccgtctcattcggcctccttcatgtatttgtcgtaacgcttcaaatcctgcccgccttcggttcccgcaccctcgaggatgcgtttggcgcatgtgccgatcgccgcgcggtcgacggtccgtcccgcgttgatgacggtttccaccactttgaccgtggcggcgaacccgcagtcggcggcaacggctcggatgtcgtcgagcagatcggagcgcgtgcgtgcgtccatgcggtcgagcagggctcgcacggtttcggggaaatcgttcctgatcgggctttcgccccatatgcggggctttcgcgcgatgatcgcgagcaggctcgccggatccacctgggttttcgccgaatggccccagatcctctccagcgtggtgatcgtttcgccgtcggggccccgcagttcgatctcgaagacgcgcaccccggcctgcaggcgcatggaacgccatttcggtccggccggataccggttcgcgtcgatcgtgacggcgccggtcttgtcggccttcacgctcctccagtcgcacgggtcgaaccgcacgccgggcaatggaagcatgtggtccttctccgcctcgaacagttcgatcaccggaacatcatgccggtagtgatccgatccggcgatgcgttcgcactcgtcaagccacacgcgcgtcagcgtttggaagctctcggccgacggcatcggcaccatcaggttgcgcctgacgaagccgacggcgttctccacactgcccttcccgtggccggaatacgggttgcagaaccgcggctcgaacccgtaatgcgcgcagaacagggagaacagcctggcctggccgaaatcgacctgcatgctgcccggcgcccactccaactcggcgaagccgtccgactccatgcgatgctcccgccgccagcgcttgacccagcgctgcaccgacgaatacgagcccgtgaacccgcactccgccacgagccgctcgtacacgcgcgtcgcggtgtggcgctgcttgacgggcatgcgcagatccgcggccggccacccgtccacgacggccgaataccccgcgtcgaccagcgacctgcccgcatgccccgagccaaggggcttgggagagtaatccccgtggttggcgtacttgaccacggtcgtgcgcgatacgccgagtttccgcgatatctccctgtggctcaagccctggcggtcgagctgcctgatacgctgtcggacacacaccggtgccgtcatttcctttcctcccgggaaccatcagtttggttgacaggcactcgggaatctaccaaggaaccggacgatgccggtgttctcattccaccggcgccatcaccgccgacaccgtccaaattgaacgctcagggtgttcaggaacaagtgccgacagtgaacacctttattcgatcacacacatacgggcccggctcccgtttccactgtcccgaggcgggatgcggggaggcgtcttgcccggtacatgacacgatggaacgcacgtggcatcacctgaatttcttccagtacaaggcgttcatccacgcctccgtgccacgggtggcgtgcccggagcacggcgtgaggactgtgacggtgcagtgggcgcgtccgggccgcgggttcatgctcctgtttgaggcgatggtcgtggaactagcgaaaagccagccggtcgcggacatcgccgaacaggtcggcgagcacgacacgagaccgtggcggttcatccgccattacgtggacgaggcgcgcctgtacgagaactacacgggcgtggagacgatcggcatcgacgagaccagccgcaggggccaccggtacatcaccgtcgtcgccgacccggcgaagcgcaacgtgatctgcgtggtgccgggcaaggactcgaccacagtgaaacggttcgcggacgatttcatggcgcacaacggcgactcgaaccgcgtgcgcctggtgacgtgcgacatgagcctgggattcgccaggggcatccgcgaccacttgcccaacgcggccaaaatcatcgacaggttccatgtcatcaaacacgccaacgaggccatcgacaaggtccgcaaggccgaggccagggagaacccgctgatcaaacgcacgaagtacctgtggcctgggaacgagtccaacctcacggacccgcagctggaggtcaagcgcaatctggcgaagcggcggtcgaagaccgccagggcgtgcgggatgcgcgaatgcctgcaggacatctacgccggtagcgccagccgcatggaggcggaggccgggttcaaggcattgtgctcgtggatgatgcattcgcggctggaaccgatgaaggccctcgccggacagttccgccggcactgcaggacatcctcgcctacttcgatcatcggtgccccaacgcgatcctcgagggactcaacagcatcgtccagcacgtcaaaacccgctcccgcggcttcaggaacatggaccacttcagcaccatgatctacctaacctgcggcaaactcggcctcaacaccgtcaccgcctaacccgcttcacccacatcaaacagcgaaaggccaaaaacactatatattctgcgtgttgtttttatgcacattgatagaaaatcgctaaaccagattatattaaaagccaccaccacctctcatgaaagcgcactagggtagcatttcttatgcgcagcatcgaaaggcaaccatgcccaaaagcctcacacgagcccagttaactgaatatcctcactatccgtcacaggttagcatattcatcatccaaaagtagcagggcgcagacgctacgccaatttcaccaacaaaatatcaaaaccgaaatacaaataatttccaatcacatccatcccttaacaagtccaaagacagaacccataaaggttctaccccctcaaagtcacaaaaatcaataagaccctaatccgcttgctgaacgctttttggttcaacaaatcgatttttagcaatccagataagatgctttatgccagttttaaaatacgattgtttcgtctcaccaagacggagcctctgcttaaccttaatctcagcaaatttcttacccagatatttatgcgcattaagtttaatctgaggagacaggttccaatctccctctgtaagacgcaattctggaacaacgtccttacggaaaacccacattcccgaaagggaatcatgaatcttgaaccagtataacaacattatttcaagattaagcgcccgcactcccagctgcagttggggagggatttccttatccggatatctagaacaagacacaaaagacaaatcacgttcaatcatttgttttagtatttgcggaaaatcttcgattggatacgttccatcagaatcagcacaaacaatgtattcgcttcttgccatttggatacctgtcatatgtgcaaaaccatatccaattccaccagatactctatcatcaatcagaaggcgaaatctcttgtcgcccttttcgatctggcgaccgacctgaacagtctcatctgtagatttgttgctaacgcaaagtatttcatcataaaaggaaggaacatcctgaacaagagcagcgagatatttagattcgttgcgacatggcatcaccaacgaaaccgaacatccattaatcattttctacgccctctctgaaccagcattccattctctgcacttagcaaatcatgttcgcgacctatgttacaagttacagcttaatccaccgacatgaaaagagacgacaccccgggttctaaatagaagtgcaacaccttgtctaaggttggaagtgttcagtttctaacttaagaaggtgttgcactcatgggtcaacagtattcgcacctgtcgtccgaggagaggatcctgatcgagaagctgcattgcgaacagcatctgagcattcggcggaccgcggagaggatcggccgggacaagtccacggtgtcacgcgagctgaggcgcggcctgtggttcgcgtccaacgagaacgggtcgtaccggccctaccggccgaaacggctgaagaccgggccgtggacctcgggtccgttctattcggcgctggccgcgcagaggaaggcggacctgcgccggcgcggatcccgcaagccgcgtcgcatggactcggaccggcttcgcgcctgggtactggactcgctgcgcagggggtggagcccggaactgatcgagggacggttgaaggcccagtacgccggcgacccgtcgatgcggatcagccacgagtgcctttaccagtggatctacgccaagccgcagcgggcgctggacctgcgccagtacctggcgcgcggcaggaaacgccggacgaggaaaaagggcaggaaggcgaaagggccgcgcatcccgatgcgcgtgcccatcgcggaccggcccgaggcggtcggatccaggaaggggttcggccatttcgagtcggacacggtggtcggcgccgcgccgtcgaggcgctgcatgaacacgcaggtggagcgcaggagccgcaggctgttcgcccggctcgtcgacgacaagagcgcgtccgccacggccagggccga

SEQ ID NO: 2722 - DNA, 10043 bp, Unknown
  R36_18m  MAG No. k141_10396
caaccatgccgatccgcttgccgcgttggcggtgggcgagcagcccgaaccccaggcccgcccgttctggtcgaccgtttcggtgcgcgcggtgaccgtaaaccatcacgacgtctggtcgctacagggtgtgggtctcgccgccgaacagacgccgatgatcctgggcaccgatgccgtgggcattctggacgaggacatcctcggcaagcatgggctcaaggccggcagcgaagtggtgctgtacacgttcgtcggcaccgatggggcgggcgtggccccgggcgagcgccgtacgatcctctccgagaaataccccggcacgatggccgagaagacttccgtgccgtccgccaacgtgttcgccaagcccgcaaacctcaccacggccgaggcggccgcactcggcaccagctggctgaccgcctactcgctgctgttcgaggccgccagcatcaagccgggcgactccgtgctcatccagggcgcgggcggcggcgtatccactgcggccatccaactcgcccatgccgccggtctggaagtgttcgtcacctcgcgtgacgcggacaagcgcgccaaagcgctgaaacttggcgcgaacgccgcgctggagaccggtgcgcggttgccgcgcaaggtcgacgcggtgatcgagtccgtgggggcggccacatggggccattcggtgcggtcggtgcgccccggcggcaccatcgccatctgcggcgccaccaccggcgaccagcccggtgcggagctcacgcgactgttcttccaggacatccgcgtgcagggctgcacgatgggttcgcgcgaggatttcgcacgattgctgcgcttcgtggagcacgccgacctgcatccggtgatcgattccgtggtcagcgggttggacgccgcccccgaggcgttcgccagaatgatcgccggcgacatgttcggcaagattgttattgagctgtaagcctcacagaattatgtattgagaacgattcgctgcgtggcttaactccgctatcaggagtacagtgggccttattctcaataactagggagtaaatgataatggcaaatgaatccaagcccgaagtcgcagtggtcatgggatcctccagcgactgggagaccatgaagcgtgcctgcgatattctcgaccagttcggtgtcgtctaccacaagcaggtcatttccgcgcaccgcacgcccgagctcatggccgagttcgcgcacaatgcccgcgccaatggcctgaaggccattatcgccggtgccggcggtgccgcccacctgccgggcatgatcgccgcgcagaccacactgcccgtaatcggcgtgcccgtgcgctcccacgccctgtccggctgggattcgctgctgtccatcgtgcagatgcccggcggcattccggtggccaccaccgccgtcggcaactccggtgccaccaacgccggcctgctcgccgtgcagatgctctccgccttcgagcccgaactggccgacaagcttgaggattaccgtaacgaactgaaagaaaaggtggctgaatccaatgcccagcttgtctgaggaaacaggcggtcgtgtttcgatgctgatgccgggatcgaccatcggcatcatcggcggcggccagctcggccgcatgatggctttgtccgcccgctacatgggcttccgcgtcggcgtgcttgacccgacgccgaactgcccgaccggtcaggtggccgacttccagatcaccgccgaatacgatgacaaaaccgccatccatgatctggccgtgcagtccgacgtgctcacctacgagttcgagaacgtggacgccgatgccatcgacgaggtgcgcggcatcaccgccaccccgcagggcaccgacctgctgcgcgtgacccagcaccgcgtgcatgagaagcggttcatcaacgaccacggcaccgccaccgcaccgtggcgcgccgtcaacaacttcgatgagcttgacgccgcattggatgatattcattatccggccgtgctgaagaccgtgtccggcggctacgacggccacggtcagctcgtgctgcgttccgacgccgacttggagaagatccgctcccgttccgaccgtggtggcggcttcccgccgagcatcctggaaggcttcgtcgacttcgcattcgaggcttcgatcctggtctccggcaacggcaaggacttcgtcaccttccccatcgtgcgtaacgagcaccgcaacaacatcctgcacatgaccatcgcccccgccgaagtgtccgaacatgtggctcgcgaagcgcatgaactggcgattcgcttggccaagggcttcgaactggctggcacgctggccatcgaactgttcatcaccaaggacgatcaggtcatcgtcaacgagctcgccccgcgcccgcacaactccggccactacaccatcgaggcctgctcgatggaccagttcgacgcccacatccgcggcatcgccggctggcccatgcccaagcccaagctgctctcgccggccgtgatggtcaacgtactcggccagcatgtggagccgacgcgcgcgctgatcgccacccacccggagtggaatgtgcacgactacggcaaggccgaagtgcgccacgaccgcaagatgggccacatcaccgtgctcaccgacaaccctgatgccacggttgctgaccttgaggccaccggttgctgggacgacctgaaaaagaaggcgtgaccttatcgatggttgaacatatcgaacgccagaccaagcagaaggacgcgattcgcgccgccttggccgactgtgaggagttcatctccgctcaggacctgcaccgcaggctggaggacgaaggctcgaaaatcggcttggccaccgtgtaccgccagctcaacgccttggccgatgccggtgccgccgacacaatccgcctggacggccagcagctgttccgcctatgcggcgacgacggacatcaccaccacttggtgtgcaagcggtgcggcaaaaccgtggaaatcgatccgcccagcgaggcttggctgcgcaaagtggccgacggccacggcttcaccgtcgaatcccacaccctggaggtcttcggactatgccctgattgccaaaaggagcagaaagcgcagaaggctcagaaagcagtgagcgaataattgaatgggatcggcttcaaagccgatcccatttgctattccgctgctattccaccgacttcagggcgccgagcatgtcgaccgtcttcaaccgccggtagaccagcacgccgagtccgccgagcaccttgatggtcggcagttcgcggatacgttcggagacgttgagattcgtcagattgtagaggatcaccacggccagcagctcagccgcgagaatcagcacttccatgatctgatccggcaagtcgacgattgtggccacctgtttcttcgaagtcgtgttctgcacaatgcccttcgcgccgtccaactttatgagcttggcgctacgcgactccacattggaggtctcatggttcttgagcctcaccatataggtgttcgactggtactgttcgccgaacacgtgcttatagccacccgaagtcatgaacatgaaatgcccgatatgcatttcggtgatgccgtccacgcgcaccttgcgctcggtaccgctcgaatcggtgacggtaatcgtgtcgcctaccttggcgtccatcatccccgccatacgttcggagatgatcgcaccacggtcggtgagcacctgcggcttgtgcccggtgcgcgaacgcagggtgatgtagtcgccgaaattgtaggcgtcatcagtggcgatcagggtaatcgactgtttgtcgttctccttgccggccactttcgacatctcctcgtagtagatcggcgcggactcggagacggccccgcccctcatcgccttggccacttcggcgcgctgcgaataatgttttcgtcagctttggtcaggccataatcgctgatgacggttatgtcagcgagattgttctgattaaagaagtcggtgccggttatttgcatgtccgggccggtgacgaacaggcctacgagcgcaaaggagccaagcgtcatcaggctcacgatggaggcgaatcgacccttggatttggccatggtgacgcgggtgtctttccatagcatgcgcttatggaatgacccgttgcgtcggcggttgcgcttggccttgtgcgcgtggggcgttctgccggacgcggtataggagtcgtttgctgaatttgcggcggaatcggctgcggagtcggtcgcgggcgtaaggttggtcgtttcggtgaaatcattgagatcggtcatactgcttaccactccagatccttgatatccatcgggtgctcgttcacttcgatcgatttgacgcgcgcgtcatgcatgtggatcacacggtcggcaatcggcgcgatggcggaattgtgcgtcacaatgaccacggtcgcacccttcttacggctctgatcctgcagaatctgcagcacctgcttgccggtgttgtagtccagagcgccagtcggctcgtcgcacagcagaatcttcgggttcgtggccaccgctcgggcgatggccacgcgccgctgtccgccgcccgaaagctgcgcggggaagttgttgatacggtcctgaagccccacgtcgataagcgcttgggtcggttcctgcgcgtctttcatgatttcggaggcgagctccacgttctccttggccgtgaggttggccaccagattgtaggactggaacacgaagccgaggcgttgcgctatgtcaagcgtgagtatgcgttcttcgacgcactgtcccgttcgggcaacgatatgcagatgtatgaccgggtcaaggatgtgttgaagcagatgctgcttgggcaggcggcccgtgtgggtgccgagctgagctacggcggcattccgcgcgcctatgcgctggaaattctggtctccgccgtctcatcgattatctggctatgggtccggcgcggctgcaaggaggcgcccgagcaaatctgcgccatcatcgagaaaaacaaaaccaccgcgcccgtagacatcatacggtaagcgcggtggttcgtgtcggaatctggctcccctccctgagaggagtcaatccgcaggagaaatcggaaacctaaaactcagacagccagctcggccttgagttccttgaggtcggccaggatctcatcgtggcacttctcgttggtgtcgaaggcaaggtggcagaaggcgcactcgtggccttcgcggttctcgtggcaagcgtgcaggcaagccttgcccccgcactcttcggtgtggttgtgctcgcagccggtgtcgtcgcagcagtcgccggtgaagcagcagccgcagcggccacaggcggccacgccgtgctcgtgcttggtggcgtcgaacttggccagcgtgtccttgcagacggcgaaggtgccctcttcggtaacgatctcgtaagcatgctcatcgatggtcttgatagtcattgttgttcctttcagcgtttgttcgtctgcgactgtagggcggcagacggcagcggcgaaagttggtgaaagtgattatcaggcccattgctgctattaagagcaatgagacctcatgcagttttgtgtcggtaacgggccgattgttggccgagtgtcgacgcctggtataggtggtggcggtaccaatccaaatattggtggaacgacgacgatgagcgtgtctggcgtcggtgctgcgccaagcgttggcaatctaacgatgcgagtggagcttatatcgtcgctattgcgccaaggattggaagggcaccgatgctgaaggccagtagcgtcgggactgcgccattatttgttcgagcgccgacggccagtatcgtctggcgtcgtcagtggtccatcctttggtgaggtgccgacgctgagaggcggttcgatggcatgcttcgccgcacacttggggcacaggtcgaaaatctccagttcgtgggcgatggtctggtacttcaactgcttggtggctttgtcgatccactgctcaagtccgggaatctcgatttcgatggtccgcccgcattcgtggcatacgatgtgatggtggtgatgctggtccgagcactcgcggtagagggcctcgccgttgacgtggattacgtcgagctcgccttgggaggccatcatctgcacattgcggtaggcggtggccgtgccgatgcgcgtgccgcgctcgcgcaggatgtcggtgatttcctgggccgtggcgaatcgggatagttccgccaggacctgggtgatgaggagtcggggtcgcgtcacgcgccgattggtcgcggtttgctcgatgctcatgacgttctgcccctttctgttaacaaatgatattcattatcgttattaaagcaaatcagatgcccggcatgttgtcacatgatttgaatcaactggcagaaatcccgcgtttcaacgaggcctgcgcgggatttctgccagttttgagccctataaaggcagagcccccgcgtacctttcgttgtaacgcgggatttctgccgatatggggcgagtcatggcgcagcgcagtgctttccatttcgggagacgcgtcatttactgccagtagaagtagccggtcggggcggctgcggctttgctggccgaccggacctgcagtatcaggccttggcgctcgtggccggcggagccgtaggcgccctgcttgatgacggcgtcgacggtgacccaggcgtgattgtgcggggtgccggccttgccggagctggctatgaacccgaatggggtcatgtcgagaatgcagcaggacatgaactggcgggacagctcgaactcgtccgcgccgaacgtacgcgacttgctcacaaacccggtgacctgcacatggtaaccgacgtaacgctgcggattatggtcgatctgctcgaaccatgagccgaattcgtcgtcgctgatggtcagggtcttgttcgtcgtgtcgagtccgtgcagctgcgaggtgccatcaggcttgtgcgagctgcggggaatggcgatagcgcggccgccggcgtactcgtcgaagccgccgctgccgctgctgggctggaacggcacggcgatcagcagcgccggaataatcaaggcgatcaggaaccgtaaaaccgaacgctccgtggcgtggaacagtccgagccatgctgcggtcgccagcacgaacagcagtgccgcaccgatgatgagatacggcagcgaacgcggcgtggtcagcgtggtgtatgatccgcccaccgccgcataggcgatggccgcgcccagcgccgcgaaacacagcgcctccacgcggtcggggagtgtgactttgcgcttcatggctacgctcccatcaccagatgggcggcaatcgcggcgaggaagcaggccgccgccacggtcgcgatgaaccggatgatgaaccgtggccggcattccgtggccagcatcagcgtgttcttgaggtcgagcatcgggccgaagaccaggaaggcaagcatggcggagaccggcagcgcgccaatcatgctggcggcgatcaccgcatcggacgtagagcacagcgaacacaggaacgccagtcccatcgccgccagaatcagtacgatggcaccggcgtcatcgagcgtgcttgaaccgttggtcaacgacgacaatgcggtgcgcatgatggaggcgatgatcgtgccgaacagcagaatcggcatcatccgcataaagtcgtcatgcgtatgccgaatgaaatgcgtgaaccgctccaatccgcgccccgtgcccccgccggcgggggctgtcggcaaagccgactgggggtggctctcaggcgaatcacccgtcgcccctgcacaatcctcgcaaatcaacgaccgcccaatcgtcagcggcctctcacgcaccgcaggggagcggagcggccacaccgcgaacgacacccccgcgactatcgccactaccatgcccaaccccatgcgggccgccaccatccatggtttgtcggtgaatgcgaaccatgtggaccatatcgccatcgggttcatcaccggcaccgcgcacagaaacgtcaccgcacacggcagcggcaggcgtttgcgcatcagattcgcgaacgtaggcaccaccatgcaatcgcacaccggtaggcacagaccggccaccaatgccgcggccagtccgccggccaacgatttcggtatgtggcgggccagagaatcggcgctgacgaacgtgctgaccgcggccgacatcatcgcgcccagcagcatgaacggaatcgcctgcaggataagccccgcggcaccggtgccgatacgcaccagcggaaccggaaacccacgcgactcgagcatcgcggaagccgcaatcaggaacgccaccagcggcgtgccgataatcagaaacagatagttcgccgaatggtcctgttgcgcggtgttcacctgttccgtgcgctgcgtgcgaggttctttcatgcgaatatcacctgccatatcgccgtcatattagcaccgtacgcatgatagtggtcgagataatatgcgagttccccgcataccgatggtacacatcgatatgcggggaactttgcacatggttgcctgggccgatggcgaatcggtgggccagcatctcggtggccacttcctccttgctcatggatgccgggtaatacgtgggccagttgtccatttccttgagggtttcttcctgtcgttgcagtgacgttgcacggtggcggcggtggcagaaccggccccggccttgtccgcgtagacggcgttgatggcttcggcggccttcttcgccctcggcgtggtcgtgggaatgctcgtgctcgtcggtggcggtgacgcccatgaggccgcccacgttcacgatggtctggcgtttcttgtcaagctgcgccttttccgcccagccgtcgtagccggcgccgttgagcaccacgatgtctgccttggcgagcttggccagatcggatgcggtggcctcataaaacggcggttcgccccggcaggtgacggcatacggaaggaaatgggagaaagaacgtacgccgccggcctgtggagcggaccgtcgagttgttgttacgagacttgatggattgcggaatccacgatgttggttatggcttcatatacccctttcgtacggctgcggccagattctgcggaacctgaaccacttcgccttcaggcgttctgaccgtggccagctgaggcaccttggccttccagttggctcggcgcgaatgcgtgtttgctcgggacgccttgtacttgggcagtgccatcagccttgcctcgccttccagtgggggttcttcttgttgattacatacagatggccgcgccggcggacgacataggagccatccttgcgggccaatgagcggaccgatgccttgaccttcatgtccgttcctttcttcttgtcttacggtctttgcggaatgtgcggcgaatcacttgcgcccgtaacgagcgttgaacttctgcacctgaccggcggcgtcgatcaccacattcttgccggtgtagaacgggtggctgtagctggacacctccacattgacgagcgggtaggtgttgccgtcctcccagtcgatggtcggcaggtttacggccttggccaccagtgtggacttggtgaggaagtacttgtcggcggagcggtcatagaagaccacggggccgtattcggggtggatgccctcttgcatggttatggacctttggctgtgtggtgttgtgtggtgatatggatgagaatggcgtcggacgcgcgggtggaatccggtgaattgagatggcctgagacggcctgacggccggttgtgccggcccgatcaccagctggatttcaccacgccgggcagtttgcccttgtgtgccttctcacgcagattgatacgtgacaggccgaacttgcggttgtaggcgcgcgggcggccgtcgatggaatcgcggttgcgcagacgggtggggctggcgtcgcg

SEQ ID NO: 2723 - DNA, 4575 bp, Unknown
  R36_18m  MAG No. k141_10450
ggcatgtccggcgaggagctggtggccgaagtcatgcggcaaaccggttgggcgcgcattctcgatatgccgccagccgcactgcgcgccggctcaacacccgaatactgggccggatgggtactcgcatactgccaatggaccaggggagtgcggttctcggacattctcgatgtgctgtcgctcgacgatatcgtgcgactgtacccgactctgcacgaagccgacgaaagccgattcgtcgacgtgtacgacgagcgggccgcccataatcgcaccgagggcgactcccggctgcacacgatccgcgtgcgcgccggactcagccaatccgggctggcccgccgctccggtgttaccctgcgctccatccaaatgtacgagcagcgccgcaaagaccttggcaaagctgccgtctccaccgtgctcgctttggcccgcacgcttggctgccgcatcgaagatctgttggagccgtaaagacgcggagtagtatcgcgccgcatcgattctgataactgaacaactacttttaaggcccggccggatgctcgtttggacatccggccgggccttctggctccacacggggtgccgaggtatccgttctccgcttcgaggggctgatttggccttccgtagaggtttactcccgtttcgaggggctggtggcccgctagaacacgggtataaacggcttcgccccaccgtcattccgccattttggggatgcgcttacttgagtaccagcccctcgaaacggagatagatctccggaaagggtcaaaacagcccctcgaaactcaagatggcggttgcagggcggttgaggatcagtcgaagagcggttcaaacgcaaatgtgaacaatgccacatgtgattgggcgggtcgctgcacgccgattttcgggggtgcatgggaatggcggaatatcaacgaaaaaccctatatctaggtttgttatgtgacacgcgccactacatatagtgccttgatttcaaatcacaccgctgtaatatggccttcgcttcactgttcatcagaaccacacatcaaggggagtcgccatgaccgtcaccgtgttcaccaagccgcattgcccgcagtgcgatgccaccaagcgccagctcaccaagctgggtgtgccgtttgaaaccgtggacctgacgcagaacccctccacccttgagcagctgcaggccgccggtttccagcaggctccggtggtcatcacgccggacaactcctggaccggctaccgccccgacctgattcgcgaagtcgcccagcaggtggccgccgacaaccgcgccgccgccacggtgtccgcgtgagtctgagccagcccgaattcgcggccgaaggcaagacgatcggcgcattggtctacttctcgtcggcctccgaaaacaccgcacggttcgtggccggatgccgtttgcaggacgaaggcatcaacgtctaccgcatcccgttgcgggccgccgacccggcgctaaacatccgcgaaccgtacgtcatcatggtgcccacctatggcggcggcgtggtcaagaaagcagtgccgattcaggtcaaacgcttcctcaacgatccagccaaccgcgagtggattcgcggcgtcatcgcctcaggcaacaccaatttcggtgaggcctactgtgccgccggagacatcatcgccgccaaatgcaaggtgccctacctctaccgttacgaactcatgggcaccccggaagacactgccgccgtgcgaaacggcctcgtccgcttcttcaccgaacagtaaatcttgaccccctcgaggtattggctcccctctccgaggggagctgtcaacgaagttgactgaggggagcaactgtctgagtaaacacacttctgccatattccaaggatttccaatgactgacctcaccgccaccggcctgccgctcgacaatactgccgacaccgcagcggaacagtacgacccggcgcacgattaccacgcgctcaacgcgatgctcaacctctatgacgccgacggcaagatccagttcgacaaagacaaggccgccgaacgcgaatacgtgacagggcacgtggccaccaacagcaagcggttcgcctccaccgccgagcgtctcgaatacctgatcagcaaccagtactacaaccctgcggtcttcaaccagtactccgctgaattcctcgaccgcatctacgagcacgtggaatccgccggctttgagttcggcactttccttggtgcgttcaagttctacacgtcctacgcgctcaagacgttcgatggtcgcctctatcttgaggacttcccgcagcgttgcgccgctgtggccctggagctcgccgccggcaatgagcagcaggccatcgaatacgccgacgaaatgcttgccggccgcttccagcccgccaccccgaccttcctgaacctcggcaaggcccagcgtggcgaaccggtcagctgcttcctggtgcgcatcgaagacaacatggagtcgatttcgcgcggcatcaacgcggccctccagctctccaagcgcggcggtggcgtggccctgctgctgagcaacctgcgcgagctcggcgccccgatcaagcacatcgagaaccagtccagcggcgtgattccggtcatgaagctgctggaggactccttctcctatgccaaccagctcggcgcacgtcagggcgcgggcgcggtgtacctcaacgcccaccaccctgatatcctgcgcttcctggataccaagcgagagaacgcggacgagaagatccgcatcaagtcgctggctcttggcgtggtgattccggacatcacgttcgaactggccaaacagaaggcccagatggccctgttcagcccgtacgacgtggagcgcgtgtacggcaagccgttcgccgacatctccgttaccgagcattatgacgagatggtggccgacgaccgcatcaagaagacctacatcgacgcccgtaagttcttcaccaccatcgccgaactgcagttcgaatccggctacccgtacatcgtgttcgaggacacggtcaaccgcgcgaacccgatcgaaggtcgcgtgaccatgtccaacctgtgctcggaaatcctgcaggttcaggagccgagcgcatacaacgaggacctcacgtatgcgcatgtcggccgcgacatctcctgcaatctggcttcgctcaacatcgccaaggcgatggatggcggcttgggccacacggtggagacggcgatccgcgcactcacctcggtggccgagcacaccagcatcaacgcggtgccttcgattcgccgcgccaatgaggagggccacgccatcggtctcggccagatgaacctgcacggcttcctggcccgcgaaggcatccagtacggttctgaagagggcctcgacttcaccgacatgtacttcatgaccgtggcctaccacgcctaccgtgcctcgcacgcgctcgccgtggagcatggccgcacgttcgccagcttcgctacgagcgactacgccaagccggccggccagggcaactacttcgacaagtacaccgatggtcgtcgttcgctcactccgcgcaccgaacgggtccgtgcgctgttcgaacagtacggcatcgcgatcccgactgcggccgactgggaggccctgcgcgacgcgattctgaaggacggcatctacaaccagaacctgcaggccgtgccgcccaccggctcgatctcgtacatcaaccattccacgagctcgattcacccgatcgcctccaagatcgagattcgcaaggaaggcaagatcgggcgcgtgtactacccggccgcctacatgaccaacgacaacctcgggtactacaaggacgcctacgagatcggctggaaggccatcgtcgacacgtacgccgaggccacccagcacgtggatcagggactgtcgctgacgctgttcttcccggacaccgccaccacccgcgacctcaataaggcccagatctacgcctggcgcaagggcatcaaaaccctctactacatccgcatccgccagcaagccctggaaggcactgaagtccaaggctgcgtctcctgcatgctctgatcgttcgagggagcgtataccgcctttcttcggcactcgacgtaccttcgtacgccttcggcctcagacggcggtctccgcacgcattgaacaaccagagagccgttgttactcccctcactcggctaacgccgacagctcccctcagagaggggagctggccgcgaagcggactgaggggggctccaccatctaaggaaccaacaatgtcacgaaccatctatagagcactgctccggctgaccgcgccggaggagttcgaaaacaagtccaacgacgataacgacaacgacaacgacaacgagtaataaggaacactcatggcacctatctccattccgcgcaaaccgctgaaactcatcgaccgcgtctccgcaatcaactggaaccgcctcgaagacgagaaagaccttgaggtctgggaccgcttgaccggcaacttctggctgcccgaaaaagttcccgtctccaac

SEQ ID NO: 2724 - DNA, 16454 bp, Unknown
  R36_18m  MAG No. k141_10478
cggcaccgggctgtaggcacccatgccaccggtgttcgggccttcgtcgccatcgtgggcgcgcttgtgatcctgggagatcggcatcggccagaaatcagtgccgttgacgaagctcatcagggagaattcctggccgtcaaggaagtcctcgataacgaccttggcaccggcggagccgaagcgatgatcgatgaagatgtcttcaagcgcacgctgggcggtgtgctcgtccatggccacggtcacgcccttgccggcggccagaccatcggccttgatgacgatcggcgcgccatgctcgtgtacgtaagcctgagccatgtccaagtctccgaacgtctgatatttggcggtcggaatgttgtgacggtccatgagctgcttggcgaagtccttggaaccctcgatctgggcggcggccttggacgggccgaacgccttgatgccggcggcggcgaaatcgtccacgatgccttcgatgagcgggatttccgggcccacgaacacccagtcgtagccgttgtccttcacgaattcgatgagcgcggcatgattcgactggctcagctgtgtggtgcggatgccatccttgagcatgcccgggttgccgggcgccacggtgacttcgtcgacgctcggcgatttgagtagcgtgtaggcaatggtatgctcacgcgcaccggagccgatgaccaatactttctgacccatgtttttccttcctaaagtctttggctcccctctttgaggggagccggtatctggagctacttcagtacgatttgcgtgtcggtggtgtcggtggtgatctggccgagcacgtaggcgggttcgttgttgtcggcgagcagcttcagcgcctcgtccttgcgggcggggtcgatggccagcaccatgccgatgcccatgttgaagatgttgtacatctccttgtgatcgatattgccggccttctcaagcacgtcgaagatcgggagcacaggccaggtgccaagttcgatttcggcggccagaccgtccggaatcatgcgcgggatgttctcgatgaagccaccaccggtgatgtgggccacgcccttgaccacgcccgccttgaacagcggggagagggccttgacgtagatcttggtgggggtgagcagcacgtcgccgagctttgcgccgcccagctcggcgagctcagtgtccacggtatagccagcctgctcgaacagggccttgcgcaccagggagaagccgttggagtgcacgccggtggaaggcagaccgataagcacgtcgccctcagtgatggtggaaccgtccacaatggcggacttttcggcaacgccgaccgagaaaccggccagatcgtactcgtcctcgtcgtacatgcccggcatttcagcggtctcaccgccgaccagtgcggaaccggcctgcacgcagccgtcggccacaccggccacgacctgctcaagcagggccgggtcgttcttgccgcaagcgatgtagtcaaggaagaacagcggctcggcaccctgggcggcgatgtcgttgacgcacatggccacgcagtcgatgccgatggtgtcgtgcttgttggccagcttggcgaccatgagcttggtgcctacgccgtcggtgccggagatgaggaccggctccttgtagcccagggaggctaggtcgaacaggccgccgaagccaccgatgccgccgaccacgccgggacggttcgtgcgggccacgtgcgacttgatgcgcttgacgacttcgtacccggcttcgacgctcacgccggcgttctcatatgcttttggcatttggtggggcctttctgttctattttcaagctcccttgccggggagccacctgcaaaaagtggattttcgtttgtactaagctccccttgtcaggggagctgtcagcgaagctgactgaggggtagtcgtaaagaccaatgactgaggtgtagtcgaaggaccggccgaacctactgcacgtccggctgcacggtgttgtactcgttgccgatgtacttgctcttgtacagcgcgaattcaggcagacgcacacggtcctcgggcgtgagggacttcaggaagtcggcctcgtagtcgtcgagcgcagtggggtagtcgccgttgaagtaggcgacgcacaggccaccgtatggggcgtcggcgttcagtccgatggattcgaccagaccgtcgagcgaaaggtaggccaaggaatccgcgccgatgtattcgcggatttcctccacgctcatcttggctgcgatgagttccttggtggtggagatatcaatgccatagaagcaagggtacttcagcggcggggagctgatgcgcatatgcacttcagcggcgccggcttccttgagcagctgcacgatgcgcttggacgtggtgccgcgcacgatggaatcatcgataacgataacgcgcttgcctttaaccacgctgcgcacagcagagagcttcatacgcacaccctgctcgcgcagttcctgcgtgggctgaatgaaggtgcgggccacatactggtttttgattaggcccatttcgttgggcaggcctgctgcttccgcatagccggatgcggcggacaatgaggagttcggcacgccgataaccatatcggcctccaccggggattcggcggcgagacgtgcgcccatgcgcttgcgggcggagtgcacgttgacgccatagatatcggaatccgggcgtgcgaagtagatgtattccatcgagcagatggccagctgcgtgttgttggtgtactgcacgatcttgtagccgtgatcgttgaccaccacgatttcgcccgggcgaatgttgcgcaccagctcggcgccgacgacatccagtgcgcaggtttcggaggcgagcacgtaggcgccgttcttcatcttgccgagggagagcgggcggaagccgttcgggtcgagtgcgccgatcatggcgtcttcggtcatcagcaggtaggcgaaaccgccatgcaccgtgttgagcgcttccttgagcttgtccataaaggtgcgctgcatcgaacggcgaatcaagtgcatcagcacttcggtgtcggagttcgaatggaagatggcgccttcgtcttcaagcttgcggcgcagtgacgggcagttcgtcaggttgccgttatggcacagagccacgtcgccgtcatggaagcggaagatgaacggctggatgttgtccgtggtgcccgagccggccgttgcgtaacgcacgtggccgatggcgcaattgcccttcagtcgttcgatttcgcgctcatcgccgaacacctgggtgagcaggccgagtccgcgatgaccgatgagatgaccgttatcgttggagacgatgccggcaccttcctgaccgcgatgctgcagcgcgtgcaggccaaaataggtgagtcgtgaggcgtcggggtggccccatacgccgaagatgccacattcctcatgaatgtcttcgagttcagccgacaagccaaagctcctttttcaaacaggggattaactatctgccaaccctaccaatcggcggctacatcgcgtgttgtggggtggtggaacttgttggggttcgcggacgcggtttaagcaccagatcagttgagtatgaatagtggcttaggattttggcctttcgtcgtatgaatccggtgtttgtttttcggcttcgtctcagtgcctgaaatggctgaagaactcgatggtctcgggatcctgcgactcgtccatcacctcggcgggtgtgccgttctcggcgatgacgccgtgacggagcagtacgatgcggtcggccgcgtcgtgggcgaagctcatttcgtgcgtggccatgaggattgtggtgccttgggcctttaactcggcaaccatgttgagcacttcgccgaccagcatcggatcaagagcggatgtgatctcgtcaagcagcagcagttccgggtcggtcatcagtgcgcgcgcaatcgccacgcgctgctgctggccgccagagagctgatcagggtaggcgctggctttatcgcgcatgccgatgcgttcaagcagttccatagcgcgggtttcggcgcgatccttgctccagtggtgaaccttgattgcggcaagggtcacgttcttgagcaccgacatgtgggggaagaggttgaactgctggaacaccacgccgatacgtgcgcgaatcttgtcctgatcggcacgcgggtcggtgatatcggtattgcccagccaaatctggccgtcatcgacctgctcaagcaggttgacgcatttcatcaatgtggatttgcccgaaccggaaggccccagcaaagccaccacctcatgttggtgaatgtcaaaggaaatgccacgcagcacctgcgtgtttccaaaggatttgcgcacgtcatcaagacgcagcaccgtcttgttgctcacgggggagtcactcgcctcggtgttgatattggtcatttcgctcataccgttcctccgctgagttcgcgcttacgcagacgttccgtgtaccagtcgttcagcaggatgaacggcacgctcatcaggatgaacagcaggctggcgaccacatacggcgtgaagttgtaggtgctggccacgtcgatctgtgcggcgcgcacggcatccaccgcacccagcacggaaatcaggccgacgtccttttgcatggagatgaagtcattcatcagtgcgggcgccactttgcgcaatgcctgaggaatgacgatcagtcgggtcgtctgaccggaggtcaggcccaacgagcgggccgaggctcgctgagaaggatgtacgtcgttaaaaccggcacgcagcacctcggagacgtaggcgctgtatcccattaccactgcaatggtgccgagtaccgagggatcgatacggccgaacaagcctaggccgggaatgccgaaaccgattagatacagcacgacgataataggcacgccgcgcatcacagtcgtgtagatcaatgccaggatacgcagcgggaacagaataggggagcggctggtgcgcaccaatgcgatcagcgtgcttagaatcgccacgccgaccactgcgacgagcagaacgcggatgttgagccataggccgtcaagcacatggggaaacgatttgacgaagtattcgccggagaagaaggtctccttgactcgtggccagccgggggagagcttcaggccgatgacgatgaccacaatgaacacaatggtgctgatcagactggtaatcgtcgattgaatttgctgatgaacacgatattggcgtcgtttgagctcgacctgacttacctcgtgtccgtcaggggcattgtgctgcctggtttcggttggtgctgcggtcatgtgatgaatgtcgctcgcttcctgaatgccggaatggccgggtgtcacaggaaaatttccgcaacgcccggccaaggtgttgtgaccttatgatgtgagcctactccacttacttcttcagttcggtcaggtcggtggtgtactcggccagccacttgtcctgaagcttcttgatggtgccgtcggcgttcaggtcatccactgccttggtcacggctgcagtcagcttggaatccttcggcagcacgatgcccatgccgctcttgtcttcggagtcaggcagacggccgagcaccttggcgtccttgacctgctcggactgcaccatgtacacgcattccacggtgctggtgaccagtgcgtcgatttgaccggcgtcaagtgcctgagccagtgcggcatcatcattgaacgtctggatgtcgtccttgatgttcgccttggcgtagtcgtaggcaagggtgccgaccatgacgcccacggtcgcattcttcagatcggataccttggtggcgttggcgaacttgctgtctttcttgaccacgacggactggctgtcgttgtagtagctggacgagaagtcaacggccttcttgcgctcgtcggtgatgccgaactgctggatgttgagatcccagtccttggcgccgggagcgatggcggtgtcgaatgcggtgcgggtccacaccacgtcgctcttcttgaaaccgagcttgtcggccactgcgtaggcgacggccgcctcgtagccctcaccgctttccggcttgtcgttcataacccacggctcgtaggccggctgtccggtggcgatggtcagcttgcccggcttgtacgtctgctgggtgatgtcgttcgaatcggcggaattggatgcggtggactggccggaaccgcaggctgcggtgaacgacagagccaggatgctggcggtggacgcaatggtacggacgatgtgttgcttattgaacatgggcttcctctcctcaagtgttcgtcatgcacacggttcaaaccgtgcttgatgcattcgcgccaattgtatggctattgggttacaaaacatcgatattttcggatgctggctatcgccattgcttatggccgactagagccgcgcaatctggcgcgtaagcggacggatatctcatattggcgcagagcgaaatggcgttcactgttcgagtgtgaagccgtcgaatacgaatcccggactgaccacacaggagaccagcgcatcgccctggccaggcactgtgcgctgccagacgccagccggtacgaccgcatgtcccgatacggttacgtcggcctgatcggtggtgatgccggaacccagggtgattacggttcgcttggattcgtcggattccggagtctcgccgctgccgccgagttccagcttgaccgatgccgggccatgccacagccagacctcatccgcatcgaccttatgccaggcgctggcatctccctcgggcagcaggaagtaaatcagtgacgatagcggtcggcttgaggcctcatccgtgtgcggggattgccagtcacgcgtgtaccagccgccttcggggtgggcttccagtccaaggcgttccactatggaccgggcgtatggactcatgtcttgcaaagcgacgctcataatgagatctcctgttcttggcgggtttgctggtttttggcttcttgatatcaggtcaggtcagcggtgtcaccaggcgttgttgtaggcttcgcgcccggatatcaccgtggctcggttcgtgcctgcgccgtgcctcaccagtgtttccagcgtttcttcgatgccggccggagatgatgtgtcgacggggatgtcgaagaacgcgaaatcagccaatgcgcccgcgttgatctgtccaatgcggttgcggcccacgtgcatgcccatggaggcggcaccgcccagcgtcatcatacgaatcaggcgatgtgtcagatcgtcgctggcatagccttgttcgcgggccaggtcgtaaagcatcgacacgtcatcaagcagatcgagggtcggcgtgctggagagcgaatcggtgcccacgcttaccagattgccttcctcgaggtattcgcgcaccggtgcatctttgccggtgttggtaatgcgattcgatcgggggcacaaggccacgcccacgccgcgctgacgtagaatacgccgatcctcgccattggcccacacgccgtgtgcaatgtgcacatccgggccaagcgagccaagctgatcgacgaactggatggcggaggcacctttgcccacgtccttgagctgccggtagctttcccaatcgtggtcacgccagtcggacgccgaataagtggtgagcaccggcggataagtgccggcctcgagcggggtctccgccagatggatatgcagtcgcatgttcagctgacgagcaatgtctggaagatcaacgaacggttcggactccagcgtatacggagcatgcgggctgatgccgaggtttggcagctgctcctcgttcatccggcgcaactgccggatgagctcggtgcggcccttttccatccattcggcgttgtgccagcccattacctcccaataagcgatgccgtgcatgccctgcgaagccagcgcgccggcggcgtccaaatcggtgacgatgtctgcggcggccgtcgttcccgattcgaccatctggcgagcaccgtcctcggcccactgcttccatggctgggtcttctgcgcctcggcgtacacctcgttgaatgccagttcccaggcgcggaaccgatcgtaggtgccttgcccgacctgcaccatgccgctgtactgcagatgagtgtgcgcgttgaccaatccgggggtgagcaccccatcccaatgccgttcacggatggtgccgtgagacgtcatttcctgcttcagcgcctccagcacccagcggcgtttacctacatgaaccacgcggtcgccatgtatggcgactgcgccatcgatgatgacggggcccgtcacggggatgatgagtttggcggaatacagtgtcacatcatcgataagctcggtatcgacggtcggccaggtgttgtcggtcatattctcctcgctgcgttgtgctcggtgccgtgtctatggctatcggtcggcgttctctcggtcgttttccgcgaatctggtcagtcgccaatcgtagccgttgtcctccacggcatggctggctcggtatccgcgcgccttgagcgcgctggcggcgatgcgctggtcggtcgctgcgtcaagtctgataagcgtgtgatccagtgtgcctcgatgttccagaagatatgcgacggcgctggcctgtacggcgaagctcagatccatgatctcgattggattgccgcctcccaccgtgtagttcacgccatcgccgtcggcgattagcgtgagcgttggtccgtcgggaacattgagttgcgcggtgtccctgttgacctgtggggtgaagtcgcttacctcgtccaaggcgatttcgttggcgatgccgccgatcactgcgagcgccgcgccctcgtgcattgcgcgcatgtgctcaagtgtgaccgtatgtctcacgccagtggcggacaccaccatatccgcgcaagggagtgcctcgtcaatgtcttgtgcggcgaagccgtcgaacaccgctttgagtgaagccactggatcgatatcgcagatggtgacttcggctccaagcgcgcgaatacgccgtgcgaagccttggccgaccgggccgtagccgatgacggtgacgttcttgccgtcgaatgcatgctcgccgagaatgcgctgcatggtggtcacgcatgtctccccagtgccgtgggcgttgtcgaatccagttttcagcacactgtcgttaacggctacgaccgggtaggtgagggctcccgcttcctgcatctgctggaacgcgcgtacgccactggtcgtttcctcggccactccaatgagattcgccgtgagctcggggcgttcgagcgaggcgagacgggcgaagctggcaccatcgtcgatgatgatgttcggctgtatcttgtccagcaggcgcagggctgcctcgtgcgcctgttccgcggtccaggctcggctggattcgaccgtgattccttcccggcgcagctgttccgccactcggggatccgtggaatccgggccgcaatatacgccgacgattgcgccggcggccttaagcttgcgcagcagaatcgcggtttttggctccagtatcaggcagacggcaatacgaatgcctgaaaaatcgacgcgggtggtgaggtcatccatggtgtcgcgtaataccggcatgtgctgttccgcgtactccattgcctccagcccacttgccgtgcgcatgtcggcaatggaatcaatgctttgtgtgccgtcacagaggaattcctcgctgtgcccgtcggtcatcgtggcatcttcgacggtcatgccccattgctgggcctgagacttgatttcggcatgcttctgcggctccggaatcgcgaggcgggctcctgccagtgatcgattcgttttctgggatcgggctgccgcccacgccgcaaaatcgctgtctgccgtaatgcttttcttcatattcccatggtacgcatgcatgccgctgctctgccgctgcgcgtgtggtgtgggtgaagagcatgcttgggcgcgttgagtgcgtcgatttcggcagcttcgaacaggcatgttgcatcgaacaaatgttcgaccgtattgatatgctggtcgggccggcggtggtaaggaggtgatggcgatgggcagcggaacggtatcgacgcaacgcgagcatacctatattgccattgatctcaagtccttctatgcctcggtggagtgcgcggcgcgcggactcgacccgttgaccacgcatctggtggtggccgatgaaatccgcaccgataagacaatatgtttggcggtctcaccctcgctgaagaactatggcattcccggtcgtgcgcggctattcgaggtaaaacagcgcctgaatggagtcaacatcgagcgcgcggtccatgctcccggcggccgattaatcggggagtcctgcgatgcgcgcgacctggaacgctcgccgagactcaaagcctcgatggtcatcgccaagccgcgcatggcgcactatttggaggtcagcgggcaggtatatggcatctacctcaaatacgccgcacccgagcacatccatgtctactcgattgacgaggtgttcatcgacgtcacgccatatctgcgctcgctgggtatggggccgcatgccatggcgcgaaccatcgtgcgcgaaattctcgatgaaaccggcatcaccgccactgccggcatcggctccaacatgtatctggccaaagtcgccatggatatcgtcgccaagcacatgcccgccgacaagggcggcgtgcgcgtggccgaactgaatgaaatgtcatatcgtcggctgctctggagccatcgtccgctcaccgatttttggcgggttgggcgcggctatgccaggaaacttgagcacgccggtctgatgaccatgggcgatatcgcccgatgctcggtgggtcgtgcttcggattactacaacgaagacctgctgtatcgcatgttcggtgtcaatgccgaactgctcatcgaccatgcgtggggctgggagccgtgcgaaatcgcggatatccgatcctatgagccaggtgcgcacagtatcagcagcgggcaggtgctcaccgggcccgccgattggcatacggctcggctgatcgccaaggagatggccgatgcgctcgccctcgatctggtcgataagggggtgatgacgaatcggctgacactggcggtcggctatgacattggcagtctcgatgcttcgaagcttgattcatgcgcagaccgggcgatgaggcgtgccgccgaacgcgcggcaaagacctatcaagggccggtgaccgttgaccgtttcggtcgtcgggtgcctaagtcggccgtggggtcgattggattgggcgattttacgtcgtctgccgcacgtattcgcgaggcgatgaccatgctgtacgagcgtattgtggatgcgcggttgctggtgcgtcgactcacagttgttgccgatgatgtggccacgcccaaagaactggcggcgggcaaacgctatgagcagcttgatttgttcggtgatgatggcgatatgcgatatgactgtgatagcacggaatccggtggcgacggaagcgggcgtatgccggcttgtggggacgatgccgccgcacagacgttgggtcgagagcatgatatccagcgtgcgttgctggatgtgaaacgtaaattcggccgcaacgccgtcgtcaaagccatggatatggaagacggtgccaccggtcaggctcgcaaccgtcagatcggaggccatcgcgcatgaccctgcaagaaacccatgcatacgacgacatcatcaacctgccacaccaccggtcgcgcaagcatccgcacatgtctcgtcaccagcgggccgcccagttcatgccgttcgcggccttgaccggatacaaccaggtcattgagcaaacagcaaaaaacgccgaaaccgctatcgcccaggccgaggcccaaggcgataccgatttcggcgcttaacaatcgctcccgttggaggaagccgcagatccgtcagcccacgtgacgctcaaagtggtggaagccagtgatcttgtcgatttcggccatcgcgtcagccggaatcacaaagcccgcggccttcatgttgttctccagctggctgggcttggaggcgccggcgatcacacagctgatctccgggtgctgcaggatccacgccatggaaagcaccggcaggttcgtgccgagctcgttggccacaacgcgcagcgtctcggtcagatcggtggtctcgtcgaatcggtggcagaagtacatgtccagatagtcggtctgcatgttcttcagtgtctgatcaatgctctcgaagatatgcttgcgggacaggccgcggtcgttcacgccttcgccggtggtgacttcgcgggcgcaacgaatgaaatcatcaatgacgctccagcggtatggtgtggccgaaacgtcgaatcggatggcgtattcggtctccggcccgcaatccagcacatgcaaggtgcgcagccgttcgccgtcaagcagcgctggcaggaaccgctccgggcataagcaggcacccatgccgtaatggcatagttccagcagcgtcaatatgttgtccgaacgggcggcgactttcggctcgaatccggcacgacggaacagaatctcgccgatgcggccatcgatgtcctgcggattgcccagcaaaaacgggcagtgcgccaacgaagatagatcgcctggagcaatggcgcgttcatctggaatcgtgttggggatggtggaatcgttggcaatattagtttggctgttcgcggttccggtggtgactaaatccagtcataatgattgcgcaataaccagtactatacgttcgtcgtagaatctggggttatcttgagtcatggctcgtgcgaatagcattgatgtttgcaactgcgggtcatgagatgaaatctgagatgaggtcgtagccggaagaggagaggatcacatgctggaagcgggcgcgatgttgctgttctgtgcggtgctgtttgccagcgtcgccctcggctggtcgattattcccgcgctgttcgttggtgtgctgctgttcatggggtatgggctggttcgccggtgctcgctgcgcgcgatggcgagccgtgcggccggcagcgtacggtccgcggggaccgtggtggtgaccttcgtgctcatcggcgtactgacctcgctgtggcgggccagcgggaccatcgccttcatcgtggcccattcgactgcggtaattcacgccgccacggtgattccgctgtcgtttctactgtgctcggcgatgtcggtgctggtcgggtcgtcgttcgccagtgcggcgactatgggtaccatctgcatgtcgctgggattgtcgatgcaggcgaacccggtgatgctcggtggcgcgattcttgcgggcgtctatgtgggcgatcgttgttcgccggtttccaccagtgccttgctggtcaaacagcttacgcatacgaacctgttcagtactattgcctgcatgctgcgcactggtgcggtgccgtttgtgctgagttgtgtggtatacgttgcggctgcggtggcggagtggctgtgtgcaagcggtggttccggattcggtgcggctagagcggctgtttcaaccaacacaagcagcataaccgatatcggcggattgttctcatcggcctttgatttgcattggcttaccctagttccagcattactggtcatcgtgttggcgttgctgcgtgtggacgttcgcctgcttatgctcgccagcattgccgcctcggtcgcgatatgcgtgggcgtgcagcacatggaatgggcggaactgttgcggctgcttattttcggttaccatgcgcaaaatccgcaggtggccgcactcctggacggcggcggcatcctctccatgctcactgtgatggccactgtctgtatctcctccgcctacgccggcatttttgccgagacgcggatgcttgctcggctgcagcaggtcatcgagatgctcggtcatcgcatcggcgcatgtggtgccaccatgattaccgcgacttgcgcggcggcgctcgcctgcaaccaaaccctcaccatcatgctcactcaccagttgtgcggcgggctatacggcgacgacgaatccgaacgcgccgcgcaagctatcgatttggaagacagtgccgtggtgatcgctccgttgattccttggtcgatcgccggtgcagtgccgctcgccaccatcaacgcccccacgttgagcttggccgccgcaaccttcctctacctgctgccgctgtgccgaatggcggtttcagctgtgcgtcaccgccgtgcaataactactaatatatgagtgattttgggcgtatacaggcgaaattactcatatattagtagtttggcgaacaactatattgtattctcgaaaagcttcgcgataggcggtgataaggtccggcaaacgcattgaggcgttggccgggctggtggagggcagttgggtcataccgatggcgatgccggcttcggtcaggcgcggctcgataagtttgcggtaaagttgcgctgatttcgcgccggttgcgaagatgtgggcgattggagcgccgcgcaagattggtgtcaagtcgttgggcacggcattgcggatgctggcatcgctggctccggtgatatcgcaagaagcaatgacatcccataacgcaatgtggtggcgcagagcaaacgcacgacgggactcaggtaaatcgccgatagcgtcagtaggatcagcggagttggcaaacagcgcctgcatcaccggccaaaaccggttctgtggatgcatatagtaaaacgccgccgctcgggatttcggactcggcatcgatcccaaaatcaaagcccgggactcaccatcccacaccggcccaaacccatgctccacatgttcgctcataagccccatattatgccgtttggtcttgaaaatagttcgggggcggacagttaatgtcatattccctcaaagagaagaaggatttacaatgaaaaaaggtggaagaaattgccagtgaaggcacaagccattcttattggtgttttagtcgtcgtttgcgcaattgctgcggtatttggatataggtcagttgacaatatgctgcatcctcaggcgactctgaccaattcggttgtggccaggcagttggaaaagattcaggatcttactacggccaaggaaaccgattttggttttgaagagtataaggaaggcaacattgctccacgccagatcgtcctcgaagccatccggcaacggaaccagcggattcttccacatccggaaatccgcaaccagccgcttcaactcctcgacataccgtcgctcatccaaccgaatggacatccccactcaccctcctttgcactaccatcccagcacacaaccagacgtcacgtcatgggcagcgccgtacacacgccaatgacgaacaacgcctcggcggtgagccagaacgcggccggccactcgccacacgactcacgacgattatccacacaaaaatacacggcagccaaatccaacgggaaccacaggaacccaacgaacaacgcaaccagcggggccgccaccaacgcgaaaccgctcacatgacgggtcaacgcgatgccgatggccgcgaccagaccaaccacgccgccaccatacgatatatagcgaggaagaatgttcgacccacgatgccgatcctcccggtacaggaacagggaacccgacaccagcagtacaccggccaccaagccggtcacccaccaaccacccgacgcgggttgtgccaaaggcgcaggcagacgatcagacgaccagtccacgaaatcccccggcttcaacaagccagtcgccacataccggtcccacaaccacctacgaccaacctcctgacccacaaacgaaccagccgcaagcatcgccaaggaggcgaacatcacgaaaggcacggtcagacgaggccacaaactgccaatcgcgtaaacgatgaacggagacaacgctatcgacgcaaacacaatgacgaacaccccaacattggggacggccgccaacggccaccaatcacccgacccattcgccttcgccgcatccatgaacactacctgcaccaccacggacaccacaaaaacaaacaggaaccacaaagacttcaacaccacgccacgcattccgaacgcacgacgccccggacgcggaccatgcagatgaggaaccgtcaacgccaacaagccatgactctcatactccagagtcggaccaccattcgccgcagaccgttcatacctgtctctatcaatggtctttaacatatccctgaccgcaggatcgttctggtctcccttagcaagcagaaactgacggaactcctcatcagactcatcctc

SEQ ID NO: 2725 - DNA, 3456 bp, Unknown
  R36_18m  MAG No. k141_10538
gacccggccaagatgcacctgttcgctccgtcgactgagctgcgtctgaactaatagatacttggcgaggtctaatcgcttcgtcaaccattaaacgaggttattctcttcctctcttatggcctcgttggaaaggccctgcatagctgcggggcttttctttttgccttctagacggtctgagggagagaccaaacggtgttttcccgtaaacataacgcgccgaagtcgtggccaaggagcacacatcgcgaacgacacgtaaaatcgaacacatggagttgaacgaattgccccagatggatccgcgtgcgctgaaggccacgtctgtcaaagccgaagacgaacacgccgattcagcggaaccgcaagcactgaaaatcaccgccgccagctcgaacccaaagatgttcacgctgccctggcacaagcccttggccacctggcctgaggacctgctggccaacctgccgcgaggcatctcccgccacgtcgtgcgattcgtgcacgtgggcgacgaggtgtacgccatgaaggagatcacgcgccaggtggccgagcgagagtacgagatcctgcgtcgactgcagaagctcgaactgccaactgtgaccccgatcgccgtggtcaccggccgtcacacccgtgaaggggagccgctggaggcgattctggtcacccggcacttgaagttctcactgccgtaccgtgcgctgttcgcccgcaacctgcgcccggacaccgccgaacgactgatcgacgccctcgccgtgctgctggtgcgcctgcacctggccggcttctactggggcgatgtgtccctgtcgaacgtcctgttcctgcgcgacgccgacgctttctccgccttcctggtggacgccgagaccggtgacctgcaagtccagctcaccgacggccagcgcgaatacgatatcgacttggcccgcaccaacatcatcggcgaacttatggatttggcgtccggcaagctactgcccggcgacgtggatgagatcgaggtgggcaaccgcctagtcgaccgctaccactcgctgtggagcgctctgaccgacaccgacaagttcaacccggacgaaatgtggaagatcgagcagcgcgtcaacaagctcaacgagctgggcttcgacgtggacgagctggaaatgaagaccgccgaggacggcaagcgtgtgctggtccgcccgcgcgtggtggacgccggctacgccaaccgcaagctgctgcgcctcaccggccttgacgtgcaggagaaccaggcccgtcgtctgctcaacgaccttgacgcctaccgtgcctccacgtggcgtgagggcgaggatctggaaatcgtggccaccgattggatgcgcgaggtgttcgagccgaccgtgcgtatgattccgcgcgaatatcgctcccagatcgagcctgctcagttcttccatgaggtgcttgaccatcgctggttcctggcggagaaggccggccacgacgtgccgatgggcgaggccgtgaccagctacatcgacaacgttctgccgagctacaaccttgattccaaggcactcgccgaacttaacgaagaggccgattccggcgtcattgacgacgaatccacctacagcgacccggacgacgacggctacaaccccgatgacgatccggatgcggcagtgtggagtcattaagcggacaatccggtggactgtctgtaggtgagcccatcacacaaagaagcccctcaaatagaggggcttccgtgtatgtacaacctattacggcctcaagcgacaatcactccgccgcagccttgcgccgtgcgttggacaccgcgtacaggctgatacccgccgccactgaagcgttcagcgactcaacagacgagctgatcgggatgccggcaatcgcgtcgcaggtttcgcgcaccagtcggcccaaaccgctgccttccgaaccgagcactacaacgagcggatcggattcaaagccagtctcgccgacgagcttatcgccgccaccgtcaaggccgacaacgtagtatccacgctccttcaagccctcaagtgccttagtcaggttcaccacgcgcgccaccggcatatgcgcggccgcaccggcagacaccttccaagcggcggcgttcactgaagcggaacggcgttccggcagaatcacaccattggcaccgaatgcggccgccgaacgaatcacggcacccaggttctgcggatcggtcacgccgtccaatgcgataaacagcggtcgcgcagcaatacgggcggccgccgaattcgcggcctccattgccttggccttcttctcagcacgatcggccagctcgttcagcgaggagtactggaacggatcgaccttcagaatcacgccctgatggttgccggagcgggcgatacgatccatctccagacgatcggcctccagcatgtgcaggccgttcataccagcgattttcacgatttcgcgagtacgatcgtcatgttcaatacgagacatgatgtacagcgtggaagaaggtacgcctacgcgcagtgcttccagcacggaattacggccgtacaccagatccgaagtatccgccgaagcgaacttgtccactcgacggcgggctgccagacgcgggtcggccatctgccgacgttcggccgctttcttggccttatacgccttgtgatagacgcggtcctcggccttgggagtggggccgtagcccttcagtttgttgcgatgcttgccacccgaccccttggtcggtccttttttgatagccataggtgctattgtcccagcaccccgcgccaaaacgcggctattccgccgtcggtagccggtaaggtattgagagtgaagaagcagcgcatgatattcggactgtccctgctgtattggggattatggttggcgattctgattctgtggatgggtcgcttcgtgacctcattcttgtcgatatatttggtttccgcgctgcgcctcgatgagggtgtggtgggcacagtcgtggccatgtacggcttcggcgcaatcatcggctgcctgttcggcggtaccttgtccgacagattcggccgccaatccatgattatcatcggcgaaatcggcgcagcggctgccctgctggtcgtttccgtgctcactgaccccgtggctttaggcgcggccctgtttgtctatggtgcgttcgcctcactgcccagcccggtcatcgccgcgtatatcgcggatgtggtgcccgccgaacgtcagcaacgtgcgtacgtactgcaatcgtgggcgattaattttgggtacgcgattgggccgattgtggccaaccagctggtcaagatctcgtattcgctgatgttctacgttgaagcggcggtgatgatagccgtcacgatattgctgattgcgttcttccgcgaggtgcggcatttggggattactgtatcggtgcca

SEQ ID NO: 2726 - DNA, 11827 bp, Unknown
  R36_18m  MAG No. k141_10622
agccacatggctgagcagtttggccgtggtgtcgatttcaccgaatcggtcaagctgatcgcgcatcacgttcagcagcaacgcataacggggcttgacctgcttgacgaagtggacggcgtacgcctcatcgagctcgagtacggcgatgtccgcgtccaatttgccgccgaaagtgacttcggtgagcagtgcggagaccacgccgcgcacgaagttcgagccggtcggattggtgaacaccttcaatcccagatcggagagcatcgaggcgaccatgcgggtggtggtggtcttgccgttcgtgccggacaccaataccacgccaagcggcaactgcccgagcgtacgggtcaggaagccggggtcaatcttttctacgactttgccgggcaaagccgaaccgccatgtttggtgacgcgggatgcaaaccgcacgaagcggcctgcggccacggtggcgaacgcataccacggtttgcgggtctgcaccacggacgattggtcttgcgaaacatcgcgtgaaacgttgcttgccatcatcacaccccctgattgctgttgtagtcctgcggcatgtccttgaatttggacgtggcaccgaggaaggcgaggtggaaggtttcggtcgggccgttacggtgcttggccatgatgatatcggcctcgccggggcggtcttccttgtcgtagaagtcagggcggtggaccaggaacaccacgtcggcgtcctgttcgattgagccggattcacgcaggtcggagagctgcggcttcttgtcgttacgcatttccgggccacggttcagctgggaaagggccacgaccggcacttcgagttccttggccaagagcttcagggcacgggagaattcggatacctcttgctggcgggattccacggccttgcccgaggtcatgagctgcaggtagtcgatgaccacgagcttcagatcgttggtctgcttcaggcgacggcatttcgcgcggatctccatgaggctcatgttcgggctgtcgtcaatgaacagcggcgcgttctgcatcttggtccagaactggttcagggtgttccagcgttcgggggtgatgtcgtcggcgcggcgcagggcggccatcggaatattggtttcggcggagataatacgctgagcgagctccaccttgctcatctccaagctgaagaccacggaagtcatgttgtggtgcaacgcggcggcgcgggcgaagtcgatgccgagcgtggacttacccatggccggacgtcctgcgacgacgaccatctgtccgggctgcaggccctgggtcacgtcgtcgatgtcgcggaatccggtcggcacgcccttgttgacgagaccctgctgcagtttgtccagctggtcgagcgcgtcgtggaccaccgggccgatggcggcatagtcctgacgcaccttgcccatcgacatctcgtagatctcggactgggcgaggttaaccacatcctcagcctgcgatccctcggcggaataaccgagctgggcgattttggtgccggcggcgatcacattgcgcaaaatggcccgctgatggacgatctccgcgtagtacatggcattggcggcggtcggtacggatgcgacgaggctgtgcagatagtccgcgccgccgaccttgtcgaggttgccatccgccaacagctggttggccacgagcaccacgtccaccggctggctggcggaaaacagatcaatgattgcgttgtagatcgtctggtgcttgggctggtagaaatcggtgacgtcaatggtctgcgaaacttcgccgatggcatccttactcatcagcatgcctccgagcacggccatttccgcgtcgtcatcgtgcgggggcacgcggtcgaaaatcgggtcgccagctgccgccgcctgcgcgccgccccggcccgcgcggtcgccacgatcgccacgatccgagccactgccgaacccattctgatacgagtgttcacttccttctgccatagccctcaagtataggaggtggcgtggcgagcggaagatatcgcacgactacgttcattaggtcgattcctcactcattaggtcactgtgcttggtaacaccataaaccatgcgcttggaatggcggcattctgaggcgctcgatcaatatctctcaaagtccaccgacctaatgaatgcacaatcgacctaatgaacgcatgaaagtgcaagtcgtgccgaatcatcgcgcaccaatttcatcgttggttcaccttgcggtcagcgcggcgacacgctgaagcgtcaaatgtggatagaaaaaatagttatccacattttggggataattctggggataatccactaagttatccacatactggggataacttggtggatagtctggggataactttgtacggctgcactaggtgcttgcgcaacgtagctaagcatgatatgcgtgtgagcgtgcatagcaactccaccagcattcatcgccaaatcattgcgttggcgctaccgacttttgggcagctcatcgcagaaccgacttttatccttattgacaccgccatcgtcggtcacattggcgatgccgctttggccggactgtccatcggatcgaccatcatcctcacggcagtcggactatgcatattcctggcctactcgaccactgctcaggtggcgcatctgctgggagcgggtcatcgtcgtgagggactgcaggcaggcattgacggcctatggctggccttgagcatcggcaccgtgttgggattaggactgtttgcggctgccgagccattatgccgggcgctcggagggcagggcgaagtgttggaacaagccgtgacctatacgcgcgcaatcgtgctgggtgcgccaggcatgctgatggtatatgcggcgaacggcattttccgaggattgcagaaggttcgtatcacgctgatcgctgcggtgggcggcgcggtggtgaacacggcgcttgatgtgttgttcgttattgtgctgaattggggcattgccggctccggagtggcgacgctgatagctcagtggttcatggggctgttcctggtaatccccgccattctgtggtcccgggcggacggtgcgagtctgcggcctcgtttggccggtattgcggcagccgggggcgacggactgccattgttcattcgtacattggcgattcgtgcggccatggtgactacggtcgcctgtgccgcgcgcatgggtactgccgtgttggccgggtttcaggccgtgaactcctcttggaattttgcgatgaacatgctggattccgtgggcatcgccggccagacgctggtggccacaacgctgggcgctggcagcgtgcagcaggcgcggcggttgacgcgggcgaccgggcgtgcggggctggtcaccggcgcggtaatcggcacggcttttgcggtagtcggcctgttcgccgggcacttcttctcccctacgccaaatattcagacgttgattgccgttggcatggtgacgatgggcatcttcttcccactgcaaggctggatgatggcaatcgacggcattcttatcggcgcgcgcgactaccgctatctggcaggcacctgcacgctgaccgccgtggtgtatgtgacgctcatactcatactggccaatatggtgacgccggcgctgacgagcgacctgatgcgtaccgccgtgctctgggccgcgttcaacgtggtgctcatgggcgggcgcggcctgtccaacgggctgcgcgtgcgctcggacgcatggatgaagtaggtatcggccgcgcgaagtgctgggcgattccgtttacatcgcggcgcgagcggcggaatacatgccgcgcacgatttgttcgcgccacttggaccagccgtattgcttggtgatggtctcaccggcggtggcaccgagcgaggagccgtcggcccgggtcaggtcgaacagcatatccaacagcatcttgtcgtggtgcaagcggtcggccaactcctccgccacggccggatcataggggtccttacccgtggcaaattcggatagcgtcaaatgctcacgcaccagcacggtagcccagtcgacgatgtccggcgcgtagcccatacgcttgagaatcaccggcacatggcgggcaccctcggcggcgtgatcggccacgaacgcgcgcttgccgatgtcatgggtgataccggccaacagcaacgccttgaaatgatcgtcatcataccgtcccccggacggtgtctcacgacccagacgcgacgtgacctccaccatatgccgatcgatggtgtaccggtgggcggccgaggcggacggacggttgcggacgccgagccattccggcatccatcgacccggaatgtccacgaagtcgatgctctcccacacttccataagattcggcccgcatgcaagcaggcgaataaacagctcgcgcgattcgtcatcccactggttgtcgtgaatcgggcagtgcttcagattaaccaaggtagacggattgatgggcaaaccgaattcgccggccgccacggccatacgcaacgccagcttggcatccttggcaggctcggcaccgggtgccaacaccaattcgccttcgtgcttggccacgccgggagccaccacgtcgaattgcggggcttcacgcttgccgccagagcgctgagagaacatctggaagaacgcgaatcgcggcttttcgtgggtcagcgaatgtccagcgcgggatgcggtggaatcaagcgagaaggagatgcgccggccgatacgggcaagcagcgtctgcaaatcgtcgatcgagtaggcggcacgctcgttttcgggccaagtcggatcggcaaggccaagcatggcagccactttggcctgatagggcgtcagcatcaggttggtatccttgccggccaccagatggatgcagtcgcgtacgtcgagcagacgttccacagcttcgtcgtaaatgccgtgcgggcggtcggccagccatgagacggcgagcgcggagacgagcaccgaatcgcgcaaacccccacgggtctccttgatgtcgggctgattgacgtattggaggcggccgaattcgtcgagtcgggctttggcggagtcgagcagttcgggcaggcgcttgcgggcggccttgcgccagcgttcgaggatggatgtggcggtggtggtaatcagagcagtgtcgccggcgatgggcttcacgtccagccagcccatggcggcgggaaggtcatggtcggtgacttcctcgcattgggcgcgcgtgcggatggagtggtcgaggtccagaccgctgtcccatagcgggtaccagagtttgttggccaactcgttgagctgctggtcgttcaacgtgcgaggctcgtagatgatgaccaagtcgaggtcggagctggggcccagttgaccacgtgccagcgagcctaccgcggcgaagccgatgccggagtcgggcacggggaaagagacatccttgcaggccgcattccacagctccgtgaggcattgcatggccagttccgtgcgggctttacgcttggtcgcaccattccggtagacaccatcgtcatccggctggctcatatccatgaatcgttgtttcaagccatctactgctgaagtcattgcttcatctttcattgccaaaaaggtccccgcacggcgtcaattcgcggcgtgcggggacctttcccatgcagtccatccccttctaggcatggacgtctgtgttatcagatcgcggcggaaccggtctcaccggtacgcacgcgggccacggagtccagcggagcgacccacaccttgccgtcaccgatggtgccggtgccggcggacttgatgatcacaccgaccagcgtctcggcatccgcgtcatcggacagcacttcaacgcgaatcttcggaatcaggtccacagtgtattcagcgccacggtagacctcggtgtggccgcgctggcggccgtagccgttggcctcggacacggtcagaccgtgcacgccggcggccgcgagggcctccttgacatcgtcgagcttatggggctgaatgatagcggtgatcagcttcatttcacttcacctccttgagaacggagctggcagtaccagcaaaatcgtaagcacgttcgccctggtcggcaagatcgatgccgccgacttcctgagcttcggtgacgcgccaaccgatggtcttctccagagcgaaggcgatgatcgcggtgatcaccgcggagtagaggatggcgacgagagcgatgaccagctgaacgacgagctgcttccagtcgccaccagccagcagaccagtgccttcaccgaagaagccgatgaggacagtgccggtgaaaccaccaacgccatgcacgccgacgacgtcgagggagtcatcgtaaccgaacttgaacttgagaccgcaggccaggcaggtcagaacaccagcgatggcgcccatcacgatggcccacagcggggaaaccacatcggcggccggggtgatggcaaccagaccggcgaccatacccgaggcggcacccatagcggtgtagtggccggagcgaatcttctcggtgaagccccaggagagcatggcagcggcagtggcggcggaagtggagacccaagcgtagccagcggtgccgttggcggcgaaggcggaaccagcgttgaagccgaaccagccgaaccacagcaggaaggcgccgagcatcacgaacggcacgttgtgcgggcggaacggctgcgtgccgaagcccttacgcttgccgatgatgagcacgataatcagggcggcgactgcggcgttgatgtgcaccacggtaccacctgcgaaatcgtgggcggccgcgccgatagccttggagatggcgccgtcagcagacagcagaccaccgttccagaccatgtgggccataggagcgtagtcgaaggtaacccacagcgccacgaagatcatccaggtgctgtacttcacacgctcggcgatggcgccacagatcaggcctacggtaatcatcgcgaaggcgacctggaaggcgacgtccacagaaaccgggtagttgttgccgttcagaccggtggcggtgaacacgccgtcctgcgcgaccatggagtccttcagcaggaagccgctggccggatcgccgaagatgcctccgatgtcggaaccggcgtatgcaatggaccaaccccacaaagtccaaataatcatagtgaccgacagcgcggccgcctcaagcatcagcatgttcagtacggccttggcgcgaaccataccaccgtagaagaacgccacaccaggcgtcatgaggaaaaccaaggacgcggatgtcaggatccatgcggtgttaccggaatcaatcgctcccatgtctacctccctctctttcgttcagggcaccgggggctttgtgcggccggcgtcttatttgtctctacaatgccgtcccccttatgggggctaacagtttgtcagttaaagccggtcgcgttttggtttcgttacgccaagttacgcgattgttaagcgcacctgacagttaggttgatgtcgggtgggctgattccggcatgattccaacgtatatgggaaagccccgaatcatgtttcgaatatgattcggggctgggtttggtgcgttgcgggcgtttcccgcgcccacaacgtggacggacgcagggctcccctcgctgaggggagctcgaccgtctacgcgagaatgccgtctacgaagccttcgggatcgaaaggtgccaaatcgtccggaccttcgcccagaccgacgagcttgaccggcacgccgagctccttctgcacgctgatcacgatgccgcccttggcggaaccgtcaagcttggagagcaccacaccggtaatgccgatggcttcggcgaacaccttggcctgggccatgccgttttggccggtggtggcgtcgagcacaagcagcacttcatccaccggcaggttcttttcggtaacacggcgaatcttgccgagctcgtccatcaggttcgacttgttctgcagtcggccggcggtgtcgatgatgagcacgtccgcgttcgcttccttggccttggcggatgcctcgaaggcgacggatgccgggtcggcaccgtccttgtcggagcggacgacgggaacgccgaccttggcgccccaggtttccaactggtcggcggccgccgcgcggaaggtatcggcggcgcccagcatgacctgcttgccttcggaaacaagcaggcgggaaagcttgcccgcggtggtggttttgccggtgccgttgacgccgaccatgatgatgacgctcggcttgttcgcgccgtccttgtcggcgttgagccggcggtcgatgtcagtgccgacgagcttgagcagtttgtctttcagcgccgcgcgcacttcggccggatcggactggcctgcgattcgggcgtcgttgcgtagttcctcgacgagctgttcgctggcttccgcgccaacatcggcgagcagaagggtgtcttcgacgtcttcccaatcggcttcggagagctgatccttcgcaagaatgttgaacagggccttgccgaacggattgccggatttcgacagccgcgccttaagacgctgcatgcgtgtgccggcggattcgggggtgtcatgaaccggttcgggcttggcttcggtggctggtgcaggagccgccgtttcggaagaggaagcttgagctgaggacttctgctgactttcagccgtagcttgttcagccgcatcaacattggaatcaacggacggcttcaccgtggaagaatcagatgctgccgactccgcttacgcagcaagacgggcgtcggccttggctttcgcggcttcggtggacttggccacggcagccttgcggctcttgccgaaccaccatccgccgatcaccagaattgccgcgatgacggcgacggcgacaatcgcaataatcacattcgtatccatggctccagcctaagaagcgcaacggacacaccggctccgccccgcggacgcaccacgaatgtccgattcgccagggggataaggtgctctgccatgcaaggcatcgataatgcgatcttgacttcgatacatctggtgacgtttttatagatcatgaagagtgattcttttgtcttccgctgtctgctttgaaggactgcttcctttctttagggaatttgcgtagcgaatcagactcctcgcgatgaggaagaccagaacgaatacggcgattacgcctaggatctcaatcaataatgcaatccatgtccagctcatgattcatcctttctctttctgtactcgtctatgagtattcgagccgtgtcgacgtcgtatctatcgtcaatggcgagactcttcaccaagaggatgaatggatcctccgtatcgttgtcgttcaaccgtattttttcgataagcctgtcaagccggatcctcatggtcgggtaggagacttgatacagctgggacatttgcttcagagatcctgacgatagcacgaagttcttgatgaaggccaaatcctcctccgtaaggctggccaaccattctggtagacgatccacatcaccccctttaataaaatttattatttattaaatatattaaagccgcgatgaagcattgtcaatatgacacacatgtccgattcaccagaatcggacgatacgtgggggcggacggtcagggagctatccacggggcgtgaaaaactggacagcatggccaatacatccagaatgacgtcgtatcagcggcgcgagcagctcatcgaaatcggtcgttcgctgttcgcgtcgaagggttttgaagcagtgagcgtggaggagatcgccgccaccgcaaaagtatcgaaacccatcgtatatgagcatttcggcggcaaagagggcctgtacgccgtcattgtggaccgtgagatgcgcgcgttgaccagtgtgctcaccgccgcgcttgacgatccgaccgtgcacccacgccagatcgtggaacgcaccgcactcgcactgctcacctatatcgaagaggacgccgagggattccaggtgctggcgcgcgactcgcccagcaccgaaccgtccggctcgttcagctcactgctgggagacatcgccgtgcgcgtcgaagacatcctttccgaaacgttcaaacggcagaaactctccaccaaaggcgtgccgtactatgcgcagatgctggtgggcatgaccgtgttcaccggccagtactgggccgaccggcccaaggtgagcaaggagcagctggccgcgtacatcgtggacctggcatggcatggcctgagccggctcgattccaagccgcagctgttgtttgaaggcgtcaaggcccggaaggaggccgagcgccgggccaagcgcgggatcgatgccgaaacaccggccccggacggcaaggcatcatcgcccttagagcagacggacctcgaccacacgctcagggaagattcagggttgcagaatgtgagttcaggggcacaggttgcgcaacactctgccgaggcgggagacgaagtgctacggtttgaacaggaaactgaacataacgactaaatatgtgaggacgtaagactttcatggccagcacggcaaagacgctcacctttgtgatccccgcatacaatatggagtcctatctcgaccgttgcgtgaactcgctgctttcggcaagcgacaccagcgacctcgaggtactgattgtggacgacggttcgaaagacggcacgctggagtacgcgcgcaaactggaacgcaccaatccaggtgtcgtgcgcgcgattcaccaggagaacaaaggccacggcggcgcggtgaacaccggtatcacggcggcgaccggcatgtatgtcaaggtggtggatgcggatgattgggtcgacccgcaggccatcgacacggttctggccacgttgcgcgcgcaacgtgaggccagcgagccgatcgacatgctggtgaccaactatgtgtatgacaaagtgaccaagcgccacaagatcgtggtgaacttccgtcatgtgatggaggccggccgcgtgctcggctgggatgacctgggcaagttcggtctggcgcagtacatcatcatgcatgcgctcactttccgcacgcaggtggtgcgcgattccgggctgaagctgccggagcatacgttctacgtcgatttctattactcgtaccagccgttcccgtgggtgaagcgcatccagtatctcgacgtgccgttctaccactacttcatcgggcgcgagggtcagagcgtgcagaccgacgtgatgattaagcgtgtggatcagctgcggctcgtcaatcggctgatgaccgaggccacgcccgaacgtggtacggtgccggaggggctgtaccggtacatgattcacttcctgacgatcgaatcatgcgttacctcggcgttcctgattctctcgcgcgatccggccaactacgttaagaaaaccgagctgtgggatgcgattgacgcctattctccggccatcggcaaggatgtgcgctcgaagctgatgtcccgcgcgctcaatctgcctggtaaaaccggccgctggatcgtgcgcaacggctatctcatcgccgaacgcatcgtcggcttcaactgattcggattgtggctttgccctgctgacgcgttatcagcagggcatccctattacctccccagccgaggtcttgctactcggcccaacggtcggacattgcgaagctgttgtgcatcaggttgctggaggtgtatagcacgtcgttcagcagcttggttgtatgctcgcg

SEQ ID NO: 2727 - DNA, 7529 bp, Unknown
  R36_18m  MAG No. k141_10907
ccgatgttcaccagctcgaacagcacgttgatgttgatgaagccgccggcgaacgcggtcagcagaccgaagaaccaggtgcccttgaacggggtacggtacttctcgtgcacgtggccgaagaacttcgggaacaggccgtcacggctcatggcgtagcagatacgggattggccgtacagctgcacgagcatcaccgtggtcatgccgatgagggcgcctaggttcacgatcaccgcgagccagttcatgccggtctccagaatcacgccggccactggggcgtcgatgtacttggcgaactccttgtagggcaccacgccggtcatgatcatggtcatgacgatgtagagcacggtggaaacggccagggacagcagaatgccgcgcggcagcgtcttgttcgggttgatggtctcctcagcggaagaggacacggcatcgaagccgatgaagctgaagaacacgatggaagcggccggcacgatgccgtacggctgggtggagccgggctggaaagtgtagatgccgtacggggagaacggctgccagttggacggcttgacataccacacggcgcacacgatgaacagcacgatgatggcgagcttgatgagcaccatcacgtcattggtgcgcttggtctggttgatgccgatcgagagcacccacgtgatgatcagcacgatgacgaaaccgggcaggttgaagtaggtggtgacgtccggcgtggtgccgtaggcggcggtcagctcgaccggcagatgcagtccgaagccttccaacaacttgttgaagtatcccgaccagccggcggacacggtggccgcctgcagagcatactccagaatcagatcccagccgatcacgaaggcgatgagctcgccgaacgccagataggcataggagtaggccgagccggacaccggtgccatggcggcgaactcggcgtagcacaggccggcgaaaccgcagcagacggcggccagcaggaacgatacggacagggccgggccggcggtgagcgcgcccttgccggtgagcacgaagataccggtgccgatgatcgcgccgataccgagcatcgtcagatcgaaggtgcgcatcgtgcgcttcaggggagtggattcggcgacaagctgatccacgcttttcttacgaaacagatccatgttcttctctcatgaaatctaggattatggggctgaaccggacggatttccgggatcccggcacgcctcaacgccgggaatcaaaggcggcttccgagaaaccgcatatcggtcattagtgtacgactgccgggcgaaaacaaacgattgtgaccacacgtcacattcctgcgcaacaataggtgcctatgagcatgaacgcagcacccgaaatcgcattctcgtccgagcagggcaaggccaactatgcggccgcccgccgccaataccccgcacaggccatcgtgaacctcaaaaccatgcgcgacaacatggcccacctggtctccgtggtcggcggcccgaactccggcacggcggtgatgggcgtggtcaaggccgacgcatacggccacggactgctgcccgccgcactggccgcgctcgccggcggcgcgacatggctcggcaccgcgcaatcgcatgaagcactgctgctgcgcaaactcggcatcggccccgaccgttgccgcattctgacttgggtctacaacggcaccgaagtgccattcgatgagctgatcgctgccgatatcgacgtatcggtcggctccctgcccggcatcgatgccgtggccgccgccgcacgcaagctcggcaagcccgcccgcgtacacgtcaaggtcgattccggcttcggtcgcaacggtttcacgccggccggattcgacgccgcgctcgccaaactcgtgccgctcgccaaagagggcgtgttgcatattgtgggtcagtggagccatctcgccgtggccgattcgcccgatgtgcccgaattcgtgtcctccaccgaccgccagatcgaaacattcaaggacttcacgcgccgcatggaacaggccggcattccgccggagatccgtcacctggccaacacggcggccactttggaccgcccggagattcacttcgaacttacccgccccggcatcggcctgtacggctacgagcccgatcccgcgatgggcaccccgcgcgactggcatctgaccccggccatgcgcctgcaggcgcagctcggcacggtcaaggatgtggaggccggccatggcatctcttatggccgcacctacctgaccccggacaacacctcgaccgttattgtgccgctgggctacgccgatggcatccaccgctccgcttccggtttcgatatggaaggtgccaagcacgtggagaagccgggcggcccggtgcgcatcatgaccactgaaggtccgaagctctaccgcgtgtgcggccgcgtgtgcatggaccagttcatcgtggacctgcacggatccgccgccgaactcggcgttcacgagggcgacacggtcgaactgttcggcccgggccgcggcgaggattacgttgagcctaccgccgacgattgggcccgcgccgccgacaccatcagctacgagatcttcacctgcctgcgcaaccgcatcccgcgcctttacgagcatgccgccgaagtactgcccgccgccgacctcgccaagctcgaccccgccacgctgctataaggtgcattaccgccatacggtggcaccccgtaatcccttcttcccgaatatgtgccgttgacatgtgctgagcgtcacatattcgggaaatcggccccaatctcccgaatatgtgccgttgagttgacgtcagtggcacatattcgggaagtcgggattactgcggccgatatgtgtgcctatgcttggcatatggaaacaacgttggatggggaacaggtgctgagcgatgagggctacagcgccttcgacgaggagcggtgggcacccgagccgcccaaatccaagtcgcgcacggctttcgaacgcgatcgcgcgcgactgattcattcgtccgctttgcggcgtttgggcgcgaaaagccagattctgattgccggtaccgacgatttcgcccgcactcgactgacgcatacgctggaagtcgcccagatcggtcgccaaatcggcgcattgctcggctgtgatccggacgtggtcgactgcgcctgtctggcccacgaccttggtcacccgccgttcgggcacaacggggagcgtgcgctcgccgacatcgccagcaatatcggcggcttcgagggcaacgcacagaccatgcgtatcctgacccggctcgaacccaagatctttcacccggacgggcgttcggccggcgtgaacctgacccgtgcggccttggatgcggccgtcaaatacccgtggaccttggccgaagccgaccaacacccgaagggggagcggtcgaagaagttctgcgtctacccggatgacgaaccggtgttccgctggctcaaaatcggcgcgccccaggccgccaaacccatggaatgccagatcatggacctttcggacgatgtcgcctactccgtgcatgatgtcgaggattccatcgccaccggcgcgttcgatccgattgtgctcgccgatccgaagatgctggaccacatcatcgagcagacgcgcgcatggtatggggcgaagtgggatgccgacaagctgctggccgcgttcatgcgattgcgccgagagcatttgttccctgcacatttcaatggttcgcgcgaatcgttggcacagctcaagaacatcacgtccgatttgatcggtcgcttctgctggtcggtggaaaccgccacgcgcgacacgtatgggcccgggccgttgacccggtattccgcgaacatcgtgattcccgaggacacgaattacgagatcgtggcgttgaagggcatcgccgtgtacttcgtcatggcgcctcgcgagcgcgagccattccatcaggaggagctcaagatcgtatcggatttggtcgatgtgcttatggccgattcgccgctcccatccgacgctttggaaagccagttcctggccgattggaacgaatccaccaacgacgacgaacgcctgcgcgtcgccatcgatcaggtcgcgagcctgaccgacaactccgctctggccctgcactccatcttgtgctgagggcgtgttggacgggcgcttccctcagtctcgctgcgcgagccagctcccctcgggtgaggggagctgtcgctgtaggcgactgaagggagtttcgcggaagaaatgataaccgacggtaaaaatttaccgtgtctcaggtgaggcggtactctagagacttatggtcggaatgattaagaaagaggatgtcgagaaggtgcgcgccgccgcggacctgtatgacatcgtatctgcgaccgtaacgcttaagccctccggcaccggcaccttcgtgggcctttgcccgttccacgacgagaaaaccggcagcttcaacgtgcgcccctcgctcggcgtgtggcactgcttcggctgcggcttgggtggcgacgtattcaaatacgtcgaacaatccgaaaacatcgacttccgcgaagccgtggaactgctcgccgacaagtaccatatcgagctgcactacgagaacagcggcaacggcccgaaccgcgagaacaccggctccaagcgtacccgactgctggaagcctgcgaggaagcccaacgcttcttcgtctcccagatcctgaccaaggaagcactgcccgcccgcaagctgctcggaggccgcaacttctcccaagccgactgcgaacgtttcggttgcggctacgcgccccaaggttgggataatcttgtgcgccacttggcctccaaggggtttacgcagaaggaaatcctcgacgcgggcttggcccgccaaggccagcgcggcatctatgactatttccgcggccgcgtgacgtggcctatccgcgattcgaccggccgcacgctcggcttcggcgcgcgcaaactatacgaagacgatcagatcgccgccaaatacatcaacacgccggacacgcagctctaccgcaaaacccaggtgctttacggcatcgatttggcgaaatccgccatcgtcaagaagcgacaggtggtgatcgtcgaaggctatacggacgtgatggccatgcacttggccggcattgacaccgccatcgccacgtgcggtacggcgttcggcgccgagcacgccaagattgtgcgccgcctgatcgccgacgattcgctgggcgcggtccagctggtcgggccgttgaaggtcaaggaccagccgttgagctcgcgcatcgtgttcacgttcgacggtgacgccgccggccagaaagccgcgctgcacgctttcggcctcgattcggccttcctctcccaaaccttcgtggccgtggccgacgacaatctcgacccgtgcgacctgcgcatcgaacggggcaacgaggcggtgcgctcgctgatcgcccgcgccaaaccgttgtatgacttcgtgatcgacgccgccatcggccggttcgacctgacctacacgcccggccaagtgggtgcgatgaaagccgtggccccgctggtggcgcagattcgcgaccgctccctatgggacgcttacgcgcgcaagtccgcgggccgtatcggcgtggatcttgaggtgatgcgccgcgaggtgatgaacgcgcgccggcagatgcatgtacgcgatgaggacgcctacacgcccaaacgtcgattcgagcgtgacgagccgcgtgtggaacccggcaccaacccatacgccaatccggccacgcgcaaggcgttggagcgccgtgacgccgccgaacaggcatatttcaagatcgacgacgccgtattcatcgccgaacagcagttcatggccgtgctgattcaggtgccgcgcgccatcgaccgcaccatgttcgggcagctgaccatcgaccatttcatgacttcggtgttccgcaccctgttccaggcgatcgcggccgccggcggactgccatccgacgataccccgcaggggctgtggatgcacaacctcaccaaggccggcgggccgatgctgaatcaggtgatcaacgagctggccgtcatgccgttgccactgcctggcgacgacatcggtagcggtgcgcagccggtgcaggccaacgtgtcgggaggaggtgttggcgtgaatggcggtgccgccgcagtacagctacgccctgccacgccggaagagcagcgctatgccaccgaactgctcacccggctactggacatgggcttcatgcgccagatcggcttggccaaacgccgcatggcccagctgcccgacggcgaagagaagataaccctcctcggccagatcacccgcatggaaaccgcccgtaaagacctccaagcccaaatctacggcaacaccgtcggctaatacctcccactgattgcgcgcatcttcgaatacgtgccggatgcataaggccatacaaccggttgccggattggatgggtgcagaagttgcagattggccccatccaaattggactggtttgggtggggccaatccaatccgttcaataatgaagcgcgataccaagcagcgtcgaacgaagggaaactcatgacgcagaatcgtgcggaactcaaccgtaatctggcccagatgctcaagggtggcgtgatcatggacgtcaccacgcccgaacaggcgaaaatcgcgcaggatgccggcgcgtgcgcggtgatggcgctggagcgcatccccgctgacattcgtgccgccggcggcgtctcccgtatgagcgatccggccatgatcaagggcattcaggaagctgtctcgattccggtcatggccaaggtgcgcatcggccacatcgccgaggcccgcattctgcaggccatcgacatcgactacatcgacgaatccgaagtgctttccccggccgacgacgtgtaccacatcgacaagaaccagttcgacgtgccgttcgtgtgcggcgcgaagaacctgggcgaggcgctgcgccgcatcgccgagggtgctgccatgattcgtaccaagggcgagcccggcaccggcgacgtgattcaggccgtgcgccacatgcgcaccatgaacaagcagatccgcgagctcgtggccttgcgcgacgacgaggtctacgaggccgccaagcagctggccgtgccctacgacctggccaagtacgtgcacgacaacggccgtctgcccgtcgtgaacttcgccgccggtggcgtggccaccccggccgacgccgccctgatgatggagctcggtgccgaaggcgtgttcgtgggctccggcatcttcaagtccggcgacccggccaagcgcgccgccgccatcgtcaaggccaccgccaactggcaggacgccgatctgctcgccaagctgtccgaaaacctcggcgaagccatggtcggcatcaacgaggacgagattcagaccatcatggccgctcgcgg

SEQ ID NO: 2728 - DNA, 2839 bp, Unknown
  R36_18m  MAG No. k141_11346
aagaccaagatcatcaattccgcagtgatcactctccagatcacggtgataggccgcgatgtgccgccgcccacgttctcgtcctccactattgatgtcgaggcgggcgcggaccccaagaccgttgatctgacggcgctcacccatgcaccgtccggcgtgtatgacgacgaaaagcaatacacgtattccggtggaagctcatcatccaggcaaatcaccgcaaacctgtcccgttccggtagcttgcaggtttccgccaccaaggatgccgatcctggcaccaccgcgtccattcccgtgcaaatcgcatacggcgcgggcaccgtgaatgccggtgtgaccgtgcgcgtagtgtcttcgacccgtccgctgacacgcgtcggcaacaagacgttgaagatcaaggccggtgccagcgatgccgtgaacgtgcttaccggcgcgtacaatccgttccccgattcctcgctgaccgtcatcagctgcaaggcggatgacgccgccaaactcactatcgccggatgcgatgcctccggaaacgtcaccatcgccgtcgcatccgatccgggtgcttccacgaacaccgtgctcgtcaccgtgcaagacggcagcaagtccaaggatcgtgaagtcaccgcatcgattaccgtgtccgtgatcgacaagcccgagccgccactgctctcccccgtagccggggaaccgcaggacagcgcggtcagcctcacatggacgcccggtgccgccaatggcagcccgatcaccaactacaaggtcagttggaccggcgccgccaccggagagaaggattgcggtgccgtcacctcatgccaggtcacgggtctgaagaacggcaaaacctattccttcaccgtcgccgcgcgaaatgacgtcggttggtccaaaccgtccaccgccgtcgaagccacaccggacaaggtgccgtccgctcccaccgatgttacggtcacaggtggcaataaaaccgccaaagtgacgtggaaagcgccgagcggtgatttcagcgccgtcgacaactattcggtgaccgtcaccggtgcaggtgctccgcagaccaaggaaaccggcaatacggccaccgagctgtcgtttacgttcaacaacaacgacatttccgatggcaccgccattacggcgaccgtcaaagcccataacaaaatcaattggagtgccgagtccgccgcatcgccgtcagagaagatctggggagacccggatgcgccgaacattgcgttgtcgaacgacgacaccacggtaacggcgaaagtcactctcggcaataaccgcaatgccggctgccggcgaatttccttgggaggagacgtcaaggacaccatcgattgcagtgacagtggcgctacgttcgatatcaatgagaacgatttgaacacccgggaaatcaccgtaacggccaccgtggtgccgcagcgcgatgcttccgccggcacaggcaagagcaggtttgtcccgcagtacaatgtccagccgcccactgacgtctacaccaccggatccggcagtacatgcaccgtgcattggaccaagcaggggcatgcgcagtcctacaacgtgactgccgatggcatcgattccggtacagctactaaccggaactcactcgacttccgaatgagtccttgggccaaatgcaataccgcatcggtgcaacaggtgttcaacggcgctaccagcgatgccgccaccggaggcccgtacaatggcgctccttacacctatgagaagaaggctgcaatcaacaaaccacaggagctgcgctggtcagacaacgctcacgtcattaacgtcaccggcggttcggttgaggtctatggcaagcaggccaccgtacaaatcatcatcaatggccaaccgttcacgtggaaccccggccagccattggacgtcaccgacttggccgtggccgccgatggcaactacacgtggagcgtcaaagtcaccggcgggccgggatactccggtctcgacaatacggcggacggcagcagcgtcgcgggcacacgcccctctgattcctcggaggggaccgagtcgctcaaatccggtaccgatgtcaccactttggccaagaacccttggattcttggtttcggtaataccccaatatcgtcaaccaccattcacaagcagtaggagaacatccatgagcgagaacatcgacgacgcgacgcagctgtctgacagcacgcagctatccgacgccacgcacttgtccgatgccacacatctggcatcggaaccgcacactggcaccaccccgaacaccgagacggcacagcaacccgttgcgttgcctaacctgccgcagcggccgtcacaagcgtcgtcagaaaagccgtctcctactactgatgccgcctccattcctgcgggcgatgacagcaccgtgctcaagccgcgcaaggacgcgacgccagccatcccgcagcaggtcggcatgccggcaaagaccagcacgcccaaagtcgcgcttccgcacttcggacgtaaatccggcaagcaggccgctactgcgaatgctgcccccgccacccagacctcccgtcaatggacgaccacaaccgccggcaagaccgcagcatccaacaccgaaaccgtggctggtcgcgggccggtagccaatcagcaggccgccgcgcaatcccagccgcaatcccagccgcagcgtcagtcgagcaaagccgcgcaagcagccgcatcggcactgcccgccagcatcaattccggactactgccccagcccacggctcaggtccgggatttccagcagtccttcaatgcgctggtcgagaatgtc

SEQ ID NO: 2729 - DNA, 10701 bp, Unknown
  R36_18m  MAG No. k141_11738
atcacataacgctgatattcgctgatactcgctgatattcgtgtgtcgggctgcctgttgccgaacgtcattgacggcaccaggcagccctcccttttccctgtttcctcactggaatcgaaaggatcgtcactatggccaatcatgttcgttccattttccttatccgtcatggacgcacttcctataacgccgctcacaagctccaaggccaggtcgacattccgctggacgccgtgggtgaatggcaggtcaagcagaccgccgcggccttgaaaagcctgtacgtcgatcgtcggcaggaaatcaaccaccggttcattgtctgctccgatttgaagcgtgcgcacgccaccgcgcaggctttcgccgacgtattgggtggaatcgagcccgtcgatgatcatcgcgtccgtgaacgcagcttcggcgactgggatggccatgccgtggctgaactggccgaacgctaccctgaggacttccgttcctggatggagtctcggggcggtgaactgaagtatggtgccgaacccaaggaagccgtaggcaaacgcggtgtggaggctcttgaggactggtccacgcgtgccggagacgacacggacctgttcgtgttctcgcacggcgcatggatcgcgcagacattgcagaccctgttgggcatttccgcgatcgatccgaccttctccacggtggtctcattgcgcaatgcgcactgggtgcgcttggtgccgatggacaatcccgatggcactgtgcgctggcgtctgctggactacaatcacggtccggccatcgccgacaccgacgaatgggaacgcgaacgctgatcatgttcccgactcccctgctaatccaataggtccggtgcattcggaaccgttcaagcaataactgaatggctcaatgcctgaataatggcggaaacaagccaaaaagtgtcgccaaatcacacttttgtcatttggcgacacgccggcttttgccagaatcgacatctcgtcgtaatgtatacgaggtccgaacaacgggccaacaattgaaaacggggctatagcgcagctggtagcgcatctccatggcatggagagggtcgggggttcgaatccccctagctccacgacgaagccatcaaatcaggcgatatggtggtttctccgctggttcatggcgggtcttgcgactcccatgaatcggatagcttcactcggggctatagcgcagctggtagcgcatctccatggcatggagagggtcgggggttcgaatccccctagctccacaatcaaggccggtgcttcacacaccggcctttttcgttttctatcctatcgggcgacttttgtgcaacattcccgggaatgcgtcgcaaaacagggactggaatgcatgcagtgcgatactttccccggaaagtatcgccaaggggacgctcttccgattggcgcgacaccggcgtgagagataacagtaatcgccactacaatgaggtgtggtccctatcgtgttgatcatcaaaggagacaaaaacatcgtgaccgtcacccgtgtatatatcgccagccctgaaggcgccaatggccgcaacgtcgtcgcttacggcgtgctcaacgcattgacttccaagtacaagaccatggtgttccgccctgctgtgtccaaccatgacgaattcaccccgatcctgctcgccgcttccaatgccggactcggcgtggccctgtccaccggcctcgacgtgcataaggtgcgcgccgacaaggacaccgcccgcggagacatcgtcggcgagttcaactacgccatggaggtctcccgcgcgaacgccgccctgatcgtcggcaccgacaaatcccacgtcaacgacccgaccacctacgagttcaacgcggacgtcgccgccgatctgaaggccggggtgttcctggccgtgtgcaccgtcgaccgctggccgcacgagctcgacgagaccgtcaagctgtccatcgagggcatgcgcgccgcgggcaatacggtgctcggcatcttcgtgaccggctgcgagccgcgtcacgccttctccgtcaaggagaccctcgccaaatacggcctgccggtctggactttgccgcaggtgcccttcaccgacgaatccaccaaggacctggcccttgagaccttccgcaagcacgctcccatcgacgaggtgctcgccgcgctcgatgtggacgtcaccgcgccggtcacgccgtacgccttccaattcgacctgctcggcaaggccaagagcaacaagaagaccatcgtgctgcccgaaggcgaggaggaccgcatcatcaaggcggccgattacctgctcgaacgtgagaccgtgaacctcatcatcgtgggcgacaaggacgccatcctggcccgcggcagggaactggggctgaacagtctggggcacgcccgattccaggccatggacgacgagaacgtgttgaagcccatggtcgccaaactgtgcgagttgcgcgccaagaagggcatgaccgaggagcaggcccgcaagcaactgaccgacgccagctacttcggcaccatgctggtggtgctcggctatgccgacggactggtttcgggttccgtgcattccaccgccaacaccgtgcgccccgccctgcaggtcatcaagaccaagccgggccagaaactggtctcgggcgcgttcctcatgtgcttcaaggaccatgtggccgtgttcgccgactgcgccatcaacctcaacccggacgccgagcagctttccgaaatcgcgttgcagtccgccgagaccgcacgtgccttcggcatcgacccgaaggtcggtatgctctcctactccaccctcggctccggcaagggcccggacgtggacgtggtcgaggaagccaccaagctgctcaaggagaaggctccggatctgccggtggtcggttccatccagttcgacgccgcctggtcccccaccgtggccgccaccaaggccaagggcaacgatgtggccggacacgtcaacgtgttcgtcttcccggacctgtgcgccggcaacatcggctacaaagccgtgcagcgctcctccggcgccttggccatcggcccggtgctgcagggtctcaacaagccggtaaacgacctgtcccgtggtgctctggtgcaggacatcatcaacaccatcgccctcaccgccatcgaagcgcagtgagcccggcttagctcccgccagcgggagccactgtaatgcttattttgtagcaagcaacgagtaatctaatcaacggtaacccgtgtctcacgggaacattcaatcacaatggaggatgcccacaatggcgaaaaccgtccttgtcatcaattccggctccagctcgatcaagtaccagctggttgatctcgaatccggcgaaggcctcgcttccggcctcgtcgagaagatcggtgagccggtcgacggccactacaagcacgagtacaacggcgaaaagcacgagcttgaagagccgattcacgaccacgagcagggtctgaagcgcgtgctcggcttcttcgaggagtacggcccgaacctgtctgaggctggcattgtcgccgtcggccaccgtgtggtgcagggtggctccatcttcccgaagccggccctcgtgaccaacaagaccatcaaccaggtcaaggatctggctgtgctcgccccgctgcacaacggcccggaggccaagggtgccgaagtcatgcgctccctgctgccggacgttccgcagatcttcgtcttcgattcctccttcttcttccagctgccgaaggccgccagcacctacgcgctgaacaaggaaatcgccgatcagtaccacatccgccgctacggcgcccacggcacctcccacgagtacatctcctccgtggtgccggacgtcatcggcaagccggctgaaggcctgaagcagatcgttctgcacatcggcaacggcgcttccgcttccgctgaggtctccggcaagccggttgagacctccatgggtctgaccccgcttgagggcctgatgatgggtggccgtaccggtgacatcgacccggctgtggtcttccacctgatccgcaacgcccacatgaacgtggacgagctcgatgccctgttcaacaagcgttccggcatgatgggcatgaccggctacggcgatctgcgtgaggttcaccgtctggtgtccgaaggcaacgaggacgccaagctggctctggatgtctacgtgcaccgcatcgtcagctacatcggcaactacacctaccagatgggtggctgcgacgtgatcaccttcaccgctggtgtgggcgagaacgacgacgtggtccgcaagatggtgtgcgacaagctcgctccgttcggtgtcaagctggacgaggagaagaacgccacccgctccaaggaaccgcgcatcatctccactccggactcctccgtgatcatcgccgtgatcccgacgaacgaagaactggccatcgcccgcaagtccgccgcaatcgccgaggctggcaccgatacctacggcaacaccttcgccaagtaagtaaccgccgttaggcatctcactaatctctagttgcaacactatgggggctgattccgattggaatcagcccccattcgtatatggtcatgagaccactacccctgcgtcatactcccctcagtcgcctccggcggacagatccactcagagaggggatccaggccctataacttggctcccttctctgaggggagctgtccgcgtagcggactgaggggagttccaccagaacacaggaccccttactgcctcagcatgccactccacataccgacgaaatcaggcaaggtcttgcgcgtggtggccacgttgatgacctcgatatcgggaatacgcagccccagcatcgcggcgaacgtggccatacggtgatcagcataggtttccatcacggcaccgtgcaacgtctccgccggcaccggttcgatacgcaatccatcaggcaattcctcagccgctcccccaacacgacgaatctcgttgaccaatgcctccagacgattcgtttcgtggccgcgcaggtgaccaataccaaccatgtctgtcgacttatcagcaaacaccagaatcgccgccaacgagggcgcaatctccccggccgccgtcaaatcgaacgtacccagcccacgcacggtgccgtcaccggtcacctcgcaatagcgcacgccgccgatggtcgggaacgatacttcggcacccatctgctccagatatccgggcaacaggccgcccggctgggtggtggtttcaggccaatgaggcacccggaccgtgccgccggcgatcaatgccgcgccgaggaatggcgccgcgttcgacagatcgggctcaacggtcaccttgctcggcagttgcattgcgcgcggttcaaccgtccatgtgcgggcggattcgtcggtctcaaccgcaccgccggcaccggtcacatcggccacggtcatgcgaatgtgcggcaggctcggggtcttctcccccgtgtgcgcgaggtgcagaccgccaggcagtttggaactaatcagcaacaggccggagatgaactgggaagaaccggacgaatcgatgctgacctgcgcctgggcagccggcaaggttgcaggcggcgtaatagtgaacggcagacggccaacctcgccgtggtaatcaaccgttgcacccagctgttccaaaccgtcaagcaccggcttcatcggacgtgcataagcctgttcgtcgccatcaaaattcactgggccatctgcaaacagggcaaggccgggcacgaaacgcatcaccgtgccggccagtccgcagaacacattgacgttgccatggaatcggccggatacaggaggagtaaccgttacggtggtatcggttgcggaatccacgtcgcagcggacaccgagggcttcgagtgcgcccatcataaggtccgtgtcgcgcgaacgcagcaggccaatcagagtaacgggcttgctgccgagggcggcgagaatcaggtagcggttggatagggacttgctacccggcaccgttaccgtagtgttcaacggctgtgcggcgagcggggcaggccagagattcgtgagtcgttcagtcataaggccaaatctatcaaacaaattattcaccggtcggcagcgatgcgggattcgatctgctgatcaggtgcggaagacggctgctcaaaaccgccttcgatggcctgcgcgtgcaacaactgagcggccgcgcgatcggcctcgatggcggcgatctggcgcgagaacacgatgaaccagccgaggaacgccagaccagccaacgcctccacattggtgagggtgttgtgacccatcatcatattgacccagaatgcagcgcatacgagcgcggtcaggtcggaggccaccatcactgctttggacaggcgtggcgcaagccacggcaggagcacgaacagcagcagcatgacgaacggcaggcctttggcgcatatattgtgcaagagattgtgtggcgtgtaccgaaacacgccgatgccgatgaatgccaggccggccaccatcagcaggaaggacagaatggagatgcgcagcatgaaatgtgggatttcgtagccgcgattcggatctctgttggtgcggtcgtgccagaggcgctgtagccgttcggtggtcaccagttcggagatggcgaagtagctgacgatgatgatgcatgtgccggcaagaatcagcgtggagttgaacatacgggccgcaaacgtggttctgtcgccgagctgcgaaaagttgttgtgataccagtatgggtcgtcggtggtcatgccggcggtgaccacgccggagatgacgaagaacggcaacagactggcaatagttttggcgttcatcatctccgcctgtacaaaggtcatgtaccccaccacgccggcgaaggcggcgcagacgctggagatatagccggagaagatggcattgcccatcatgtcgttggccgcaccgatgagtgcaaaagacgacaggaaaatggtcgaggcatacaccaccgaaagggcgacgatttcgaaaatgcgacgaatcggtgcaaaccaaccatgtttgaggttcaatgaacgtgatttgcgcgcatagccaataatgaaggaaatgacgccgcatgccgccacgatgcccgaacataccatgaatcggcgttgcgtcagctgccagatggccggcgcgtattccatgtacaggttcatcgataccgcgccaacgatggcgcaaatcaagaaggagatgagtccggaggtttctgcacgctgatgacgtcccatgccgggcctcccctatctattcgatgccgcgttatctttcaacaacaaacaaaactccccccgaggacaacgctttactagcaagccagcgggatttggctgtcgccattctactgaaaatctgaaacactacaaaaaaaaacgattatgtacgggcttcttagcctttgcgactatcgttaccgccttgccgagtaccgttgttcatgcagaaagaaagcagtattggacacaatcgaatgagcgtgtcggtatcgttgaaaaagtaatgaatgacggttccatcggttcaacctttaagggacgaaccagccgcggcaccatggcgctgatgcatgactatgccgagctcatcaatgaattacgtccgacagcagagcaattcaccgagatcgagcaatactgggtcaaacgaattcaggcgttcttcaccagcaaaccattcaagctggagtccgacaactcgctttccgttgatgcggccgtggaacatctgctacggcaggcagcgcagcggcgaagggagaatccgggcaccatgtacgtcggcaccgtcctgcagcatctcgtcgcggcaaagctcaccatcgttgctccggaagtggaaatcaacggcgcgtccgttgctgatgatccgagtccgcggcttccaacggtgaggccgcggaccgtctcacaaaaccgtccgcggctccgccctcctgtttcgtcgcaactgactacaccgacgggttcgggcgcttcgtcacgaaaacgccattgcgatgcaccgtatacgcgccgccgtcactgccccgttccgcccggaacaggacgatcggctcccctgcgatgtcgcgcagttcgacatccgatctgccacgtgtcagatagaagtcgaatatggcgtcgtcggattgacgcacggtgtgcagaacgtcagaggtcacgccgctggcgggcgaccgcaggttggcttccggctgccggccatcctgcggctgcgcggcaagccagcctcccacgaatcgcgtcagatcgctcacgcccagatcgcagccgaggaaatacgcctccccttcgccgtacgtgttgcgggtgatcgcggccatgccgtcaagctcccactcatccgcttcttcgccggcatacgaggcaagcacctgcacatgcggtccggcgacggtcacgtcaccgagcttgtcgatgacgcgatcgagccagtcgaaatcccaatggtcttcgatgggctggaggcgatctcagctgaagatggcaagggccacggtgttgacgccggcctggcccatcaggcggatgtcgtcatcccagatttcctccggccattggtcgggactatagtcgccaccgaaagcgatgccgcgtccgtccgcggtcagcagttttggccatgcgaagtcacgtcatgcacgcacggttatctcctttggcaggcggcgcagggccacggcccatatcggataccagctgatactagctgatagacactcctggccgatagtcgacacgccgccggttccggccccactgccggaaccgacatgggtatgttcatgaccgccgaccgcaggaacgaacaggcccgtccgccacggaccgcatcttgcggttcaggcggacgggccttatgggagggatgggaacgggagatcagttcttaataactgcctgcgcctcatcaccggcggcctcgacggcctccacgacctgcgcctcatcgtcgacgatctcgccggaagcgagcttggcttcgagctcctcaacgatctgcgcatgcatcttctcatcgatcttgaccttgaaccagaacacgacgaggctgaggatgatgagaacaagcgggacgtagaaggcgaaggtcttgaacgtggcgatgttggacgcggtcatgtcggctgccgtggcctgaccgggcaagccagccgcgagggcaacggcaccgaccgcaccgttggacatcgcgccgccgatcttgtcgagcatgggacgcaccgacaaggtgaccgcctcgttgcgcctgccgttcttcagctggccgtactcgatggagtcggtcagcgacagaatcgcggtcatctggatgaactgcgcaggcacatagaagaagatcagggcgacgatgacgaccggcaggttgctggagaacagggcgagcatcgtgtagccgataatcatggagaccatgccgccggtgaacaggtagcgacggggaatccagcggttgagaatcgggtacagcggcgccatgatgaatccggcgatcagcgggatgatgccggtgatggagaaggcggcaggctcgtcaagcacgaacacgaagaggtagtacatcacaccggtcgtgatgacgtttgcgatggcgtacagcaggtaggacagggcgacccacagcagctggtcgttctggaacagcgccttgaacgcctcgaacgggttgccgttcttctgggccttggcacgcagcgcgctggtgctttccttggtgccaaaggcgacggtccaggcggtaatcaggccgaggagcgcgacgatgaagccgaaggaggtccatccggcctggccctggcccttggcgccggtgaacgtccaggtgaagtagctgacgatcgggatgacgatgacggtgatgccgttgtagccgatagagccggtgaaggtgccaagggcggtgtaggtggaacgttcgtgggagtcggaggacaacgccgggatcatgccccagtaggagatgtcacgcagggagtagaacacgtcaagcacgatgaacgtgatgacgaacagcacgatgaacagcgtggtgttcacgttgaccagtccgaacatgccggagaagatgagcacgatcaacacggaggagaccagtccgccgatgaactgccacgggcggaaacggccccacttggtggtggtgttatccacgaggttgcccagcagcggatcgatgaagatctcggcgatgcggataacgacgatcaggccggtgatgacggcgatcatttgggcggcgagagccttgctgtagctgacgaacaggcagctggtgacgtacgtgacgaagtacgtgctcattgcgttgtagaaggcagcctgccccaagttgccgcacgcgtaggcgatgcgctggccgagcccgcccttcctgcggacgtcaccgtccgcgacattttcgttgctcattaatcttctccttaagaacccagagcatggatttatctatctattagataatcacttgccgacaggtgacacgccgccggttccggccccactgccggaaccgacatgggtatgttcatgaccgccgaccgcaggaacgaacaggcccgtccgccacggaccgcatcttgcggttcaggc

SEQ ID NO: 2730 - DNA, 3585 bp, Unknown
  R36_18m  MAG No. k141_11788
cggcaacatgaacactacggctgacacggcaaacaaggcaagcgaactgcggcccgacatcgacctcaacgatcccaagctcggcctgaagatcgcggccgaacggctcagcatcgtccgctatgtgttcctcgtgcagattgaggacggcatcgcctccgccgcccagcgtgcgtcgctcgaatacgcggacgccgtgctcatcggctggcccgagaccgattcacccgaagtcgtggacctcaacgatgcccagctcaagatcgtgcgcgaacacatggaactcatggaaggctacatcggcaaatacagccagatggagcacgacggcgacctcgacggcatgaccgacacgctcatccgcatcaccgagcgcgtggccgaggtccgccgcctctaccagccggacttcccgctgcccaccttcgccgagattcgtcgcgtggtccaagacgaatgggatgaagacatgggcaagatcgatcccaaggaagacaatccctccgccggcgaaatcgaagaggaaaccgaatcagccgatgacgccgccggcgagggcggccaggcatgagtggtgttaccggcagccacaaaacggctgcgtcagttcagtccgaaaaaacagtggaatccgccgagcccgccgaaatcattgccgtcacccaaggcgaaaccgaacggcgcatgtccgacctgtccgtaccggccggggccagcagccacggcaaaggcaggctttccgcacgcggcaactggcatacacgcctgcgcgtcggcatcatgggcggcacgttcgacccgatccacaacggccacttggtcgccgcctctgaagtcgcctgggtgtatgacctcgatgaggtgattttcgtgcccaccggccgacctgtgttcaagctggacaagcacgtcaccaacgccgaggatcggtatctgatgactgtgatcgccaccgcatccaaccccaaattcaccgtctcgcgtgtcgacatcgaccgtccgggcgtcacctacaccatcgacactctgcgcgatatccgcgcccaacatcccgacgccgagctgttcttcatcaccggcgcagacgccgtggccgaaatcatgcagtggaaggacgccgacctcatgtgggacctcgctcacttcgtggccgtcacgcgccccggctactccagcccggacggcgtgaccttgcccgaaggcaaggtcgatacgcttgagatcccggccttggccatctcctcgaccgatgtacgccgccgcgccgaacacgacgagccggtctggtatctggtgcccgacggcgtggtgcaatacatcggcaagcatggtctgtattcgtacgaggactgacgattcgtacgaggactagtgtgcatttgtacgagggctggtgaggattagcgcgaatcagcgcgcatcaatcctcgccagtgcaaggatgaacggtcaggccagtcccatcttgattttcaatgtcattacgcgagtcgccgccgccgtcaccttcgaagcgaaagccggatcggacttcgcccgttcgttgaggccgtccacaattggctttacataatccgtctgaccgatgcagggcatgtcgccgcccgcctcgacaagatttactcccaattggcttacatcgtagctgctcaacgcttcggcagacatcgaatccgaaatcaccacgcccgtgtacttcaggacgttgcgaatatgaccgtcgataatcgtagaagaaaacaccgccggattattcgggtcgatggattgatacgtggctgacgacatcatcaccattgcaggatcggccttggtaatcgcctggtcaaaggcacctgcctcggccccgtccaacgtggtggtcgtatccagaatgccttcggtggtgaagtcggtattgccgcttaccgcgcccaacccaggataatgtttgaccgccgcaccgacttgagcgtctcgcaaaccttcaataacggcgatgccatgttcggcgttgccggccgcatccaatccgaaatcacgatccagcgcgccaatcggagcatttgaggcacgattgccaaccactgtgccaagcaccggtgccaaatcgacatttatgccagcagtggctaattgcgaaccccacgtgcctgccgattgacgcaatgcgtcagcggacattgtgccctgctcaacggcactgggcattgtgtcgaaaccggtaccagtcagatgctgtacctgaccaccctcctgatcggtggcgatgatgagacgattgccggccggcgcatatccttggagttgcgcggtcgcggtcttgaccgtatcgacgccggtattccaattgccaatgagaatggccgagccaatgtgctcgtcggcgattgttgaagccaacgaggagggttcggaaccggcgaacaacggcaccatcactaactgtcccacacgttcctcaagcgtcatggcggataccgcacgttgggcttgtgccgccggatcgtcgttcttcttcggggaaggaacgtcggtgcgcggtaacgcactcgtctgggaggtctggggagtggtggtgttgccgtttgatgtggatttggcgaaccatccgacatgccatccgtaggctgccacgccggccaacaccactgccaaagcacatattgtcgccacgattggagtgctcctgtgccgaagttggcgtgtggcgtgtgctgagggacgcatatgttgtggccgttgtctgtccataccggcaagcgtagaacagagcgtagaacaggatgttgcctcattctgtgctcagggcataaccgacctcccgccctttcgataggcttgagttatgtcttttaacgatcctttctcagtactgttcggcaatggcggcgattcacgacgcaacaatgcgaacaatgacgatccgatcatcctcgatgtcgaggccgatggggacggtccggcccacaacaccaacgctggcccctccgggtcatcccgccctccacgtggtccggccaatccgcgtatcacccgtaagccagcgtccggtggctcaggagccagccgtggcagcaagattctgatcggcgtggtgctggccttggccatcatcgtcggtctgttcttcggcctgtcccgattcatcaccgatctgatgtggtacggccagctcggcttccagtccgtggtctggacccagctcggggtgaaaatcggtctgtgggtggcctacgcgctgctcatggccctgaccggcttcgtttccgcctggctggccattcgagcacgccctgattcggccgacggttccaccattcgcattaacggcgatgtggtcgaggtcggcaaatccgtcagctcgaaaaccgctcgccgcgtggccgtggtgatttcgctgatcgtcggcgtcatcttcggttcccagtttaacgcgaactggagcgagattctgctcatgttcaacgcgcagtcgttcggcaccaccgatccgcagttcggtctggacaacggcttctacgtgttcgtgctgccgggcctgaagctcgtgctcgccgccgtggccatgctgctgggcgtgggccttgtgttttccgtggtcac

SEQ ID NO: 2731 - DNA, 5827 bp, Unknown
  R36_18m  MAG No. k141_11866
aaaaaggcagaacttggttcaccggcgatgtctcagcacgtttgcgcgcgtcggatccttctggagcagcaggaaaacgagcgccgcgacgagcaggacggcgatggagagcacgccgagcgaggcgttgccggtcagggaggtggtggccaccaggaaagtgccgatgattgaggcggtcttagggaagaaacaatagtgagaccggggaccccttgaaatcattggggaatcatggtggcgatgcatgcgattaacacatgttgttaacacagatgtggaatgagggggggcgcgtgaggctcgtggtctgcgacgcatgagtgtgaccgtgagctccccagctgatgagcgcaaaggcagagattggtgtcacgcgggacttgtctgccgaagagcggcgattgatgcagggtctgtgcgatgctctgcagcagttgctgaacaagcagtaccagcggcacatgtgggactgttcgatagcctgaaaaattttgccgcagacaatctaggcaatgtgcttggcggggatttcaatctcggttcgattggtgatttgccggcggtaatcggtgagcatttcaatgccgatcagttgggtgaaatcaacaggtcgttggcgaccatttgaacgccgaccgacttgacgagctgcaggcgctggcggaggaaaacatctccgccgaccagatcagtcaggtcgctggcgcaattcaggagcagggtgccaatctggacctcggatccattgccgaacaagcaggactgcccgctgacatcatcagccagatttccggactattgggcaagtagtcgccttaagctttaacgctgacggtgttgtctcggctattgcgtgttttgcggtcgctcagcaaatcatatgggtcgtaggtaaccgattgcgagcgctgctgtacacagatgtgtacgtgggtcgaagcggattcgtggtggcaggtgagacaagctgccctcgcatggctggaaaagcttcggtctcgtggagtgcgatgttaaagctgctcaggtcaacggaatggcggaattccgccgatgcaacttgtggttgcgctcgaataaccggcgattgcaacccaaagatggtggcgggtgacatggacggtatgccatagtgagcccatcggccgaacatgacatgataaagattacgtatgaagggacattccaatgagttttcgcgctaacctgcagtacctacgtgcgcaacgcaacctgacccaggaacgattggccatgttgcttggcgtctcgcgtcaggccatttcgaaatgggaatccgaaaaggcctatcccgagatggacaagctgcttatgatctgcgacctgttcggctgcacgcttgatgatctggtacttggcgatgtgagtcggcctgccgcgtcggcttctgcggccggttcgtcgaatgttgactcctcggctgagacggcatcgcctttagccgcttcttccaaaacggcgggcataatcgctcctatcgcggagcttgcgcaggatatcactggctacgatgaacatcgccgccgattcgcgctgctgattgccggcggtgttgctgcgattgtcgccggggttggcatcggcaacctgttcgattccagcaattccattctcggagcgacgccgctcaacgattttctgacgtttctgtgcgtctgtgtgggtgtgattgcggggctggcgatgctgattccaggaggtctgtcgcgtattgacttcaaacggcgtcacccatacgtagaagatttctacaccggggaggaccgcagccgagaattgcggctgctggtaatcggcatcgtcggtggcatctcggctattctgattggcattgcggtgacggtgtatgccgatgacatgctcggcgtctccgatggctggcccaacgcaatttttctgctgctctgtgcgcccggtgttttcgggtttgtctactgcggcatgagatacagtctgctcaatatcaacgcatacaacaaagcggccgaggacgaccgcaaggagcatgcgggcgagcaggatttctacgccaaactgaccggcgcggtgtgcggcatcattatgctgatagccacggcgactggcttgtgcctgctgtttttgaaccctgcggcattgcgcggcgattggtcggccgtcgggtcgagcgccgcggacggggcgatgttctggctgccgtggccgattggcggtgtgctgtgcggcgttgcggccgtcgccattcagctgatcaaggattatcgcgagcgtaagtgatcaagtggcgatggtccattgctattagggcccgttgcaggggttgcgagatgtcgcccgcggcgcagagttgccgagggccggcaaatcactcccgcgtcgggtccttttgcaggagcaggaagacgagcgccgcgacgagcaggacggcgatggacagcacgccgaacgaggcgttgccggtcagggacgtggtggtggccaccaggaaggtgccgatgatcgaggcggtcttgccgaagatatcgtagaagccgtagtactcgttggcgtggtccttggggatgatcttgccgtagtacgagcgggagagcgcctggatgccgccttggaacatgccgaccagaatcgccagaatccagaactccacggccgatttcatgaagaacgcggcgaagagcacgatgcacatgtatgctacgaccgccgccgtgatcatcactttgcagccgaaccggccggccagacggccgtagagaatcgcgcaggggaaggccacgaactgcgtgacgagcagtgccaccaccagctgggtggagtcgatgccaagctcggcaccgtaggaggtactcatcgaaatcaccgtgttcacggcatcgatgtagaagaagaacgcgatcatgaacatccacaacggcttgttcttcacgatcttgccgaacgtgcccgccagttcgctgaacgtgccgcgcatggccgagcccagctggtcgcgggtggcgcgatagtgcacttggcggtagctggtaagcagcgggatggtgaatgccacccaccagatggcggtgatgatgaatgaggcgcgcgtgcaagccaccgtggaccagccgaagagcgacgggccgccgaagatcagcgcgatgcagaagatgaacggcacggtggagccgatgtagccccagccgtagccgtgcgaggagaccttgtccatgcgctcgttcgaggtggtgtcgatgagcatcgaatcatagaacgtcagcgagccgttcaggccgatggtcgccagaatgtagacgaccaggaacggcagccaggtcaggggcagggccattgcgcagcaggtgaccacgccggtgccgaagaagcccaggaagaacttgatcttcatgccctgtacatcggcgatggagccaagcaacggcatgagcaacgcgatgaccaaggaggcaatggtttgcgcgtagccccaggcggacacgatgttgccgtccgccggcatcagcgatttggcgtaaatggggatgacggcggtggacagcagcacgaatgccgagttgccgacgtcgtagatgatccacttcttctcgcgggcggtcagtttggcgctttgcggcaccggttcgtggacatttgcgggatcagtcatatgcactcctcgacagtattcaactcaatctatcgtagaagcgcggactagggtaggggagccattccggttgaacggcggatgaataatgccgggcctctttctaaggggagccagagcaaaaatagctcccctcgctgaggggagctggccgcgaagcggactgaagggagccgatcgtggattcccccagatgaggaaatccactcaatcgtccggaaactattcgccgatcagcgcgatggcctcgtcgtaatcggggcattgcggcacgccgttgaggctgcgctggatggcgatggatgccgccgcgttggcgatctttaccgattcggccagactatggccctttgccagcatcgcgcacatcacgccggtgtggcaaccgcccgccgaacgggtgtgtacggccttggtcgggtatccctcgatatgaatcgtctcgccacctggctcacgaatccaagcgccgcgggcgccgacacgcaccaccagcggcgcgcgcagtgtagtgcccaagccgtcacacaactggtgcatgaagtcgtcgagtccaccgccgatggtgaccttgctgtcgtcgatcggcgcgcccaggcgctcggccagcgtcatggcctcctgacggttgcaggaccagaccgggcgtgcgagcaccaggtcctcgagcatgtggtcgttgaccagacgcaacgtattggtgggattgatcaccagcgtgtagtcgcgtgcagccgggtcggtaccggccttgagtaggaatccgtccacgccggtggccgtgtggtccatcagtgtgttgccgctgatgtgcaccacgtctttgggctgcggctccagcgtgttgaacgtgtccgcgtcgccatgagcctcggcgccataggaagcgatgaacgtcttcttcggcgcgccggagctcagcaccacgcggaaaccggaatcctcatcaagacgatcctggccgatatgcgtaatgccgttgtcttggaatgactggcggatgaaatgcgcccacaggccgttgcccagaatgccggcgtgctcggtcggcacgcccatgcggctggccgcctgcagcacgcgatagctgccgccaatggagggcttcggatgatcggccacggcgaatccgccctgtgccggcaccttgtccacattgagcataatgtccacccagacttgccccagtgaaatcacgctgggctcgtgagtgccgatacctcgcctgagattcaacatgacagcctccttcgtcgtaagttgcacgaggaccccttcgtcccttgccgtctcttataccgagattatatgagagtttgctggatgcggaataggcagtccggcgtgttttatcgggtaaacgctacgatttgcagcgtaattcgccgctggtgaactgctggcgaactacttgcggaccgctggcgaaccaatgccgaaccgctcgcgaaccgctgatggcccactcgcaagttacgctcgaaccgcgcgtgaaccgccgaagttcgcccatgatacacgcaagagttgcggttgtcggtattgggctatatatttgtgaagttgtgtgttcggcatgtcgggtgaaaccggcggtcgaatgcgtgaaagacttgacacatcaaggttaagggagtccatcatggcagctcgttgcgcagtgtgcggcaagggaccgcagaccggtttcaccgtttcccattcgcaccgtcgtaccaagcgtagcttccgcccgaacctgcagtctgtacgcaccacgattgatggcgagaacactcgtctgcgcgtgtgcgtcaagtgcctcaaggccggcaaggttcagcgcgtggccgcgtgaatcgcgtactaacgtggagcaaaacccgtttgagcttcggctcagcgggttttgttgtttctgcggcctaaagaggccgtgcgaatagaataggccaatatgagcatcactatggacaccactctcgcttcgctggtcaccaacaagcgtcgcgtgtccgcgttcaaatcgctgggaatcgtcactgtcggcgacgccctgacctactatcccttccgcgtcaccgaaccggtgccgcttcgcgccatccgcgaggccgcacccggccagcagatggcatttgccgccgtgatacgagacatgcgcgtggtgccgatgaacgctcgccgcggctaccgactcga

SEQ ID NO: 2732 - DNA, 13608 bp, Unknown
  R36_18m  MAG No. k141_11999
gctcctgcgactgggcttgaaccagtgaccgtccgattaacagtcggatgctctgccaactgagctacgcaggaatgtctgctgtgtttgagatttctctcgcgcacaagtcacacatcttacatgcttgccacgaaaaagcaaattacatgcgtgtatggcatgtcgcgctgaattccgcagaatcagactcatcgaatacccactcatacaacatgatgacgatgcggcgatactgtcacgcgaaatttcattgtggataacttcggaagctggaaccacataggtcgttctggctggacatcctgtttcggacccctcaaggtgggtatcaccggcaaagaagccggaatcgcatcacactcacactatggggaggaatctcatgaatgcaccactgttgtttgattggcgtcgcgacgaagcccgacgtgccagcaggcggcgtcagcaggcgcgtcagcgggctcaggaacggcaacggcgtatggatgccataatcgcgttggccgccgttatcggcctgctgcttgccttgggagtgggactggcatccacgcctcagcatgttgcgcatgcggatactgcggtgaccggagatgcggcatacacggtggaggatttcaccgatatgtctgatctggcgtggcgcaatggcaatcagtgcgaatcccggttcgactggccggtcgacgatccacaggtcgaacaacagttcgagcggccgatcaacccgtgggcaccaggtcatcgtggagtggatcttgttgcggagcaaggtaccgtaattctgtcaccacaggcagggaccgtgagttttgctggcaaagtagctggcaaagatgtggtgagtgtacggcatcgtggaggtgtcacgtcgacattcgaaccggccgttaccgagctctcagtgggggatacgatctcccgcagacagcccgtaggcatcgttgagggcaactcggaccattgcgaagaccgttgcctgcattggggcctcaagcgaggaacggccgactatcttgacccacagcaatatgcggggagtcgaaaaatcgtactgaagccgtcatgattcagcaatgtttgtcggccggaacagggccgtacggaagaggcatcgcaggcggctagcggcgtgacgagtatgaatcacagaccggcatcggccaaggagatatatccgggggcgatcagcgcggacttgagattgctggcgctgacagccagcaacggttcgttgatggtcgggatcttcttcacgccgcctacctcggagttcctgattgaaggcatggaattcagcgcttcgtccttgttgagcttggcgcaggcctgagcgatatccgtggcgatggtctgtctgtcttccatgccggtcatccattgcttgccattgacgatggatgggatgttcgagacgtacgcgccgtatccggtcaccagaggccattgcgagtcacggtccttgtcggaagcggaggtgtccttatccgcatcgtcatcggaactggatgagtcgtttgcgttgtcgttttcaggggatttgatcgggtccggcactgcgtcgcggctgagatccttcttgccggtgatattgccgacaatgcccgagatggtgatctgcggattgatatcggcggcagagccggtgtatcccagatcgtccaattccttgacgacctcggaggcgatgtagtcgttcatcgtgatgatgccgtcaatacgggtgagtgtggactgtccgtcggtttttgccagacgcttgtcaagcactttcgcagtggagccttcctcagcggcatcgtaggccacggcttgccaatcgttttccgtggatttgccgtccaaggtgcctgaagggctttccacaacgcccttctgatagtaggagcccagtacctgccagataccacggaacgcctcttgggcgaacgtggaatcgttggcgttgcctttttcgtccacggcggtgtatggcagcagcacctcaatgtatttggggttgtctttactggccttatccaacttgagtttggacaccatcttttccgcctgtagcttgccgatggtctgggcgtccgagaacttgacgaaggcgtccggcctatacccctcgatgctgttgccgagcaataccacatgcatgccggattccttggccagcttgagcgatgagaccagccggtccacggcctgcgcctgctcgtccgatgcagtgccgtcgctctcagtgttggacgagtcatctttggaagagctgtcttcggaagaatcaccgtcagaagtagctccctcatccgtggcatcgttggtgctcaggttctggctgacgtaatcgccgtattggcgagtggaagcgtcggcctcgactactggagccacgagcaatgtcatgttgtcgggcgcgatggcaatgccggaatcgtccgtggtgttattcgaaagatgatcgaccacaaagtcttggatggcgcggctttgcttgtccaacgagtcggacgtcgtatgatcgatatcgcctttcttgaaaccggcgtcgaccagggccttggttaggtcgggcaccagcttcgcccatttgttcagtggcgtctgctgattcagcgtaatgccgtccgaaggcgtgaacacggccacgccgccggcagaattggacgtcaccgtggtttgaccatctacaacggtcttattgtctgaggtgcacgcggtcagtgacagcaccatcgcgcaggatgcgacaatggcggcgagcagggtggttgagcggcgtgcgaacaccataagcggcgaaacctcctcaagcgggcgtgaaaacaaactgaatcacgattctagtaggccgtatacgaaaaagtcccggaccagtggacaaatcgccacatatccgggaacaattaggggtatttcgcgcgtgtatcgaacaactgtcatgattgtcgtgctgaggaacattccagatgaagcacgacaatcatgacagttggcgacatgacatgacccatgtaggtccgcacgatgtgttcgatgatttactcggccagagccttggccaggttctcgtccagcgcgttcatgaagccgtcggtgtcgagccacggttcgtccgggccgatgagcatggccagatccttggtcatctgaccaccttcaacggtgtcgacgatgaccttttccagcgtctcggcgaagtgacggacttcgggcgtgccgtccagatcggcgcggtgcttaaggccgccggtccacgcgaagatggatgcgatcgggttggtggaggtcttctcgcccttctgccagcggcggtagtgacgggtcacggtgccgtgcgccgcttcggcctcgacggtctggccgtccggggtcatgagcacggaggtcatgaggcccagcgaaccgaagccctgggccacggagtcggactgcacatcgccatcgtagttcttgcaggcccagatgtaaccgccgtgccacttcagggagctggccaccatgtcgtcgatcaggcggtgctcgtaagtcaggccggcctcggcgtacttgtccttgtattcggtctcgaacacctcagcgaagatgtccttgaattggccgtcgtaggccttcaaaatcgtgttcttggtggacaggtacaccgggtaatgacgcatcaggccgtagttgaagcaggcacgagcgaaaccgcggatcgaatcgttgacgttgtactgcacctgggccacgccgccgtcttcgccgtagttgtagaccacgtgctgaatcggctcggagccatcgtccggagtgaaggtgacggtcagctggccggcgcccggaaccttgaaatcggtggccttgtactggtcgccgaatgcgtgacgggccacgacgatcggcttggtccagccgggcaccagacgaggcacgttgctcatcacgataggctcgcggaagatcgtgccgcccaggatgttgcgaatggtgccgttgggggacttccacatcttcttgagaccgaattccttgactcgggcctcatcgggggtgatggtggcgcacttgacgccgacatggtgcttctggatggcgtgggcggcgtcgatggtcacctggtcatcggtctcgtcgcggtgctcgatgcccagatcgtagtagtcgaggttcacgtcgaggtacggcaggatcaggcgatccttgatgtccttccagatcacgcgggtcatctcgtcgccgtcgagttcgacgacagtgccttcgaccttgattttggccatgcttcctcctgatagatggtgtgaagatgatttagtcatagcgcatgtttgtaacgacttgaagcaatcgtccggtccgtgggaaacgaccttgttggcgtcccacccgggcaataggcttacaaccatgtctcaggaaattgaaatcggtttgggcaaaaagggccgtctcggctacgcactcgacgatgtggcgatcgtcccctcccgtcgcacccgcgaccccgaggacgtctccacctcttggcagatcgacgcctatgagttcgatgtgccggtgatcggcgcccctatggattcggtgaccagcccggccaccgccatcgccatgggcaagatgggcgcgctcggcgtgctcgatttggaaggtctgtggacccgttacgaggacccgaccccgctgctggacgaaatcgccgggctgccggccgatcaggccaccgagcgtatccagcagatctatgccgagccggtcaagccggagctcatcacgcaacgtctgcatgagattcgcgccgccggtgtcaccgtggccggcgcgctctccccgcagcgcacccagcagttctactccaccgtggtggacgcgggcgtggacctgttcgtgatccgcggcactgtggtctccgccgagcacgtctcctccggtcaggaaccgctgaacctcaagaagttcatctacgaccttgacgtgcccgtcatcgtcggcggcgcatccaactacaccgccgccctgcacctgatgcgcaccggcgcggccggcgtgctcgtcggcttcggcggcggcgcggtctccgccacccgccagaccatcggcgtgcaggccccgatggccaccgccatcgccgacgtggccgaggcccgccgcgactacatggacgaatccggcggccgctacgtgcaggtcatcgccgacggcggcatgggcgactccggcagcttcgtcaaggccctggccctcggcgccgacgcggtcatgctcggcgcgccgctggcccgcgccaccgaggcccccggcaagggcacccactggggttccgaagcccgccaccagacgctgccgcgcggctaccgcaccacggtcggcacggtcggcccgctcgaacaggtgctgttcggaccgagccaccaggcggacggcaagaccaacttcatcggcgccctcaagcgcgctatggcctccaccggctacgtcgacgtgaagaacttccagcgttgcggcatggtggtcaacccgtattccgcacgataatcccgattaccccccctgaaaatgggggtttgccctccatgcaggaggcttagcttgccctaaggcgcgctcaagtcgtttgacttggcgcgcctttcgtgatgttgtagtacaaacgctcgccgatgatggtgagttgcaagggggcttgaaggggtcatcatggagtattcgggatttttccacggcacatatcagtacgggccgttgccgagttatgacggattcatcgttgtggagctgtcggatcgcccggtgcggtatcacatccaacccacattcataggcgggctgaatgcgaaggaatgtcattccatggccatggctgcatgccgcatcgcctgcacatcggcggacgcgatacgtggcagactcagcgtcgcacatctcaacagagccatgacaaaaccatgcctggaacggctgcaaaccatgcaatacctgctcggcacccacatggtcactcatccggagctcaaagcgaaattctgctatctgcccactgtccccacattgatcgacggcatgatcaccggcaaggacacgctggaaatggcggtattcatgaccatcggccaggaaaatctgcgagtcaacctcaaactgaagtacatcggttctcgatggatgtgcatctatgccgatttgggctgaccagacggccccgcccgcacaccgattcctacgctggtagcggaagacggttctgccgtgtcataggctggttcgcctatagtagtgaccatgcgtgaacatgtagaagaacccagatatgtcaccaccgatgacgacaccgtctactcgctgctggccaaacgagcagctcgcacgccggatgacatcatcgcggaatggcaggatgacaacacccaccaatggcgcggcgccacagctactgaaatgctgtcccgcgtacgcgaggtggccaagggcctgttgggacttggcgtcaaagccggcaccatggtgctgatttactcgcctacctgctatgagtggggtgtggctgatttcgcttgcgcggcaatcggcgctgtggttgtgcccgtctatgagaccgattccgcccgtcagaccgcgggcatcgtcgaggaagtcgatcccgccatcgcctttgccggcgacttccagcgcgcacagacgcttgagcagatccgtgtcaatcatccgggcatgaaatacgtgttcaatttcaaggccgatggccttgacgctgtcgctgacttcgggcatggcgtatccgatgagacgttggatgcggctatcgctcgtatcaaagccgatgatctgcttaccgtggtctacacctccggttccaccggcaagcccaagggcgcgatgctctccaaccgcaattacacgcacatcgtgcttaacggctacgagattctgcgtggcatgctgtacgacgacaaccgtctgctgctgttcctgccactggcgcactgcttcgcccgctacatccagtacgtgtgcatcggtggctgcggcgtggtcggatacattcccgacgccaagcgactgctcgccgatatccgcagcttcaagcccacctacctgctgggcgtgccacgtgtgttcgagaaggtgtataacgcggcctcgcagaaggctggtgccggcatccaggggcatatcttcgcccagtcggtcaagcacttcgtcaagtggagcaaggatgagcaggccggccgcggccattcgttcatcgagcgcatgcgccattcgttctacatggccacggtgggcaaatccattcgttccgctctcggaccgaacctcaaatggctggcctgcggtggtgcgccgctcaacgtggatttggcccacttcttcaacggcatggatgacatcaccttcatccagggttatggcatgaccgaaaccgccgctccgatgctcgtcaattgggaggacgacaacgaggtcggttcggtcggcaagcctgggcctggcatgggcgtgcgtcttggcgaagacgatgaaattgagctgaccggcccgaacgtgttccttggctactacaagcagcccgaactcaccgcacagacgatgactgccgacggctggatcaaaaccggcgatctgggtcgtatcgacgaccgcggcttcaccttcattaccggacgcaagaaggacatcatcatcaccgccggcggcaagaacatcagccccgccccgatggaggatgtcatcgacacctgcccgatcgtggctcatgcagtagtagtcggcgacggcaagccgttcgtgtccgcacttatcgagctcgaccccgaaatgctgcattcctggctggaaggtcagggcctcaatgccgacatgacactcgccgaggccagcgacaacgacgcggtgcgtgcctttatccagcagtacatcgaccaggccaacgccaatgtctcccgcgctgagtccgtgcgcaaattcgcggtgctggatgaggaattcagtcaggagcacggcacgctcaccccgagcatgaaagtggtgcgtcccaaggtattgcagcgctacgccaccgtcatcgaagaggatctgtatgcgcccaagccatccaacaaaccgctgcccgccacagccaagatcatcgacagcacgctggagaccgtcaagaaatcctccgaatcggtcaagcaggcgtccgaacaggtcaaacaggcctcggaacagatgaaaaccagcgtgtctgattcgattgctagcgtgtcggagaagatcaagaagtcgaaggccgaacccgaagagggcgagaccggcgattccgccgacaatgccgacaatgccgctgacaccggcagcaagccggaccggccggctgacgagaagaacgaggagtaacgagaagtggccatccgtgagatcagggtcgtgcccgacccagtcctgcgcaccccctgcgatgagatcaaggaaatcaccccggccgtgcgccgcctggttgacgacctgctggaaaccgtggacgatccgggccgagcgggcctgtccgccaaccagatcggcgtgagcctgagggccttctcctacaacatcgacggcaaggtcggctacgttctgaaccccgtactcgaggagaagtccggcgagcagtatggcgatgaaggttgtctgtccgtgcccggcttgtggtacaagacccgtcgggccgactacgctcgcgtgcgtggcatcgacctggacggcaacgaggtcgtgctcgagggctccgggctgatgggccgtatgcttcagcacgaatgcgaccatctcgacggccacgtgtatttggatcgcctggaaaaggaagaacgccgcgaagccctgcgctacatgcgcaatcgtcaggcgaagtagtccatactcggctcccactggctggagccgtcgaacgtagtgagactgagggtggttctgccggtaccgcccgtgactcccctcagtcgcctacggcgacagctcccctcagagaggggagcctgtttttcttagtaccggctccgtgctatccttgaaacttgtgtgccacccggcaacggacgcagtcgctggcgtccggaaccacccaatattgtcaaccggcacacaacaaattcgcgtcatgctcgcgacggcctgtgtcggtcggctgcacaactcgtgaaaccgggggagcagctgcacgcaggtgcgcatggccaggcaagaaccgacaatgaaaggtagtaataccatggctcagatcactatgagcgatatgctgaaggctggcctgcacttcggccaccagacccgtcgttggaacccgaagatgaagcagttcatcctcacccagcgcaacggcatccacatcatcaacctgttcaagtcgctcgacatgatcgacaaggcgtacgacttcatcaagaccaccgtggcccacaacggcaccgtgctcttcgtcggcaccaagaagcaggctcaggaagctatcgccaaccaggccacccgcgtgaacatgccctacgtctccgagcgttggctcggcggcatgctgaccaacttccagaccgtctccaagcgcgtcaaccgcctcaaggaacttgaggaaatggacttcaccgacgtgcacggctccggcctgaccaagaaggagctcctcctgctcgagcgcgagaaggacaagctcaacaggcagctgggcggtatccgcaacatgaaccgcaccccgtccgcgatgttcgtcgtcgacatcaccaaggaagccctggctgttgaggaagctcacaagctgggtatcccggttgtcgccatcgtcgacaccaacgccgacccggacaccgttgagtacccgatcccggccaacgatgacgccatccgcggcatcgaactgctgaccagcctgatggctgacgccgtcgccgaaggtctgctggagcgctccggcgccaacaaggccgagggcgaagccgccgagcagccgatggccgcttgggagaaggaactcctgaccaacgaggctcctgccgaggcttccgctgaagccgccgctccggctgccgccgagggcgaaaccgccgaggcccccaaggccgagtgatgctctacgatgggaagtgcctgaataagcgcttcccatcgttcatgggtaagcaaaatttctcaaggagaataatcaatggcagcaattaccgccgcactgatcaagcaggttcgtgaagacaccggcgccggcatgctcgacgtcaagaaggctctgaccgaagccgaaggcgacgtcgcccgcgccaaggaaatcatccgagccaagggtatcgccgcagccggcaagcgtgaaggccgcaaggctcaggaaggcaccatcgcctccaaggtcgtcgagaccgccaatggcgagaccggctacgccgtcgagctgaactccgagaccgacttcgtggccaagaccccgaagttcgtcgagttcaccgaggaagttctcggctacgccgtggacgccgacgccaactccgctgacgagctgctcgaggccaaggctggcgacaccaccgtcaagctggctgtcgaggaggccgccgccctgttcggtgagcacgtcaaggtcggccagttcgccaagatctccggcgagcacgtcgaagtctacgctcacaagaagtccgccgagatgccgccgagcatcgtcgccatgatcgccaccgacaaggccggcgccgccgtggctcacgaagctgctctgcagatctccgccatgggcgctaagtggctgacccgcgaggacgttccggccgatgtggtcgagtccgagcgtcgcgtggccaccgagaagtccctggccgagggcaagccggagaagatcgttccgaagatcgtcgaaggccgtctcaacgctttcttcaaggaagtcgtgctgctcgagcagccgttcgtcaaggatccgtccaagaccgtcggcgacctgttcaaggaagtcggtggcaacgccaccgcattcgctcgtgtcgaggtcggcaagggcgaagaggagtgagcctaaggcttactccacgcgcttagcgtaatttcaacgaaacgccatccggttattcaataatcggatggcgtttcgctattccaagggtgtcgttgctagggggtgtcgtcgtaaaccgatacgcttgtctacggataatttcgcactttcggttttgagaaaggcacaatatgactgatagcgacaagccgcgcagagttctgctcaagttgtccggcgaagcattcggtggtggcaaggtcggcatagataaacaagtgattcgtcgcattgccgaggagatcgttccggccgtacaacagggtgtgcaggtggccatcgtggtcggcggcggcaacttcttccgcggtgccgaactgcagcaggccggtattgatcgttcccgtggcgactacatgggtatgctcggcacggtgatgaactgcctcgctctacaggacttcctggagcaggaggggcaggccacccgcgtgcagaccgccatcaccatgggacaggtcgccgagccgtatattccgctcaaggccatccgtcaccttgaaaagggtcgcgtggtgattttcggcgccggtgccggcatgccgtacttctccaccgacacggtttccatccagcgttccctcgaaatccattgcgacgaagtgcttatgggtaagaatggcgtcgacggcgtctataccgccgacccgcgcagggacgagaacgccaagcgttttgaaaccctgagctacaatcgcgccctcgtggacaatctggccgtcatggacgcctccgcactgtccatggcccgcgacaacaagaaacgcatccgcgtcttcggcctcgaagagccgggcaacgtgacccgcgccctcgtcggcgatgaaatcggtacgctggtctccaccgccgaatcgcgcgtggccgagtaagccgcaaacgcctacaatcgaatcaagcgttcatagacgaacaacacagacgaacaccaccacacaaggagtgaatatgtctcttatcgaccaggccaaggaacagatggccaggaccgtggaaaacaccaaggaaaacttctccggcatccgcaccggtcgcgcaaacccggccctgctcaacggcatcaccgtggactactatggtgcccccaccccgattaaggccgtcgcctccatcggcgttcccgaaccgcgcaccctgtccgtcaccccgtttgacgcttcccaggccggtgccgtcgaaaaggccctgcgcaactccgacctcggcatcagcccgaaccgtgatggcaacgtcatccgcctgaccatgccggaactcaccgaggaccgtcgtaaggagtacgtcaagctcgccaagggcaaggccgaggacggcaaggtcgccgtgcgcaacattcgccgtaagaccaaggaaaccatcgacaaggccgtcaaggacggcgagatgggtgaggacgaaggcgatcgcctgctgaaggatcttgacaaggtcaccaagtccgttaccgacgagatcgatactctgctggagaccaagcagaaggagatcatggaggtctgattcagaccaggtccggagaattatggaacgcaacgaacaactccatgaagaggccgaggagacgctcgaccggatcaacaagaagaccggccgcaacatgccgcaggccatcgccacaggcgcggcactggtcatccttattgtcgcgtgcctgctgctcagcgtcgacctcttcgtgctgctggtagtcgtgttcatgattctggcgctgtgggagctcagggtggacttcgccaccgtaggcctgcacatcccggtgttcatgctgtggctgtgcgcgtccttcaccctcatcgccacctattattccccgtaccatctcatcacgatgtcgctgagtatcatcgtgtcgattattctggtcgccatcgcggccagcgcaaaaatcagcgtcggcaaccgcctatctctggcggttgccggcaaactgtccaacacggatgccagcgcgcgcctcgaatcctcgttcaatcatgagggcggggaacagcatcattcccggctcagccatgtggctgtgtccgtgcttaccgtgttgtacattccgttgctggccagctgcatcatcatctcgctgactttcaatgggcatccgattgcacacgccatcatgctggtgttcctgcccgccctctccgatacgggtggtttgtttgccggtgcctggctcggcaagcacaagctcagcccgcgtatctcgccgaagaagtccgttgagggcctgatcggctcgatgctcttcgccatggctggcgcattcgccgtattcgcatgcacgtatgatgcctcgaaatgggccactcgttggtgggtgccgatcgtggcgggtattctcatcggcgccgtgggcacgttcggtgatttgtgtgcttccatgctcaagcgcgatatcggcatcaaagacatgggccatctgctcaagggacacggcggtgtgatggatcgtgtggattccattttgatgagtgcaccgttcacctgcgccttgctgtgggtcaccggactgtgattcgcatgcctcgtgcatgaacaatgtggcatcgtgtgtatatcgcacggtgccacatgccatatatggggaaatcatcgttcaa

SEQ ID NO: 2733 - DNA, 4631 bp, Unknown
  R36_18m  MAG No. k141_12165
cggtagagcacgactcgtgcgggaatgccgtggctggcggggaagcactgggacgtcatattcggctcggtctgccaaggcgtcggatccgaaggcggcacatcctccaccgcgaactggagcggacgtatcagttccggccacgcttggccgagcctgcgaacctgggccgccaccatatcgtcgaacatgccggtgcgagtgcggtaacggggcagacgggtgccgaacatcggggttcgtgtgccgcgaccgtggcggttgcggtagattcgtgcgttccaaggtggctgaagcatggttcccaccataggacatggcggaggcaacatgcgttaggattggttcattggctgtgaacattcgtcaacgagggaggcgcgacaaatggtggtacgttcgtggtccgaacttgatttcgataatgtctgctccaacgccaaggtgttcggtttcgatttggacaacacgctggccagctcaaaacagccgatgaggcccgcgatgatcgaacggttctgtgcgctgctcgaccatacagtggtggccctgatctcagggggcggcatggcggtggtcacctcacaggtgctggatgtactcaccccgaatgccaggcgcggcaatctgcatgtcatgcctgcctccggctcccggtattaccggtgggatggcacgcaatgggccttggtgtatgcgcatgatctgtccgaagccaccgtggccgctgtctcggaaagtcttgagcgacatgcccgggaactgggattgtgggaacagcaggtatgggggcctcgaatcgagaacaggggcagccagatcaccttctccgctctgggacagttcgcacccgtagcggccaaacaggcatgggatcgcgataacacgaagaaacaggcgctggtcgaagcggtcaaggccgatctgccgcacatgcgggtcagggccggcggctacaccagtgtggatgtcagcgaatgcggcatcgataaggcctatgccgtgcgcaagctgacgcagacactcggcatacgggccgatgaaatggtgttcgtgggcgatcgcatgacgcctacgggtaatgactatcctgcggttgaggccggtgcgatcggtgttcgtgtggagaatccgcaagacacggtacaactgctggatgcactgcttgcgcgattcgatactccagcttgatggtgacgcgttatggacgggccgagcgtatacaagtggtggcatgcgatgtgggcacaggtctgcaatctgctgtttccacgcggctgcgctgggtgtgacgcgccggatgaggtattgtgtgcggcatgtcgggccttgttcgcacaatgccgggagcgggatacagacggtggtggcggagcccgtatatggtccgcatcgatttaccagggagcggcgcgtcgtgccattctcgactggaaggaccacgacgataccgagcttgacggcccgttcggccgcatcatggtgtcgctgctgaacaagacgccaataccatcatcatgcttgggtcatcgcgtattggtggttccggtgccatcatcgcgggcgtcaatgcgccgaagaggacgtgcccatacggcaccgttggccaaatcggtggcaggggcattgcgtgggtacggcgtcgatgcgcgaccatgcaatgccctgagctcctccaccaaggcacgctccgtgcagcagacctcttcggcacagcgtgcccgtcgtatcaccggtcatgtcacggtgaagcgtgatctcataggccatggcgacgcggtgcttctcattgatgacatcgtcaccacaggtgccaccgtgcggcaatgcgttcaggtgtttcagcaggccggcaccaaggtggtgggcgtgctggtattggcggatgccgtggcgcgacggtccgatgacgatatcaacgggtgaatgacatcggtgacgatgccccagatagcaggcgaagcgccgttgctcggcatgtaatcgggatatcgaggattctcggcgtgcaatatggtgatgccggcccgtgaaaccagccgtttgatggcgatttcatcgtccatgacagccgcaaccacatctccggggactggtgccaacgaacgatcgacaatcagcagatcgccgttatgaatacccgcattgatcatggaatcgccggccatctgcatgacaaatagcgtggtgtcgcgcggcatggttcgtgactcggattgctgtgtcatgcggtgcctcccaccctgtattcgaacatctgttcgaatacagtatacggtaggacggcggacaatatcagcgttcggcgacgtgatatttaggcaggatgatttcgaaatcggcgcctcgcgtgtcatcgaccactttgacggtgccgccgtgcaattgggccgcccaacgtgcgatggacaggccaaggccggtgccgcccgactcggtgccgggacccgtcttgcctttgacaaagcgccggaagatatccgaacggtcggacggtgcaatctgggagccgaaattcaccacattggtcacgatggtgccttggctgtcatcctcatgggcatcgaccagcacggtggtgccgtcggccgaatgcttcagcgcgttggcgatgatgttggtgaacagctggcgcaggcggtcctgatcgccttccatcgagatgtcggccggcacggtgacgcggatgtcgtgggcgtggccgccatcggcgatttccaacggctcgatggtctcgtcaagaaagtcggcgaagttgaacttttcgatattcagactcgccgcaccggcctccatacggctcaaatccaacaggaaggcgatgaggtcggagagacgctgcgtttgggtgaggatgctctccagattggcggaagtgggctcggtgacgccgtcggccatgttctcgaccatcgcctgcaaagcggaaacgggcgtacgcagctcatggctcacattggctatcatgtcgcggcgcattttatcggcatgttcgagttcgccggccatctcgttgaacgagcgagccagctggccgacctcgtcatgacgatcctgatcgatatccacgcggaccgtgtaatcgccatccgccatggcttcggccacatcgcgcatctggcgtaagggagcggtgatgccgcgggagaagaaataggtgatgcccaaggccaccaccaaagtcagcggcatggcgatccagccggaccagccgaatttcaggaggaaccagcacatggcaaacgcgatggcagtggcgataacgatcagtacgctgagttccagcttcagagaggagaacaaatcaaccggcttgacgcgaggtttcatcgcatcaagccgggattgctgttgttttttggatgccatcacgcggtcggcggctcgaaagcgtagcctacgccgtgcacggtgcggatggtatcggcgccgagcttatggcgcagcgccttgacgtggctgtcgacggtgcgggtgccggatgcgtcgacccagtcccagacctcttcgagcagcttttcgcgggtgagcaccgacttcgggcggcgggccagcgtggccagcagatcgaactcggtgggggtcagatgcacctgctcgccgttcacggtgacgatgcgctgggccgggtctatgaccatcgaaccgaagtcgagcagcttctcgttctccgaattcttggcgatgaccttcgcacgctccacgcggcgcagcagcgccttgcagcgggcgatgagctcgcgcatggagaacggtttggtcatgtaatcatcggcgcccgctcccagaccgatgaccttgtcggcctcgtcatcacgtgcggtgaggatcagcaccggcaccggacgttcggcgacgatgcgtttggtggcctctagaccatccataaccggcagcatgatgtccatgatcaccagatcggggcgtagctgggacgcggcctggacggcggaagcgccgtccccggccacgcgagcggtccatccttcagcggtgatgcgctgggcgatggccgtggcgagtgtgggctcgtcctcgaccaccagcaccgtgcgcggtgtcgtattctgacgcgctgtggtattgagcataaataaaccggttacctttcagcctgttgaccagttcagtcttccggcttcaagaatacaactcccagagccggaacggtgatcttcgccgagaacggacgcgaatgatattcgccctcgaccgcttcgaaggtgccgttgtggatgtcggagccgccgtacttggcgtcatcggtggtgaacacttcggtccacttgccgccggtgggcagcgccacctggtaatcgggccaggcttcaccggagaagttgaccaccacggccaaggtctcgcccttggtgccgatgcgcaggaagctcagcgtgttgtggtcggcatcgtcgctggtcagccactggaagccggccggatcgaagtcctggctccatagtgccggatgcgccttgtagaaggcgttgaggtcggcgaccatggtctggacctgacggtgctcctgccagttcaggcaatcccaatcgatggaggcgtcgtgatcccactcgccccactgggccagctcgttgcccatgaaggagagcttcttgcccgggtgagcccac

SEQ ID NO: 2734 - DNA, 12752 bp, Unknown
  R36_18m  MAG No. k141_12322
accgtggaggtgtgtctgccgatcaggccggcgatccgccgtatgctcgtcccgttgccgatctctatccggatgatccgccgttcctcttccgacaggtgcgaatacacttgacccaaggcgcgacaccccttcactggttatctggacaatctccaatttaaagggtgttgcactttcatctagacaacgggtgccaattttcattggcatccatatgatacgattaacttatcagatgtctgatgtctcgatatcgagacgtacgacaacccatcacaagaccgaggcgacgagcatggcaccatggcagacaacggatttcccacacggcgcgggcaccgtcatcgccgaattctccgtacgtgcggacgggccgatctggcgggcgcaggtccccgccaccgccgacggaattcccactgccgccccatacctttgcctggccgtgcgtgacgggcacctcacgctgacggcgcggtccctgtccccggacccggccgacccaaatgcgcagtcccacgtcagcctcgacatcgaagacgccttcggcctcgatcctggaacgatacacgaggccgcattgaccttcggcgcgttcggcacgcgcatctacctggacggataccaatgctttgcctgcgccggcaatctcaatccctcacgggtccacccatcgggcgcattcgacctcggctcacccaatgccattgcctgcaatgcgttcctcgtcgaccccgtggattgggacgccgtccgcatcgccgagcatgccgcggcggccaagccggatatcgtcttcgcctcggaccggctctcccccagggataccgatcgcatcgccctggcggatgcgggcagcgtccatgcgagattccgcctgcgcggtcgcggacagcatggcacgatcctcgcggccggcgtcgatggaagcgagcgcatgaccgtcgccatcggcgccggaggactgacgctggccatgcgggacgaatccggagcgggcatcgcatgccacgcgccgggccattgggatgacggaggctggcacgatctggccgtccgctcctcgcgcggcgccgttgacctctttatggacggcgtcagcgtgctgcaccagccgggccagatgtggttcgcggatctggccggtccacgccacggccgaaaaggcatcgacgctttcaccgtggggcgcaatatcgccggggtgcggctcatgggcgaggtcagccgtggaggcctgtacgtccacgcgcttaccgacgggcagatcgcacggctcgctcacactcccccgatggtcaccacggcgctgttcgacgcgggatacgccgggtcggccagctatcgcataccctcgctgatccgcaccgtccgcggcacgctgatcgccggggccgaccagcgaacggcgatcagcaacgacgcccccaaccacatcaacttcgtcatccgcaggtcaaccgacggcgggcgcaactggatgccgatgcagacggtcatcgacatgcccggacgcgaggacgggctggacggggccagcgcgctcgactcctgctccgtagtggaccggagcatcggacgcatcacggtattaatcgatctcaatcccggaggcatcggcctgaccaactgcgagcgcggcatcggcgtgaaccgcgacggcgttctgcgtctgcgggacgctcagggcaatgagaccacgctggacgccgtggccgacgccggcgacgtgtggcgaagtcccatgcatgccgacccgtcgcaacgctggcatgcggttcccacctgctacatcgcgcagatccattccgacgacgacggcgagacctggtcaccgccattcctcattgacgcaatggtcaaagaggaatggatgcatttcatgggcgtatgcccgggaaccggcatccagctggacaaggggccatatgccggtcgtctgctcatgccgttctattgcagcgggcagagccgcgcccactattccggcggagcactgatcagcgacgacggaggcgaaacctggcgacgcggacgcatgatcaacgaggggcgcgagatcaacgggaccgtcgtcgatccagccaccatgcgcgacgacgacgcaacgaccagcgaaacgacgttcgtacagcgcgcggacggcgacgtagtggcgtttttccgcaaccagcacgccagcggacgcgtgggcaaggcggtcagccacgatggcggcgatacctgggacgagcttgagttcgatcccgccttgccggagatcttcagccaaccgaacgcccttgcggtgccacagcttggcactgacgcggtgctgttcgccaacgccagccagatgatgccataccggggacggggcatggtgcgactgagcgaggacggcggacggacctggacgggcagcctgtgcgtgcacccccatcatcatgtctatcaatgcatggcaatatgtgaaacgacgcacgacgtagaatgtgaaggttcacaattgggactattgtgggaaatagagacgacgggggtttacattacgcatatcccccttgcatggttttcacatggccacgataagggcgtcgcggccaaccatacggacgacaaggagtcatcatgaacggcacagcagaccgagccacggcgggctcacgcgcaacggatacggaacccgacgcgccgcaaggccaatacagtacgcaggagctggccgcgctggcgcgcctgtccctgggcaactggtcgaccacgcaggtctcttcccgcagccgatgcgacgagacgatggacgcgatcaagtcgtacatactgcgcgaacgtctgcaaccgggcgacgtgctgcccaccgaaacgcagctgtgcgacaccatcggggcgtcccggtcgtcggtgcgcgaggccgtgcgcaagctcgaggcgctgaacatcgtcaaggtggagcacggcaagggcaccttcgtcggttccctgtcgctggaccctatggtggaaacgctcgccttccggtcgatggcgtcggtcggcaagaatttcaccgatctgcaggacgtggtcgaactgcggcgcttcctcgacctgggatgcgccgaggaggtctgcgcgtccctggcgggaaccgagcagccgcgcctgacggaacttgccgagcgcatgagcgccgaagccaaggaaggcaagacgttcaccgggctcgacatcgaatttcacaggggaattctcgattcgctcaacaacaccgtggccaagcagatggtccgctccctgtggctcgtgcacatggccgtgctcccccagctcggactggcggtttccagcgaacttgaccgtaccgccgacgcccatcaccgcatgctcaacgcggcgctggccggcaatgtggacgactaccgcgaggccgtgttcgaccattacgagccgatcgaatcgattctcaagcgtcgcatcgtccaggagcagtaaacccgaaaccgcgggccgattggcgcgggcaatccagtcggcccgaccgacatgcgacacgccccttcaaaaagtaacccgttacacgatccgacggcccgcgcaccacaccgcggtcacggtgagcgtgccgggattggtgagcagcaggtcggcggcgtagccgggggccaccaggcccagcggcgcgctggttacggggttcggccgatcaaggccgagcgcatgcgccggggtgagcgtggcggcttcgagcgcgtcggtcaggcccatgccgagctcgcgcacggcgcgctgcaccgccacttcgaggatcagcgtcgagccggcgatcgcgccgttcgacaccagccgggcgtggccgcccaccacgttgacgtccagcgcgcccagtttgtaggcgccgtccgcacaaccggtggcggccatcgcgtcggtgacgaacgcaatgcgatgcggcgcgaaacccagtgccaggcgaagcgcgggattggccacgtggaagccgtcgttgatcagctcgatcgtgacgcgcggatcctcgaccgcggccggaatcgggccgggctcgcggtggtggatgccgttcatcgcgttgaacatgtgcgtcatgatgcccgcgccggcgtcgatcgcccggcgtgcgacgtcatagtcggcgtcacagtgtcccacggcggggaccacgccggccgcggcgaagcgccggatcgcgtccatgccgcattcgcgctcgggggcgatggtgatctgccttagcgtgccgtcggcggcctcaagcagacgctccacgcgctccggggtcggatcgcacaggcagttcgggtcatgcgcccccttgcgggccaacgccaggaacggcccctccagatgcgagccgagcacgtcgggccgcgttgccatcacggacctgacgcattcgaggttccgcgccatcacatccagcggattggtgatcagtgagagcacctggcgggtggtgccgtgcagcatgtggtacgcgcgcgccacggcgatgccctcggcaccgtcgtcgaacgaacgctcccaggcgccatgcgcatggatgtccacgtagccgggcgtcacgagcatgccgccggcatcgacctcggcgacctggtccccgccgctgagatgggcgatgcgggtttcaaggtcagcgtcgctcgtgcccacggcgtcgattacgccgtccgtcacgctcacccatgcgttgagctgcacgccacgcgcatcggccttgactgcattgcgaatgacgaaggttcccgccctggcggcgagcgcatccgcgaccatcgtcgcctgatagcgtttttgcatctgcgtttcctcagatcttctgccaggcgggcttgtgctcgtaggaataccggtagtagtccttgccgcgcagtttcgaggcggccgcctcgtccacgatgatcgtagcgtgcgggtgcagctgcagggcggatgccgggcagtacgagctcacgccgccctccacggtctccgcgaccgcctcggccttgcccgcgccgaacgcgagcagcacgaggtggcgggccttcatgatcgtgccgatgccctgcgtgatgcagtgcgtgggcacctggttgatgtcgttgtcgaagaagcgcgcgttgtcgatgcgggtccgctcggtcagcgtcttgacgcgagtgcccgaggcaagcgacgatccgggctcgttgaagcccacgtgcccgtcggtaccgatgcccagaatctgtacgtcgatgccgcccgcggcctcgatcgccgcgtcatatgccgcaccggcgccggcgaccttgtcgccgtcctccagcgcggtgccgttcagcgcgtcgcccggcacgtgcaccttggccgggtccagtcccagcggctcgaccaccgtgcggtggatggtcgcatggtacgactcggggtgcgtcagcggcaggccaatgtactcgtcgagcgcgaaaccgcgcaccctggatacgtcgattccctcgtccctgacgattgtcgcgagcgcccggtacgccgccagcgggctcgagcccgtggccagtcccagcaccgcgtccggcttggccttgatcagatcggccacgcaacggccatacagttcgccggcctcctgctcggatttgacgatgatcacttcagccatggcaattcctttcgtatgagcctattggcgttgcgccgcacgaacgccgccacgcgcttgcatgcgggcgggcattcgcgcaacgcatatggttgtgcggcaatcaggcctcagtggaggcggaaacctcttcgggggtgcgttccagcttcatgccgcactcctcgagcacggtggcgatgcgtttcacattctcgcccttgagcggcagcaccggatcaggcatctggttggtgtcgaacacgcccagcagcgccattgcggtcttgaaggcgcccactccggatccgaagcccgccacgccctgcggcacggtgacgatgcgcatcagcgcggccagccagtcctgctccttcctgaccgtggtccagtcgccggcttcggcggccttccacatgcgtacgtagccggtggcctccacgttggccaggcccggcacggagccgtcggcgccggccatgtaggcaccgtcgaccacaacctcctggcccgtcagcagcgtgagcggatggccggccttggcgttgtcgtccacgaggaagcggaaggccacgtcgtcgttcgaggagtccttgacgcctgcgagcacgccgtccctgcccagcttgaccagcaggtcgcccggcagcttggtatgcacgcacaccgggatgtcgtaggcgaacagcggcaggtccggcacggcggcgtgaatcaggcggaagtggcgctccacctcggccatgccgcccagggcatagaacgggcacgtggccacgatggcggacgcgccgagctccttggcctccttcgcatgctcgatcacgcggttggtttcggtgtcgatgcagccgacgaacaccggcacgcggccgtccacgacctgaatcacggtctggatgatctcgcggcgacgcgcatcggtgctgaacgccacctcgccggacgagccgagcgtgaacaggccgtcgacgccggcgtcgatcatgcggttgatcgagcgggcgaagctggccttgtccacttcaccggaagcggtgagcggggtgacgacggggggaatgaccccgcggaattgggttgccatgatgatgtgtcccttctttgaggattgtctttgaggattaaaaatggactgctgaaattattcggcgttggaatcgggcgaacgcgatttcaacgcgaggaaggcctcacgcgcattcggccgcggtgggatgcagcagcgagggcgccgcgtccatgaggatcctggtgtacccgtcctgcgggttgcgcatcacgtccatcgtcttgccgcgttccacgacggtgccgtggttcatgaccatcacctcgtcggagatgtagcggacggtttggatgtcgtggctgatgaacaccatcgacaggccgagcgtcctcttgaggtccgagagcaggttgaggatctgtgcgcgcaccgagacgtccagcgcggaggtgggctcgtcggcgatgatcgcgtccggcttgagcgacagggcgcgggcgatggcgacacgctggcgctgcccgccggacagctgcccgggcagggcgcccagcaccgaggtgggcaggccgaccatgcggatcagctcgtgggcgcgcctgtcgcgctcctccttggaaccgagcttgtggaccaccagcgggtcgagcagctggtcgatgacgctcatgcgggcgttcagcgcagtcgccgggtcctggaagaccacggagaccacgcggccgatgtccatgcgctccttggcggtgcggtgggtgacgtcctggcccttgaacagcaccttgccgctggtggcctgctgcaggccgcacatcacgttggccgtggtggacttgccgcagccggactcgccgacgatgccgatggtctggccgggcatgagcttcaggttcaccttgttgaccgcggtgatcctgttcttgtggaacagccccgatccggcgcgggtggtgaacaccacctcgacgtccctgagctcgatgatcggaacgttgggatccttcctgggggtttcggcggcgtggctcatcgggcacctccttcctgggtggaaactgtcgccgcggcgggcgtgacgtcggcatcggccggcagggcggcgtaatagtgatgcgtgccgggcacccgttcgaagatcgggcgcgtgttgaggccaacgtccgggtggctggagcggggagcgaagcgatcgcccttggggaagtcggccggggacggcacggttccgggcacctggtgcaggcgcttggcccctgcctcgatcgaggtgaccgagccgagcaggccgcgggtgtactcgtggcggggatcggtgaggatctccttggtgaagccctgctcgaccacctggccggcgtacatcacggtgatggaatgcgccaccttggccacgagggcgagatcgtgcgagacgaagatcatcgcgaagccgagcttttcgcgcagttcgttgagcaggtcgatgacctgcttctgcaccgtgacgtcgagcgcggtggtcggttcgtcggcgatgatgagcttggggtcgcgggtcagggccatggcgatgagcacgcgctggcgctggccgccggagagctcgtgcgggtaggattccagcgtgcgcttgggatcgaggcccacgagctcgagcagttcctcggcggagcgggtgccgccgcgggaggtgagctgcttcatctgcgacttgatcagcatcgaggggttgagcgaggagagggcgtcctggtagaccatggcgatctcgtggccgcgcagggcgttgtgctccttgggatccatgccgacgaggttcttgccgtcgaacaggatctcgccgctgatctcggccttcgggtccagcaggcccatgatggccagcgaggtgatcgacttgccgcagccggactcgcccacgaggcccatggtctcgccgggacgcacagagaagctcacgtggtccaccacgttcacgtcgccgtggcgcgggaacttgatgcacaaatccttgacctcgatgaccggggcggccgtgctcgtcggctcgaaccggtcggtgcgcttaagttcggcctccttgagtgcggcgagggaatcggccagggattcggcctgctccctgtaggcggcgactgggtcggtcaggaggcgatcctccctgcgctcggcctcggcgtcggcggcggacttggtcaccggggccgtcggggcggccaccatggcgtcggtgatgccctcggacaggatgttgaggcacagcacggtgatcatgatcgccagacccgggaacatggcctgccaccagtagccgaagatcacgccggccttggcggaggacaggatgttaccccaggtcggggtgggctcgggaatgcccgcgttgatgaaggacagcgacgcctcgaacacgatcgcgtcggcgacggacagggtggtgaacaccatgaccggggcggcgatgttgcgggtgacgtgcttgaagaggatccacggggcgcgggcgccggagacaatgaccgcgcgcacgtagtccttgccgtactcgctgatgatgttcgccctgacgatgcgggcgatctgcggcacgtagagcacgccgatcgagatgatgatgccgaccatcgactggccgaggatcgagacgaacacggcggcgagcgcgatgccgggcacggacatgaacacgtcgatgacgcgcatgatgagctcggagatccacgtgcgggtcacggcggcaagcgcgccgatcagtgagccgacgatgagcgcgaagacgatcgagctcaggccgatgaccagcgagtagcgggcaccgtagagcacgcgggagagcacgtcgcgaccgagattgtcggtgccgaaccagtgttcgccggtgggcgcctggtagctcatcgtgatctcgagcggatcgtgcggggaaaggacgggtgcgaagacggcgcagacgatgagcagcgcgatcaccacgaaggagatcttgcttcccacggtcatcttgctgaagcgattgaatttgacgccgggcctgcttgcggcctcggccgccttgttcttgccgaatagcatcgtcacaccgtcctgattcgcgggttgatcagcacatagagcagatcaacgatgatgttgatgatgatgaacgcgagggccacgacgagcaccacgccctggacgagcatcggctggttgccgttgatgccgtcgaacatcgcggtgcccatgccgggcagggcgaagatgacctcgatgacgatcgcgccgcccatcaggtagccgatcttcatgccgagggtggtgactggggtgatcagcgcgttgcggaacacgttgcgcgagacgaccacgctcttgggcacgcccgcgccgatggcggtgcgcacgtagtccttgtcgagctcctcgaccatcgaggtgcggatgatgcgggtcagctggccggccacgggcaggccgagggcgaaggacggcatggccatgcgggccaggtacgcgccggggtcctgcgtgaacgggacgaggtcgccggagccggggagccacgccatcttgatctgcagcacgtagatcagcagcacaccgagccagaaggacggggtggcgatggcgatgatcgaaaccacgcggatgatctggtcgacccaggtgtcgcggtacagggcggcgagcacgccgaacacgatggcgaacacgatggcgatgatcaggccgatgaaggtcagctgcagtgtgacggggaacgcctgggccacgcgggccgcgacggaatccttgttgacgccgtacacgcccatgtcgccgtggaacaagccgacgatgtagttgaagaactgctgccaccacggcaggtcataccccatctcgtggcggaaggcggccagcgcctcgggggtggagttctcgccaagcgccgcgacggcgggatcgtactgggagaaggacatcaggaagaacaccaaaaaggtgaccccgagtgccatgaacggcaaggcgatcagacgcctgcccaacagtcgtaacagattgctcactgtaaaagctcctatgcgtgcgccatcggcggttcagatgcgccgcgggcggggccggggcatccgcacgttcgcaggacgccccggttgccttgccgtccgttcggttcagccggtgatggcatatgtggattgcgtcagttcagcttggccttgaccaggttgatgccggtggagccaatggcctcccaagaggagaacgcgcccttcctgacggccgtggttgtcttgcgatggaacagcgggtagagcggcagctcttcggagagcaggtcgaagcactggttccagtactcctgtcgttcggaatcggaagaagcggcagtggccttgtccatcagctcatgtagctggttgtagccgtcagagcccttccagaaggagcgctgcttggtccaggcgttgtcgccgtaccaccagttcatcagcaggtcggggtcgttgccgaacacagagggatcgccgggggcgaggaccatcgagtagtcagcgtcgtccttgtccgtgatggacgggtacagcgcggaggacttcatcgactggatgtcgacgttcatgccgatctcggccaaatcgttcttgatctgcggtgcgagctgggtgatccaggaatggtcggtggtgtacagcgtgaagctgatcggcgtggtgaccccggcttcggcgagcagttccttggccttggccgtgtccttggtgtagacgttcttcgcctggtggtagtactgcgaatccttgggcaggaagctcgtggccgcttcggcctggccgctcatctggttggagatcagcttgtccacgtcgatcgcgtagaacacggcctggcgcacgcgcttgtcgtcgaacggcttcttcttggtgttgaacatcaggaacggcaggttgaagccctgcgcggtcttcagctcggagccggacgactggagggtctggagcgcctgggccgggaccatttccatgatgtcggtcttgccgccctgcatggcggtgacgcgggcggtgtcgtccacggtcacgttccacaccatgttcttggcctgggccgggtaggagccgttgtacaggtcgttcctctcgaatttgacctgctggtcggtgatctcggcgtacttccacgggccggagccgatgggcttgttcttcaggtcggcatcgctcatggacgacgggactatctggatcaacgccagtcgctgcttgaagagcgggaacgccttcttgagcttgaacgtcacttgggtgtcggacttcgcctcgacggaatcgatgaagtcaagcatcgaaatgtacagcgagccggtggcggtggtgcgctggtaggagctgaccacgtcattggcggtgacggcggtaccgtcggagaacttggcgccgtcgcgcagggtgaccacgtactcggtgtcggagaccttctccggatcgcccttggcaagagcggcatagggcttgtaggtgctgtagtccagcgcgtacagcggttcggtgacgtgccagttcgcggccatcggcagggcgccggaggtggtggacgggctgaagtcgcggctcgcataggcaacctgggcggtaatggtgtccgccacggcagttccggtcttcgcggcggtctgggtgccgccaccgcatccggacagcagcatcaggctggcgacggccgcggccacggcggccttgaactttccgtttctcttgatcatgcgatctcctcatcattgagtgaatttcgaatcaccgtccgacagacgacgcgatcctttcctaattgcttcattgaccgttccccggcctgcgtccgcttcggcctttccgcgttacggcggaccattgcggtttgtgcgggactcctgcggggaaccaccaacatcgttgtcgaacctccttaatggtaagacgtctgatgtctgatttcaaatcggcgtgttgaggaattcactcgtcaaggcccctccgcgctgatctgcctatacttcaccagccttgaatatcggcaatatttcgggcttcgccgaccgttatcgttccgaaaatgtttgtttaccattctgcaataagacatctgacgtctgttaacataacggcaactttcgccgccgacgaacgcggcaaacacgggatatggcgccaaacgacaagaccgccgtggtcc

SEQ ID NO: 2735 - DNA, 8675 bp, Unknown
  R36_18m  MAG No. k141_12362
acggcaaggtcgtcaagaccacgtcgttcggcgctttcgtgaacctcacccccggcaccgacggcctgctgcacatctcccagatccgcaacctggccaacggcgagcgtattgacgccgtcgaagacgtgctcaaggaaggcgacaccgttgaggtgatcgttcagggtgtcgatgatcgcggcaagatctccctggccatccctggtttcgaggatcaggagaacaacgcccgaccgagccgtggcgatcgcgatgaccgccgtggcggccgtggccgtggtgaccgtgacgatcgccgtggcggccgtggccgtcgctccgatcgcgatgaccgtgacttcgacgatcgtgacgaccgtccgcgtcgccgtcgctccgatgacttcgaggatgattacgacgaccgtccgcgtcgccgtcgctccgatgaccgtgacttcgatcgcgatgatcgcgatgatgatcgtccgcgtcgccgtcgttctgccgaccgtgacttcgacgatcgcgatgaccgtgatgctcgcgactcccgtgatgatgatcgtccgcgtcgccgtcgctcttccgatcgcgatgaccgtggcgatcgtgatgaccgccgtggcggtttccgtggcggccgtggccgtggctcggaccgcaacccgcgctatgccaccgacgacaactacgacgactaccgcgccgaccgcgaagagcgcactgagcgcccgcgtcgccgcgtccgtcgcgactttgatccgttcgaggactaaagccctctcacggatcggtcgcggcatagccgcccccctcgcctacgggaagcccgcagggcttcccgcttaacggttcggcattcgaggactgatcgttctctagcttctctcgggtgagaagagcttaatcgcaaaccaaaaggcttctataccgtttcattcggtatagaagccttttggtttttcggcttcttcgcgctacatatttcgatgttgaatagggcactcgtgctgctgccatgtacattcagttgtcagttgacaactattctcatgcatcaagaatggcggaaaacagccattaagatgattggagccacgctaaaaagcgttgacaactgacaacagtttgtacacggcaccgcatggcacctatcctgttgctcacgaccggatctattctctcgtctgttgttatgcccaacagcaaaatccgcttgccgtgccgcgccatgtccgagtcatggccagccgttgattgaatggcggatgatcatcgaaggtactcatgggcgttgatcactgtggcaacaacaaaggccgggcccttgtgagagcccggcctttatgccgtatggcggcggattaatccttaaaggctaatccgttgtcaatcagcgttacagaatcgccatgcacacgaagtccagaatgaacagcgcggccacaatccagatgatcgggtgaacctccttggccttgcccttgcaggtcttcacgatgcagtacatgatgaagccgccggcgatgccgtaggagatggagtaggagaaggccatgaacacggctgcgaagaacgccgggatggcttcggcgatgtcgtcccacttgacttccttcagggaagcggccatcatgcagccgacgatcaccagcacgccggcggttgcggcggacggcacggcggagacgaccggggccaggaacgcggacagggcgaagcagatcgccacaaccacggaggtcaggccggtgcggccgcctgcggcgatgccggcggaagactcgacgtaggtggtggtgttcgaggtgccgcagatagcgccaatggaggtggcgatggagtcggcgaacagggccttgtccatcttggaggagaagccgtggccgttctccagagccttctcatcctcggcggagaagatgccggtgcggcggccggtgccgatgaaagtgcccagggtgtcgaacgtatcggacatggagaaggcgaagatggtcacgatgaccagcggcagcttggtcggatcagagaacagtgccgggaagccctcggcggagaagatcgcgccgaaggtctgcggcagctgggagaaggtctcgctgatggactgcgagttggaccaggtggtaacgccgaacgggatgccgatcacggtggtgatggcgatggccagcagcatgccgcccttaaccttcatcacggtgaacacaatggccagtacgaggccgatcaggaagacccatagcaccttgtcgttgaagtcggccagactcggggtcgccgccacggcgcctcccttggctgcggctttcgggtcgccgggggtgaacttgatcagtccgacgttcagcatgcccacataggccacgaacaggccgatgccgccgccgatggcgtgttgcagggactccgggatggccatgatgatcatcttgcggatcttggtgacggtgatgaggatgttgatcaggccgcacaggaacaccatgcacatggtctgctgccagctgaagccgaggccgaagcacacggtgtaggtgaagaacgcgttgaggcccatgccggcggcctgggcgtacggcacattggcgaacaggcccatgaccagggtgccgatgatggccgcgatgatggtggccaggaacacgccgccccacggcatacccgtctgcgacaggatctgcgggttgacgacgatgatgtaggccatcgcgaagaacgtggtcaggccggccagaatctcagtcgagacggtcgtgccgttttccttcaaatggaagaacttctccatttactctctacttccttggttttatgcggggctgcgcaccgcgcgcataatgctgcggctggccccggcgagaattgcgactcgccctgatcggcctgcccaacgcgcgtcaggcgctgcgcatccaatcagaaccgtggccgattatagcttgtggaggtaacgtgaacgggtccgggagtagactgactgccagaataattcggaacaactcagggacacgcagggcacacccgtggaaggaaggcgcgcgatgaaaccggccgtcgaagtcagcatcacctcttggaagaagaatgtcgtcaagcccggtcaggagtacggccgcgtactgctgatgcctggcaccggctacaactgcgaccgtccgctgctctactggtcggcccaggctctggtcgaggccggctggcgaatcgaccgcatgaacgtacgcaacgcttccgacgacctgtccacggtgattccggtcctcaatcaggcgattgacggctggatggccgccgcgcgcgagtccggcgcgggtaaagccggtgattccggggatggcgttgccgccgatgattctgctaccgtgctggccgatggcgcagctggctcgccgaaccgtgattccgacaccccgtccggccctcgcctgttgctgatcggcaagtcgctgacgacgatgacctacccacatgtggcctcacactacggtctgccgttcgtgctgctgaccccggtgctgcatcacgccgacttcgatccatccgcccgggtgattccggtgccggctgtcggcgatgatatcgtcgccgaatccgaggctccgagcgtggccgaagcaagggcgatcatccgcgcagaactggccgaccagtcgcacgccgccagctcccgatactccggcccggcaccgctgatctgcgccggcaccgccgacccgttctacgatcgagcccgcgccaacgcgctcaccccgcacgtgcacgaatacccggatgccaaccattcgatcgaggtgcccggccactggcgtcgctcgctcgactatctgaaggaagtcaccgcgtccgtagcccagtacgccgccacgttgtaatgccttgcgacacgcccgaattctgcaatgtcgctgaccatccgtaatctaatcatccgtaaaccacagaccgttggttgaagtgcgcgcgagtgcatttccgaagtttggttcgccaagccagcgcaggttgagagatataagcccgtcaagggccggcgaaggtcgcttcgcgagattatattgctctgcctgtgcgcagggcttttttgttgcccggccgaaagttccgaactccaagtcaacggccgacttaggaaggaacgccatgaagaggcccgaaaaggaagcggtagtcgctcagcttacggaagaattccgtaacgctgacgccgtctacctgaccgagtaccgcgggcttaccgttccgcagatttccgatctgcgtgaaaagctaggccgcgatacttcctacaccgtggcaaagaacacgctggcacgcatcgccgccaaggaagcgggcatcgagggtctcgacgagattctctccggcccgaccgccatcaccttcgtgaagggcgacttcatcgaggctgcgaaggtcatccgtgacttcgccaaggacaacaaggctcttgtcatcaagggtgccgccgctgacggcactgtctacgatgccgagggcgccaagaagctggcagacctcaagtcccgcccgcagctgcttgccgaattcgccggcgacatcaaggcatcgatggccaaggccgcgtacctgttcaacgccctgcctaccaaggctgtgcgtacgatcgacgccctgcgcgaaaagcaggagaaggctgcctgatttacgccctcacggcatgaatcagtcgcttcgataatttaaacaataaggtttattaggcagcggatctaccacttcgtccgccgccaagattgaaaggaagccataatggctaagtacaccaacgatgagctgctggaagccttcggcgagatgaccctggtcgagctctccgagttcgtgaaggccttcgaggagaagttcgacgtcgaggctgccgctccggttgccgctgttgccgctgttgctggcgctgctgctccggctgaggaagagaaggatgagttcgacgtcatcctctccgccgtcggcgacaagaagatccaggtcatcaaggctgtccgcgccatcaccaacctcggcctggccgaggccaaggctcttgtcgacggcgctccgaaggccgtcctcgagaaggccaagaaggaagatgccgagaaggccaaggctcagctggaagaggctggcgccagcgtcgagctcaagtgatttgtgcggcataagccgcaatcacagcttttcgaggaaccccgcacctgtgtttcaggctgcggggtttccgcatactgagtagactagttgacgagggcgaggcggagaacgcgatccggcgtggaatcacaaagctggcaatgagcgaaagttgtcaattctgtgcccagtaatccgccaaaagccggtaaaagatgacacaatggcacgtagtgtggtcaaatagtgtgtccaggaaggcggtcacggtgagcgagtggacggtgaagatcaacggtgtcgaccggatcagcgtcaagccgggggagtgcgtggaaatcggccgtaagccgttacgcccccttgccgatgatggcaacacccgccttgacgtcgccgatcagaccaaatcgatgtccaaacggcacgccatgttcacggtaaaaagcaatggtacggcttcggtccgcgatcttggatcgaccaatggatcgtatgtggtgcgggaaaatggtgatttgttgcgcttgccggccaatgtcgagttcctgttgccgacgtctcccatgcgcatgcagttcggtgatgtgcctgcggacttcattcgtatcgacgatccagtggcaaagccactcgaccttaaggtgcctgatttgtttggctatgcggttcacgaagcaccgcaggagccggatgcggcggatatgtctgtcgacgatattcttgatttgcgggccggcgagccgaccgccatcttcagcgcggataatgttcgacgcaaggtcgacgagcttgaacttggctcgctgaatatcacgcagccagtgacgaaaaacgatgagccggccataccccgtgacctgttcgcggatgcgttggcccagcatgccgagcaggagaccgaacgcaaaaaccagcaggccatggactccgtggtactgccgaagcagcagaccgaacctgagtcgacgactgtaacgcccgcatccaagcacagcaggatctccggtattgtcccggtagatgccatcgcccatgccgttgttaagcacgctcccagcacaagcgagccggcagtggcgtcggcggcggttgttgaatccgatgtggtggctggcgcaagcaagtcagccgaaaacgttcagtccgctccgaataccgacgattctcagccggtggacgctgttgcacagcattctgaaggcactcagtccgaagccgcccagtctgaaaacactcagtctgagaccgcccagccgacaaccacccagcctgaaaccgctcaaccggcaaccgacgcacccgaggatcagcagctggcgaccgaaaccgaaaccgcccagcagtcggtctccgaagcgtatgaagcgtctgatatctactccacgggcgtacacactccggtcttcgagcccggctcggtgttcgagcgtgtggccaagggcgagctgaaagcacaggagccggcagtcgaagtcgatggcctgacctctgacgaggcaaaaaccacgcaagatttcaacgttcagttcgaagtcgcccgtcatcccgaattactggcgttcctcgccatgaatccgtacctgtacgacgacatgtattcttggctcgccgcccgtggcgaggccgatattgacgaagccctgtctcacaacaagggctatcaggaataccgcgaagcggttggaaagtgagtcgagagatgacccagagccagactcagaaccagaatctcacggaaggtctgaatcgcatccgtcgctggcgtgaccaataccgcagtatgcagccgccatcgccgctcgaggatgtgaatcaactggccgcgaagctggagatgacccatgcccatccctccggcatcgcccagctgttcgcttccggccatgttcggttggattcgttgttccgtgacacgggtgtgcttaaggccgccgaacgccatatcgggcgcgtactggatgaccaggccgccaagcgcaggatttcgggcgtggcggagttgtcgctcgtggtcggtgtggccacgtggaggggcaacgcgctgccggtgctgttgtacccggtgagcgtcacgatcgaggatgatggcttgtcgaccaccattcgattcaccggtcgcgtgaccctgaacgccgcgttcgtcaatgcattgcgtgagcagggggtgttcttggatgaggattccctgtttgacggtgccagctatgacagtggcactcccgaaacttccgcgatgttcgcccgtatttcgtccgaagcatcggagcgtatctccggcttcgccatcgagcgccagattgtgctcggatgcttcatggacccctcgtcgcagatgatcagcgaaagccgacagttcatcgaccagctggagaatggccccaccggcaatgtgctgttggacgcgcttgccggcgacaaatccgcccgcaccgcgctcaaagatgccaatattccgcaatacagtcctttcgacgtagacccgcatgccgagtacgaagtcggcgatgtggacaatacggtgcgatatgccgcgtcacttgctgccaatggccatagcatcgtggtcgacggcaccttcccgaagggcaccgcggagcaggctgtggccatcgcatcgcgctgcctgatgaatggtcgttccgtgctgtacgtgcccggcgtggccgagcagaagcgtctgttcatccagacggcctccgccaatgagatgaaggcgcaggtactggatgtatccgatgaacacgccaacgccgcgcttgataagcagctgattgccgcagtcggattccagcccggagtcgccacccagcgattcgaccagctggccgacgaactcgtgggcgtgcgctcgcgcttgacccgctatctgggcgacctgcacgggagcaacgataagtggaatgtgtccgcatacgagaccattcagaacctggcccgtatctccgtgctcccgacgcaccccgccacccacgttcgacttgacgagtcaagtgccctgagcgtcgccaacgatattgacacatggatcagcaagatggaacgtgccggcgagctcggcgaatacaccatcggcccggaagacaccgcatggtacaaggcgtccatcaccactgaagaacaagcggtaaccgcttaccagcgcgtggacgatttgctgcgtcgcttcctgcccgccacccgtgagcaggtggcacgcaccgtgcagacctgcggattcccggttcctcccaccactcgcgagtgggagcgtcaggttacggttttgaagaatctgcgacgagtgcttgacgtgttccagccagagattttcgagcgagacatcagctccatgatcgaggccaccaagccgaagagccagcgcaaggccgaaggcacgtcgatgggattctgggagcgccgccgccacgtcaaggaagccaaggatctgctgcgcgtcggcgcgcaggtcgaggacttgcacgaagcgttgaaggtagtcgccaagcaaggggagcagtggcatcagttcgtgcctcacggcggttggccggtgctgcccagcaagctcg

SEQ ID NO: 2736 - DNA, 7397 bp, Unknown
  R36_18m  MAG No. k141_12374
accgtggaggtgtgtctgccgatcaggccggcgatccgccgtatgctcgtcccgttgccgatctctatccggatgatccgccgttcctcttccgacaggtgcgaatacacttgacccaaggcgcgacaccccttcactggtcatctggacaatctccaatctaaagggtgtcgcactttcaaatagacaacgggccacattttcatgctttatgcaaaaaatgtgaggcatacgcacatttcccatcaaacgcacaggtgcaagaatggcagcaattcgccattttttgaaatcaccatgtgcgtttgacggcgcgtaagcctcaccttgttctcagcaggaccgaatttctgtgagctccctatagcgctcccctacgcaatatgtccgcaaacgaccacaccacatgggcgatacgcgccaattcggcgtagcggccgatggacagccactgcacacggtaccgttcgaaccacaactccagatcggcggcaagacgggcgcggcgcgaggcatccagcgcacggccggtcacatccttggtgtcacaggcgtcctcgccgccagccagtaccagcagttcctcgcccagtctattgaacagccgctgcccatccagcatcacccacagcagttccgggttcaatcctcctcgtgccgagccatcgagcaccgcaacaaccgcactgccgcaatcgatcaacgcccggtcgcaatcccggcgtcgttcgagtcgggcatggttccgcaggagcagccggcggcgcgcatcggcgcatcccagcgtacggtcaaacacgagctctcccccgcacgaccgttccacatacgatgccacatccgtattcagcatgccggtgccagaaccgtattccagctccagcacctgcacggcaaggtcccaggggaatgacaccccatcggagtcgatgcggacgaggcaatccatgatgcgaccggactcgtcgccatacaccagaacggagatccgacggttcatctcatgcgcatcgatctcaatcggattccacgcgttctgagcgccataacacaggcccggcacgctcagacgcggatcgttgacgtggccgtaatcgccccaatcggtgaccaccatgccttccgcgccatacttgacacccgccaatgccatgtgatacgtgttcagccaggcacccgcataatcggggaagaaccggctccaagcccgcaccgcggggcacacgaactggcgacggccctgcgcggcgatggtctggatgttgctctcgtcgatctgcggctcgtacatccagttgagcatcgtgatgtcgccgggcagcagatccatcgtgcgcgggctttcgagcgcgatgtccgcccacaacatcggctgccgaccatggcgggcgagcgtttcgcacaaatccctgacgaaaccggcatacagttcatcgcggccggcttccggcgcgtcctgcgcggacctgccacgtcccaagtcgaacgtctcatcgccgccgatattgaaggacttcgaacggaacagcggcgcgtattcctcaatcaggcgcgaggcgaaatcatgggccttgggatcggcggcgttcagcgtgtgatgctccatgcgttcgatgaagctgaacgggcggtcggcgtcttcggggaactcacccagcccgcgatgctcacgggtgcgcagattcatgtacatgtgcccgaacgtggccaacgacggcaccaactcgatgccgcgacgcgcgcagtactcgtccagatacgtgatgtcggcggccgtgagcggatcgatgccacgccatgcctcgctgagctcgacgaacgcgaaggcatgctcgacatacagctggaactgattgtatttatataaggccagctggtcgacgaaccaggtgaggaactccgtcgtcggcactcgtccgcgtgtcacgtcgagactgtaggcgcgcaccgcgaacgcgggcttgtcttggatatgcaggcagggaatggcacgcgaggtctgcccgatgatctgccgcagcgtctgcagaccgtaccgcagcccgctttcgccgccgccacgcacggcgatggtatctgaggcgaacacatccagcgtgtattcgtcatgcgccaatcgtgaatccaggcccagggatatgacggtgccgttcatcgctgccggcgcacccgcacgcgcatctcgcgcatcttcggcggcattggcgctggcgtcgtcttcgcctgtggctgcacggacacggcgcgtacggacggtgacgccgcagcaacgctcgagctcgctggacagctgctcaatcggcagcgtttcccaagtctcatcggcaccttcggtggcggcatattcgggaattcgtttctcgatcgtcaccagggacccgatcatagccgtgccatgcgtgtattccaatgtcaccggagcgggaatcagggtgagacacagcgttgcggcatcgactgtatattcgaatgtgggcacagctgttcctttcatactgtttttattattgttcgtccgctaatggcaggcgacacgtggtcgcgccgccatcagcggacgaatcgttggtgaggtacggcggcatacgctatttcacggcaccggtcgtcacgcccttcatgatgttacgctggatgagcatgaagaacaccaccaccggcagcgagaagatcaccgaagcggccatctgcccgccgaaatcggtgcccatggtgggtgtcgagaaggacgacagccataccggcagcgtgtacttcgactggtccttcatgaacgtataggcgatcatgtagtcgttccaggcgttgatgaacgcgaacaccgaggtcgagacgatgccgggcgcggccagcgggaaggtgatcttccacaggatctgccagtcgttcgcgccttccacggccgcggattcgaagatgtccttcgggatgttcaggaagaacccacgcatgttccagatcgcgaacggcagcaccatggcgatgtacgccaagatcagaccgctgtatttgttgagcagcccgagctggttgtagatgatgaactgcgggatgatgccgccggaggtcatctggatggccagtacgaacaccatgatcggcttgcggccgcggaagcggtacagggtcagggccgcgcacgcgaagaacgcgacgatgatcgacaggacgatcgagatggcggtcacgaccacgctgttcttgaggttggtcaggaacgaggtctgggtcacggcaacgatgaagttgtcgaacgagaggtgcgtgggccagaacacgggggtcgtggtcatgatctcatcgcgaggctttacggcggtgataatcatccagtagaccgggaagaaccatacgacgcagaacagcagggcgaggatagtggtgccggcgcggcgcgcgatcttgccggggttggttcggcggcggggcgatgcggactgcgctgcggcctgcgatacggcctgtgcaggacttgcactcattgacgtactcataggtcctctcctgacttgagcaggtaacggatgtacacggaggtcagcgcgagcagcacgatggtcacgagcacggaggcggccgaaccggtgccgatttcgaagctgacgaacgccttcttataggtgaagatgccgatggtggcggtcgtgtcctgtgggccgccctgcgagatgagccagatctggttgaacacgttgaagtcccagataatcgagagcatggtgatgaccatgatgctcggggagatcagcggcacgacgatctgccagtagcagcgcagcttgctgcagccatccagctgggcggcctcgatgcaggactggtcgacctgggtggtggccgcgtacagcgtgatggcgatgtatggcacggcctgccagaccacgagcagccagatctccagaaatgcgagccaggtgttgtcgatccaggaggtgttggtcatgtcgccgaagacgtgcagctgggtgagcagccagttgatgacgccgtaaccgggctggaacagccacttccagaccaccgaggatgcgacgttcggcatggcccacgcgaagatgagcacgaagatgaccaggtagcgcatcacaccgccgagtttggtcatcagctgggcgactcccatgccggccagcacgctgccggccacgagggctgcggtgaagccgaaggtgcgtagcagggccgcatagaaggccgggtcggtgagtacggattggtattgcttgaggccgacgaagtcgaattcgccggtgaacagcgtgcgctggctgaaatccgtgaaggacgtgaagatcatgaatcccagcgggatgaccaccagtgcgatgatgacgatgccggcgggcgtcagcaggaacgccggggcgcgattgccgcgtttcttagccggccgtgaggccggggcctcgccgtgcgcgagttgcgttgagcttgtcatggtccaacccatcacttggcatacagctcgttggcgtgttcgtcgaacttcttggcggaggcctcggccttgctggtgtcggtggcgatgtccttgaacagggtcagcgagccgtcgctttcgatggtggtccactgcggggaggcgggcgtggccttggtgcgcttggcggcctcgaagaagccggtcagggcggtcgggaagtcgtcggaggccatggccttgtccagtccttcgacgttgttgggcaggtagccgtccttggcgaacacgtagtcgttctggatgtcagggctggaggcgatcttgatccacttcagggccagatcctgcttggagctcctctgggccacgccccacacggagccggccatcatcgacggctggttctggccgctcaggccgggcatcgggaaggagccgagttcgtcggcggtgatgtctttgttgtattcctgaatcacgcggatggaggcgctgttgccgattacggcgccgatcttgccttcggccatgagctggctggtgtcggggctatcggtgtcgagcgggcgggaggcttcggatgaccacttgtgctggaattcacgccactgctcaaggccggacaccgattccttggtggacagggagctgacccatttgccgtccttctgcacggcgtagtcgccaccggcgtcccacacccactggatggcggtcttccaatcggcacccggcacatagaacggggtgaagtcctcgccttggtgcgcgtccttgagaatctgcaggtcggcttcaagctcggcgtaggtggtcggcggctcgttgatgccggccgcggcccaggtcttcttgttgtagaccactgcgcgggcggcaccgagggccggaatgccgtacagcttgccgtccacggtggcaggctcttccagaccggagagccaggtgacgccctggcgcaactcgtcagcgtggtcggtcaggtccatgaggccgccgctggccgcgaagccggcgacctgcgtattgccgaggtcgagcacgtcggggggggtgctggtggacagagccgtggtgattttggtgctgatgtccttccactgctggttctggatgttgacctcgacgccggtctctttggtgaactggtcgttgatggccttgatggtggcctcgctttgatcgccctgcatgacccagacggtgagcttgccatcgctcgaaccggtgtccgaggatggtgcgcccatcgagcatccggcgagggtaagggccgctgccgtgacgatggccgtggcctggagcaccctgcggatggcggggcgtacgttgtgctgctgcttcatgatgttccttcccgtccagttgtgaaccgttgcggctcgcttgatctggccgtctccattgactggtgatttcttgtaaacgtttacgagaaggagtataacactcacgtaaaggtttacaaatatcatgtgcgtgtcgcacttcacttaatatcggtaaatctcttttactatttacttcgtacacccttacggcagagaatgtttaccgactttcatacgccggcacggcaatccacaggcaccggacatgggccatgcggaatcatcaggaaaatcgcgcggtacaatcactgtgaacggccctaggacaggaaggagacgggcatggccataccccgtaagccggccactatcatggacgtcgccgcggcatccggcgtctcctacgccaccgtctcccgttatctcaacggcaatccgcatgtctcggccaaggcagccgagcgcatcgccgccgccgtcaagcaggtgaactacacgccgaacaacgccgcccgatcattggtacgccaacgcacgcaaaccgtggcgttcgtggtgcacgggcagccggattcgctaatcgccgaccccaatatcaacaccatcctgctcaacgccaaccagacgctcggcaatgccgattatcaactcatcacgctgatctccgactcccctgcggccggcgcacgcatcgccagactcgcctccagcggattcgccgacggatggattctcaacacgttccataaagatgacccgctatttcagagattcgccaatatcagcgtgccggtcgccatttccggcgtcggctatggcagcgccatccccttccccaccgtcgatatcgacaatcgactcgcttcacgcaagctcaccgagcatatgttggggcgcgggtatcggcgaatcgcctatatcatcggaccgccgtacttgccatgttccgacgaacgactgctcggattccaggatgcgatggccggcgatttcgacccggcactggtcattcggtccgacggctggacccggcccgatggccgcaacgccgtcgtgcggctgctggactcgctggctgagccgtcgggtagccgacttgccggcgccgacgccagcgtgcccgagctcctcgccgagcatcatatcgacgcgctgatatgcggcagtgattgcatcgccgctggagccatgaattatctgctcgaccgcggcgtgcgtgtgcccgacgatattgccattgccggcttcgacgacagcgccgacgccacagccctgcacccgcagctgaccaccgtgcgccagccaatggacgcattcggcgtcagcttggccaccctagtgcttgaccagatcgagggccgaccgttccagcgcacggtgttcctgcccaccgaggtcgtggccagaggctccaccggagagtaggcgcgcagagaacggttctcaataatatctgtgcgcacttctctacgcccgaagcgcacatggaatatgccctaatcactgccatgtcgccatttgcgatgatgtgagattgttatgttcttgttcatttgagcgcacagatactactgagaaccgttctctgcgcaaatagacaatgtggataactccataagctggaaccacattgccctgcctgg

SEQ ID NO: 2737 - DNA, 3316 bp, Unknown
  R36_18m  MAG No. k141_12416
ccgtgtctgcttgggcggctcctacgccttcgattccggccgcacggcctgccgcaatccggccctctgtcacttccacaggttccatgcccccagtggatctatccacgtccatctcaccggccacgacccaggctcatgccgcaacggcccccagcccggtctcttcgcagaccgccggacctgtttcgtcatctgccgcaggattgcagcaatcgcctgccacggcaccagagcagggttctgacaatatttcggacgagaccgtacggcgtggccccaatgcacagctggtagccaccgagcaggagcgggcggccgaatccgccgccaccaaacacgaggcaccagccaaaccggccaagcgtaaatcaggacgttcggccgtaccaagctgggacgagattctgttcggagactgaatttccgaatcaggccatatcgatcaggcagggaatatccatttccaatgccgtttgggagccatgcacgctcggcaggtgggtggctttgtctccttgcgtacgcgaatcgacgagggtcacggctcccgctgcctgcacgaccacatcgccgagcatcggccggactcgctcgcagaccggtccaaacaatccgtccgcgatggcctcatccctggtccgcaccaaggctcggtcttgcaggtaatcgcgccaccggcaagctatatcctcaggtcgttcatccggctcggcatacagcatcagcgagcgaggctctcccccgaccagtgacacgcctcgggtgagctgcggttcaacggcgatgtcaatccgctggtccacgtcggtttgcaccatgccgtggtcggccacgatgacgatcagcgtgcctttgggtgcgctgcgtttcaggagcgcgagctgggcgtcgatatgttcgaatgcggccacccagtgttcggaatcccacccgtaattgtggccgactttgtcggcgtcacggatgtacaggtaggtcaggccgggggtacgggaggcgcgtgaggcggccagcacacgatcgcgtggggtgacgttgccttgatagtcggtgcctcgcaatgcggcttcggtcaatggcgatttggagaacttgggcaaccccgagcttgtgacgcgcacctcttgagccgcaagtttctcgaacaccgtctcctcgcgctgctggtcgagcggatcgaccatgggtggcacaggaatgtgcggattggctggtttgggtgccagcgcatctttgaactggatgagttggatgagcttatggctggcgggttcgagctgcgtatagcccgccattgcggtcagtcccgggcaggttccggtaccgaatgcggccatggccgccacagtggtgcttggagcgcaggtggcgatgggacgctgattggcgcgttcgttcatcagcgaacgcagatagggcgcgtggccgaggcgcatggcgaggttccagaagcccaggccgtccacgagcaccacgatggccgattcggcgtcgggcagtcccaacgcgcgctggcaggccttgggatcggcgtggaccttggtgggagtcggatgcccaatcgcggcggacaaggcgggcagcacggcggacaggtgcagtgctcccccacgccgatcggccggggcgtcatccccatagcccactgtgggcaccagccgcagcaactcgtccatatccggcgtctcaacactcatagttgcccattcaagtagcacccctccccttggctcagtgcgcagagaacggttctcaataacaactgtgcgctccaacgcacataatcaaacaaacgcacatcgactgaaacactggaatcacgccgttttatcggcaaacatgtgcgattggcgcatcgaaaccagcgcacagttgttattgagaaccgttctctgcgcactgtttcgcgccctcccgctaatatgggggcgttcgaaagggagtttcatggcatcacaccgcaaaccgtccgcgcaaacctacgatccgcgcacggtcaaggagcatatcgtcgagacgccgctgaacgaggagatgagcaaatccttcctcgagtatgcgtattcggtgatttacgcacgcgcactgcccgatgcgcgcgatggcttgaagccggtgcagcgccgtatcgtctaccagatgggcgagatgaacctgactcccgaccgcccgtatatgaagtccgcccgcgtggtgggcgaggtgatgggcaagctccacccgcacggtgattccgcgatctacgaggccatggtgcgtttggcacagccgttcgcgatgcgtctgccgctggtagatggccacggcaacttcggctcgctggatgacggccctgcggcctcccgttacaccgaggccaggcttggcccggcggccctcggcatgaacgcggatatcgacgaggacaccgtcgacttcacgccgaactatgacaacaagctcaaggaaccgaccgtgctgccggccgccatcccgaatctgctggtcaacggcggctcgggcatcgccgtgggcatggccacgaacctggccacccacaatctgggcgaggtggtgaacgccgccaagttcctcatggcgcattcggacgccaccctggaacaactgatgcgttacgtgcccggccccgactggcccaccggcggcactatcatcggccgcgatggcatccgtgaggcctatgccaacggccgtggcacgctcaccacgcgcgccgccacgcatgtcgaacatgtcacggcccgcaagcaggccatcgtgatcaccgagctgccgtacatggtgggcccggagaaggtgatcgagcgtatttccgacggcgtgaagaaccgcaagctggaggggatttccggcgcgttcgatctgaccgatcgtcataacggcacgcgtatcgtcatcgagatcaagaccggtttcgacccgcatgcggtgctggtgcagctgttcaagcacacgccgttgcaggacaattttgccatgaacaacgtggcgctggtggagggccgcccgcacacgatgggcctgaaggagatgcttcaggtgtgggttgaccaccgccgtgtggtgatccgccgtcgcagcgaatatcgcaagaagaaggcgttggagcgcctgcacctggtcgagggcctgctgctggccatgctggacatcgacgtggtgatccaggtaatccgcacctcagatgatgcggatgctgcgaaaagccgtttgttggttgtgttcgacctggacgaggtccaggcccagtacatcctcgacctgcgtctgcgccgtctgaccaagatgaaccgcatcgaacttgaggccgaac

SEQ ID NO: 2738 - DNA, 7602 bp, Unknown
  R36_18m  MAG No. k141_12508
gccggcaccaaggccgccggctggttcgcggtctccgccatcgcgggtgccgagaacccggaagaggccgcgcgcaccatggtcgaaggctggaaggccgtccgcggcgacaagaagcacggctacgcgccgcgcgtcgtagcccacacccccgctgctgatactcaggctgctcaggaaggggccgcaaagcctggctccgaggccactgagaagaagttcaccaacgccaaggacgccaaggatgcccagaagctcgccaagcagcagcgcgtggacatcgccgcccgtggttccaagcagcgcgacaaggcgcacatccgcaagaccaagtccgtaccgttcacctatcagtatggttcctacgacctggaagtgccgtacaccgaaatcaagctgagcgacacgcccggcgtgggcccgaacccgccgttccacgactacaacaccgaaggccccaagtgcgacccgaaggaaggtttgaagcccctgcgtctcgactggatccgcgaccgcggcgacatcgaagactacgagggccgccgccgcaaccttgaggatgatggtaagcgcgccatcaagcgcggccgcgccaccaaggaatggcgtggacgcaagcatgagccgatgcgtgccaaggaccacccgatcacccagatgtggtacgcccgccacggcatcatcaccccggagatgcagtacgtggccacccgcgagaactgcgatgtggagctcgtgcgctccgagctggccgccggccgcgcggtgatgccctgcaacatcaaccaccccgaggccgagccgatgattatcggatccgccttcctgaccaagctcaacgccaacatgggcaactcggccgtcacctcctccatcgacgaggaagtggagaagctgacgtgggccaccaaatggggcgccgataccgtgatggacctgtccaccggtaacgacatccacaccacccgtgagtggattcttcgcaactcccccgtgccgatcggcaccgtgccgatgtaccaggccctcgaaaaggtcgaggatgatgcctccaagctgagctgggagctgttccgcgacaccgtgatcgaacagtgcgagcagggtgtggattacatgaccatccacgccggtgtgctgctgcgttacgtgccgctgaccgccaaccgcgtgaccggcatcgtctcccgcggtggctccatcatggccgactggtgcctgcgccaccaccaggagagcttcctgtacacgcacttcgacgagctgtgcgacatcttcgccaagtacgacgtggcgttctctctgggcgatggcctgcgccccggctccctggccgacgcgaacgacgccgcgcagctttccgagctcatgactctgggcgagctgaccgagcgcgcctgggccaaggacgtgcaggtgatgatcgaaggcccgggccacgtgccgttcgacaccgtacgcatgaacatcgagctggagaaggccgtgtgccacaacgccccgttctacaccctcggaccgctgaccaccgataccgctccgggttacgatcacatcacctccgctatcggcgccaccgagatcggtcgttacggcaccgctatgctgtgctacgtgaccccgaaggaacacctcggcctgccgaacaaggatgatgtgaagcagggcgtgatcgcctacaagatcgcctgccacgccgcagacatcgccaagcaccacccgcacgcgatggatcgcgacaatgcgatttccaaggctcgcttcgagttccgttggctcgaccagttcaatctgtcctacgatccggacaccgccatcgccttccacgatgacaccctgcccgccgagccggccaagatggcgcacttctgctcgatgtgcggcccgaagttctgctcgatggccatctcccagaacatccgcaaggcattcggtggcgaggccgctcagcagcagatcgtgaaggaggctgctgctggcatcgactccgaggcactggctaaggccaaggccaatgtcgataacgacgtggtgtccgccaacgtgctcagccccgaagaaatcctcgccggcatggatgcgatgagcgaaaagtacaccgcccaaggcggcaagctctactccaccgcccaggagtaaacctctctggctcccctctctgaggggagccaattattatgcccggtggtgtcttaattcgggacgacgctcgactcgctcgaaggcggtgacgaggtcggcagcacggatcgcgccgcggcggtccttggcggccaccagagcggcctcggtccagatggcgcacacttcggcgccgctccagccttcggtccgctgtgcgatatccaccaacggcagttcgccctcgattgacaacgaacgggcctgcacctgcagaatgcccaaacggtcgcgctcagacggcatcgggaaaggaatctgccagtcgaaacggcccggacgcaacaaagcgggatccacgtcctcaatacgattggtcgcagcgaccaccacaacattgcccttggactcgaaaccatccatcaacgtcagcaactgcgccaccaagcgcttgccgacgccattggtatcgttctcgcgcgaggacgcaatcgaatcgatctcatcaaagaagatgatggcgcgcttgtccgcctgcgcggcggcgaaaatcatgcgcagcgtttcctcactatcgcccacatacttgctcacgatggtcgggccggacaccagatagaactgcgcgtccgccacattggcgatgatgcgggccagatgcgttttgccggtgcccggagcaccggtgaagatcacgcccttgatgggcttggcaccgatcgcacgcatctgcgcactgttgcccagctgcgtttcgataagctccttggcgcgcgtgatcacctgctcataaccgccgaacgaatcgaaggtaagcgacggatcgctgcccggcgtgatgcggtactgcttgatgtcgtcatcgtgatcggattcgcctgggcggatggccgtgggccacagcactcgttcgatgccgaacaggtcggtgaactgcacggtgttgccgggcatgatcgaattcgggtaatcgccttcaagcagttcgaggccgtcggaagtctccaggaccacgccttcgttgagcgcacggcgcacgatgcccacacggggcttcaacggccacacatcatgcggcactttacgatagaaatccgtgccgacgagcaacacgtcgcccacatcgaacacctcctgacgcggaaatgtgagctgtgtggtgtgcccattaggcattacgccaaaatatgcggtgcgttcatcgtcaaaaccggtgatgcgtaccaagacgccgtcacggcgcagtacatcgttatcagccatgtcccctcccgaacatttcatgaatcaatcgcaatcagcaaaccctcccatctcaccacaggagcggcaaaacatcaaggaaaaccgctccgaaaaacatcatgggccccacttagaatgaacactatggcacagattgcaacatctacacttcccgctgttctcgcgatctccggctccgactcgtccggtggtgccggcatgcaggccgatctgaagaccatgctggcttgcggcgtgttcggcatgagcgccatcaccgcgctcaccgcacagaacaccaccggcgtgcgttccattcaggacaccaaaccggacattctcgccgaccagatcaacatggtgtttgaggatattccgccggtcgcggtgaaaatcggcatggtgtctgccactgacatcatcgacgtcattgctgaacgactcaccttccatcacgccacgaacatcgtgctcgacccggttatggtggccacttccggtgccaagctcatcagtgacgatgccattgcggccttgaccggcaagctgttcccgatggctacggtcgtgactccgaacattcccgaggccgaagtgctgaccgatacgctgattcgcgatcaggaggatatggaggccgccgcccaccgcatcgtggagcgttacggctgtgccgcgctggtcaagggtggtcatggcaccgaggatgccaacgatgtgcttgccgagacggatggaaccgtgacctggtttgatggcgcgcgtatcaagaatccgaacacgcacggcaccggatgcacgctgagctccgccatcgcctcgtatctggcgcttggcgacacattgcccaaggccatcaagcatgcgaagaagtatctgaccggtgcgctgaagacccagctgaatctcggccacggctccggcccgatggatcatttctggaagtatcgctgacataagtgtggctgttaagctccccttgccaggggagcttaacactactgaaaaaggagaatcatggttcttgaccgtaatgccgttactcaggaagtgccgatcgacccggaaaccggcaaaccgtacctcaacaccgtggcagccatccaggtgtcggccaatggcgtgggctccgaggtttcaccatacgtggctcaggccgtcgaagtgattcgcgaatccgccctgccgcaggaaaccaacgccctgttcaccaacgtggaaggcaatctggacgacgtgctcaaggtggccggtgaggccgccaagaagctcgccgagcagggctaccgcacttctctggtgctgcacatggatatccgtcccggcttcaccggccagctgaccgaaaagcccaagctggtggatgagatcctcgccgacaagcaggcgaaatagcaaagcatcgcttccaccagcaagggcatgctttgttattacacgtttcatggggcggtaactcacccatagggcggtaaatatctcatggggcggtaaaaccctcatggggcggtaggcgaaaacggctctattctgcggaaaggcaaaatccgctaaccgccccatgggccaaataccgccccatgagtgttttaccgccccatgggaatcacggttttgccttctttcaacggggtaagagcgtaagtggggcatatataggagcgttacaaactctgttatcgttcacaatgtgaccgcaacgcggcgtgccacaagatcgaacctatagttaagccccatgtagtgagctatctcacaacgattggctcgctacgtggaattcaagacttggactgcaaacgtcgttcatcccacacaatgggagggcgaacggaacacgcagtccaatcaagagttcgctcgccgcaacatcattgagcagttgcacgcgggcaggtttgcaagaagagggctcaaatatgactgctgctgaacagcagatttccggcaatcccgcggctatggaaagcgcacaagcacgtaccaccgtgacggatcaagccaaggttcaggatattatctcgcgcgtggatcgcgcacatgaaaccccgatgttccatcgcatcgtggcgctggtcgccgctggcatgctgatggacagcatcgacgtatatattggcagcgccgttgcctccagcgcgttggccacacactggtccaccgttgcgcaaaattccacctttatgtccgcaggcttcctgggtctgctggtcggttcgctgctggccggcttcgtcggtgacctgaagggccgccgcgtggcttaccaaatcaacctgctgctgtttggcggcttcaccttcctcggcgcattcgccccgaacatggccgtgctgtccctgtgccgtctgggtgccggcctgggcctcggcgctgaaatcgtcaccggcttcgccatggtcaacgagttcgcaccgatgaaccgccgtggccactggtgcgcgattgtctcgctcgtggccaactgcggtgtgccgatcgctatgctgctgtgtgcatggatcatcccccgctggtcctggcgtccgctgttcgtggccatcggtctgggggccgccatcatctggtggctgcgccgcgacatccccgaatccccgcgttggctcgccgtgcacggccgttacgatgaggccgacgccatcgtcaagcagcttgaggccaacggctccgaactgatcgacgcagccgccaaggccgacaccagcgacacccgcaacgccggcggccgttcgctcggcatctgcctgcttgtagctgtggttgctgtggccgccacgaacgtgtgctcctacgccttcacttcttgggttccgacgattctggtcaagcgtggtattaacctgtccagctcgctgctcacctccacggcgatgatgctcggtgccccggtcggctgcctgattggctctctgcttatcgaccgcatcggccgcaagcgcacgattgtgccggccttcctgttcactggcgtgttcggtttaatgtatgccttccagacctctaccgtgagcgcaattatcgttggcttcctgctcatgatgtgcctgtacgtgcttatggcttccgtggtggctgtgtacgctccggaactgttcgccaccaaggttcgcttccgttgcgtcggcttcgcgaacgccgtggccaagctgctcaatgtgttgatgccgatggtggtgggctggatgcttacctcgcttggtgccacgtccatctttgtggccatcagcgcgattgctattgcatcgatgctgattgtcggcttctttggcgcggagactgcgcagaagtcggttgggtgatcggtttcctcacagtggaataactgctgataatgtccattcggcgtcttgcgtggtgatatgcagggcgccgttttgttgttctagtaattgtcggtaacggttgagaccggtaccggtggataggtccgcactgccatccgcatccgaatccgatgacgtgcgggccgtgtcgatgcaggcgatgcggacggtgtccagtccgatgccaatcgtcattacatagcccgcttccgggtcggcatgtttggcgatgttgccgtacagttcctccagcagcccggcgatcaggccactccgaccggctgcgccatgagcaccggaaataatcgtctgaccttcaaagccaagctctgataatcggcggtcaccattgctcgcaacatcacgaatttgctcggctagcgggcaatcagcgtctgtgatgccacatgcaatgccagaagcggcatcaacggtcgaatcatgcggagtcactgcactgtgcgccgcttctcccctgccttcaataacatcaatgacctgatgcgtgcgatccaatgcgcccatagccacgctacgcagttcgcgtaattcttcttcagaaggggtcttgccatcggcaatatccttgtcgaatcgcaaaatcaggtatgccaaatcattggatacgtaatcgtgaatgtcctgagctgtgcgttcctgctgacggcggtgagccaactccgctcgagccaagctgcgttcgtgattccatcgcgccgccatgccaccaagcatgaagccaataaacaacacggccactggcatcacaccatagagggcaatcgcaccaagaatcacttgcccagtgcgatgctcggcagaagaaccgctcgattcataggcgcttccggtgaagtcgcttcccgactgccctgcgctgtcagacccactggatgaagagccaccatcagca

SEQ ID NO: 2739 - DNA, 4055 bp, Unknown
  R36_18m  MAG No. k141_12708
atgccatccgaatcggaagagaccacgcggcaaggctccggggtctcgaaaatcatgcccacaatcgacgaacttggcacgattttcgtcaccttcggctggatggtgcggtaggcggggctggtcacaatctccggcgggaaaccggggccgtccagtgaatagacatgctgaatgcgcttgcgcaccttggggtcggcgttcatggccgcgtaaatcgccagattgcctcccttggaatggccgaccagaataatcggaccctcccacagtcgcgccaccgtatccagataggcgctggctgaacgttgcgccggcaccggatactggaaagccatattgaaatcttccttccatccgatgagcgaatcatcggtaccgcggaaggaaataaccaacgtgcctttgtaggtcggcttccggcgcttgtggccgtcgggcagttggaaggtggcggcggcgaattgggtttgctcgccctgattgatgtgctcgaccaccgcgcccaggcgaacgttggcgtagcgggggttctcgcctgcggcctggaacaggtcgtgggtcaggtccggattgaccactgaaaccatttgggcttcgtgcggcttgtcgtcggcatgcgttttcggcgaacgatgcagctcgcggttggcctcgtcaaggcttaccgattcaagctcgggatgccagatacccttcagccagatcagtggatgcttgggctcgaaagcgcgaatgcgtgcggcgaacgagcctgactgcgtctcatccagcatcaacgtcggacagatactggccacatcctcatagatgagcgtggagatgatcaaggcgtcgatttcgttgaacggcaagtcggcgaaggagcgcgtttcggtgtgcgcgtaatcgataatgccggtcatacgcacctcctgcttccgttgatattgcatatccccttgggccatgtggtcttgcgattgcgtgcggccgtgcggctgcgcgcagcaattaaccatatacattccattgtagggattgtacggttttggccggcgcgatcgagcaagactgcaccgacggcgaacaattcgtgggaggattcccgtcagcttgtcgaaaattgtcgggtagcgggggttgcgatgccagccagccgaccaccctccggcgttacgtgccacttcccgccggcgggaggggtaaccactcaatccttttgacgaggcggaccgctggggccgtcaaaggttcggcagatcgaagcgggccagatccacgccttcgtggtcgagcagttcggccttgatgtcgagtcggccgccgtagccgccaaacgcgcggcccgagccgactacgcggtgacagggcacgatgatggtaaccggattgcgcttcactgcgcctccgaccgcctgcgcggccatgcggccgccaccgcgtcgttcggccaattcggcggcgagttcgccgtaacttaccgtcatgccatagggaatctcggccaccagattccacacttcatgttggaatggcgtgccggcgggatgcaacggcggcacctgatccgagccggggcgttcgccgtcgaaataggcggtcagccattcgcgggtcatacggaacacatcgggttcacgatcgggttcgcggttcgagtcgagaacggcttggtggtcggtggcccaccaccagtcttcaagacagagctcggtcaggccctcgccgtccgaggccatcatcatccggccgatgggcgtttcgactgtggcccgcatcagttgtcgttgcgtcataccgccattatcgcgcgttgagggatgaagcccataccgtgcctgatttcatgaaggacgggtcgtgctgtacggtcagtattgcgtgctgggcagcgatatctgacatagtgggggttcttgggccggcatgagtgttctttccgacatcccaaccgtctaactccgtttcgaggggctgatttgggctgttccggaggtctatctccgtttcgaggggctcctcatccgggaaaccacaagtataaacggctccgggctaacgtcattacgccgtttttggcccgtgtctactcagccaccagccccttgaaacgggagtagacctccggagaaggccaaatcagccccttgaaacgcagcgacccctctgattggagtcaatcagaggggttcggcacattgctgatgcagctggtccgccgtccgccttgaggcggaacgtaaccaagattcaggcgggattactccgcaacgagcgccaggaaggcggcggccacggcggctgtcgggttcgggaattcctcgtcctggttgaagaacggcacgtcggcgtagttcaggaacttcacttcggcacggtcgccgatcagggccttggcctcttcggccagctgatcggttatcgtcatgcgttcctgatttccacggccatggccgtgccagatgtgcccatcgcttggttctacccgctgtttatgctggccatgcccatcgcctggctgctgtatacggccaccgcgagttatgtgcacgacggcacccgataatcgttggaaaaccggtgggacacgcgggggcttggctttttcctgagattggcgtatctttgtcacctgttgcccgtgaaggtaacacatgcggacatagcttagttggtaaagcgcaaccttgccaaggttgagaccgcgggttcgagtcccgttgtccgctctcggatggctggttcaggatgattgattcagcctgaggatgacccgggcggttggcgcagtggtagcgcacttccctgacacggaaggggtcacaagttcgaatcttgtatcgcccactcgatgaatcgccggcagaatgttgccggttttttcatcacaagctcgggcgattggcgcagcggctagcgcacttcgttcacaccgaaggggtcgtaggttcgattcctacatcgcccacccgatatcacgctcgtcagtctatgatggcgggcattttctatatctgccgtgccacggttccttatatggcgtccggcctcgggtggcatttggctgtgagcggtttccgattatgagtggcgtccggccgtcgtgcaatcccgctgcgcgcggtgccgtttgggctgtaatacgggtgctttgaaccggccataactgcttcatatgtcccggggcttgtgtcgtgtgccgcggcgcgcttccatagtggatatggcggtgtggaaggggagccgccatacttacttacacaaggacgtcttggtccgccagggcaacgcgcatggaaaggggtttgcgatggtgtgcaccacgctgaatttcgcggagaaatacctgctgaaaaccgaagtcaggttcgttgccggtatgtccggcggtacttccgatgctggtactgatttcgatgtcgatttcggtggcgagggcgacctcggaagcgatcatgccaccggtttcaatcgctcgctatcggccgacgattattgggctgcagccggatatgccgatgagtcattgtattgatggacgtgatgacgcggtaagggcgcgtcgataagtgcggctggtgtcgcggctgatgccgcatctggtgctcgttcggtggtcgcggctgatgttccgtacggaccgcctgcaatggttttgcatcggtggtgcgtcaaaatccggaccgtcgccgacgctgtggacgtttggcggcgttgaaaggacagataatggattgtcaacgccgctgagaacgattggcgacggtggtgggacagcggatgccccaccaccgtcgccaagagtggtacttgtgtcggtggcgtccaaaacatggcccggcaccgacatcagatactctgaacgtcggcggattcccgttctgtgtcccagcgccgacgtctgattcctgcttatgcgagctggcgtcggtaaaaaggcagaacttggttcaccggcgatgtctcagcacgtttgcgcgcgtcggatccttctggagcagcaggaaaacgagcgccgcgacgagcaggacggcgatggagagcacgccgagcgaggcgttgccggtcaggga

SEQ ID NO: 2740 - DNA, 17136 bp, Unknown
  R36_18m  MAG No. k141_12810
gatgccgaccggaatcggctcgaaccgttcagtgtccatggcccccagcacaccggcagtggagatgcaggaaatcgaatgctcgtctgcacgcccaccatagagcaccacaacacgcttcttggccataaccatccttttattgaaactacaaccgttttcaagcctatgctttgcaccgccaaccggaccgaaccgcgctcggaccgccgcgcacaagagacgcacaccagtctactcgcgcacgtcaacgacgtatacgccacacgactttgcacgtacgacgtatacgccacgtatacgtcgcttctctcgttattcgccggtaacctcgtgcccgaacagtccggcaagcatctccgagcaggaaatgccttcgttcagcacgcggctcatctgatacgccaacggggtcggcacatcaagctgctcgccaagagccaccaccgcatccgtggtgggcacgccttcggccacaccgttgctgaccttggtggcctcctcgaccgtcaatcccttgccgagattcgcgccgaacgtatagttacgagacagcggagagccacaggtggcgatgagatcacccacaccggccaagccgaagaaggtcttgggatcggcgccagcagctgcgcccagcgcggtcagttcggccagtccacgagtttcgatcatggctgcggtgttctcaccgtagccggcaccacgggccatgcccacggccagcgcggtcacgttcttcaggctgccgcacatttccaggccgatgacgtcggtggtcacgaacggcttgaaataggaggtggtgcatgcctcggccaccttcgtggcattgtcgaggttcgtgcaagccaccacggtggcggcgggatgacgatcggcgatttccttggacaggttcggtccggaaatggcggcgaaccggtcggccggcaggtcaagggattcgcggacgacttcgtccatacgcttgttggtgccacgctcgatgcccttcatcaggctgacgacgatggcgtgatcgggaatcagtcccttgaattcgacgagtgccactcgcgcgaactgcgcggcgatggccacaaccacgatgtccgcgttcttgacggcttcggcgcgatccccggtggcggtcatgttgtccggcaacttttcgacggacggcaggcgcacggcgttgtggtggcgatcgcgaatgccctcgacaatccgctgctccttggcccacatggtcaccgtgttgccggcgtccgccagcacttggccgaaagcggtaccccatgctcctgcaccgagaaccgttatatttttacccatatcaaattcctaccttcgcttgtcgcgcaacttcatcggcacaatcttgtgccatgctactcgcctaggctccccgtacgggaaccggtgcggctacttctcagccgggaacgggccgccggcttcaggccaaggcttgcgactcatgctgcggtagtcccagtagccttcagcggggaactgttcgccacgaatttcctccagtactgtgttcatgcgtttgagcacgcgccacatcagctcgttcacggcctcggcaggcggttcttcaccccatgagtccatgtcggcaagcagatcggagtaatcgagcgcatggtcatagcacatcaccacgtttttgcgcggccatggccaccagtggttgatggaggcggcaccccacgtcaccgccgggtacagcggcacctgatgccccagtctgcgcgaggattcaagggcgatatatcccacgccctccttaatgctcatcacccactttttcgggtcgcgggtcacggtgccttccggccagaccgtcagcgggcggccggacgtcagaatatcaatcgaggtctcttcgatctgcttggccttgcccgaatgacgctgcaccggctgcatgccgaccaaccggaaccacttgccgatcaatggccacttcgccatctcggccttggccatgtaccgggggcggcggcccatgtggaacaggctcatcatcggcacgaacacatcgaacatggtgatatgactggcggcggtgataaacggtccggtttccggcacctgttccaggccccaggccttggtcttgcagctggcgcggaacacaatggacacccctcccagcagtcgtttggtggccttgggattctgggcgttgatttccggctgattgggcgtgcgagggccggtcgggtaatactgtgtcgagtccacaagcgtgtggcgggcggccagacgcttgacctgctcatcactcagcgggcttacggccgaacgcggcgacggttttcctttggatgccatggtctctattgtggcacggaccaccgcccaacgattccagcgcaacattcccgggaatgtgccgcggaaccacccctcacaccccgcctagcgcgacattcccgggaatgcgtcgcacaatacgcggcggcccgtctgcacacaccatgcgcgcagacgggccgccgggaaaacgttcgaatcactccaccgcgatggcgtcgatctccacgagcgcgcccttgggaatcatgttgttgccaaaggccacgcgggcgggcttgacggagccgatgaacgcctcagcgtaacgtgcgtccacttccttgaagtcctcgacgttcttcaggtagatggtggcgcggcacacatgctcaatgccggtaccggcagtgtcgagaatgtgcttaatattcttcagcgcctgtgcagcctgctctccagcggtctcgcccgccagttcgccggtggccggatcaatgcccagctggccggatacgaacacgaagccattggccttcaccgcctggctgtatgcgcccagcgcggccggcgcctcggaagtggctacggcttccatcttttcgctcatattgtgctccttctcatcttgggggcgcccacctgctgcggccggcgccggtacacatcaccaccggctacgaccaatcgcacgatcagcaacgattggcaatgccgattacgtagcagtctactgagcgaagtcgcgtttagcgcgcatgatgcccggcatacggccatcaacagactattccttgctattccagacgattccagacgattccagacgattcggctaccgttctcgccaaaccggacggtttttccacgacccaagcgagccggcatcaccggccttgccattgccgacaccagcaccagccttgcacgcgccgaatatgcaaaaggcttccggcggttagccgaaagccatgctggtgggcttgatggggatcgaacccacgaccttctgttccggagacagacgctctatccactgagctacaaacccgagcaacttctttactgtacaccacatcacgttgcatgcggcacatacgtcgccaaaataacgagaaaatcgccattatcggctctacaatggggttatgtcggaacctacagatgacttcgaatacgaacgccgcttcttctgccgcgagctgccggcggaatacgacgacggcgacgccccgaccctcatcattcagagctactacgtgcatgccgacaactacgccttgcgcgtgcggctggtctcgcacaaggtgcacgtcgacatgacgcccgacgtaaatccggtggccgtgctggacgaataccgcgaccggttctcggaagcgtatgtcaccgtcaaaggtccgtccgtgggtggcacgcgctacgaggtcgagcgcgagatcgacacgcgcatcgccgccgaactcatcaagcgcggcggctcggtaatcatcaagaaccggtattccgtgtggattgcggaagacggctggagcgtggacgtgttcggcgggccgaacgcgccgctcatcgtagccgaggccgaacgatccgggccggttaccaatctgacgattccgaaattctgcatcaccgaaatcaccgatcaggcgcgattcaataacgatggtctcgccaaccgtccgttctgtaagtgggcggacgatttcgaggaggagctggcgctggaggggccaaggttccagcagtatttcgggaagaatcggatggtttaggggaagcagccaagtacgctcgcgcgctcctctcagtcatctacgcctgacagctcctctcaaagaggggagccaaaaccaatcagtacatgagggtggctaggcgacggcgggcgcgagccagacgcgggtcggtgggttcggggatggcgaagtattcgagcagacgcttgcgaacctgctcgatatcggccttgtgcccggcggccaaaaagtccagcaaacggtcgaaagcgtcttgaatctggccaccgatcatgtcgatatcagccacagccaactgcgcttccacatcgtccggcgctgcggcggcagcggcacgcacgtcacgtacatcagcggacccggagcgggccagcaacagcgccttcgcacgttcgcgggcggccagtgcatcggacgggtcggattcgagcacgcgctcgtattcggcggcggcaccggcgtaatcgccctcctcggccaaacgatgggcttcggcatgctccggcggcacctgctcagcacccacgccggcaccggtggcaccagcgctcttggcggcatcggaatcaggatcacccgagtacggcgcggtaccgttcacaccagactgcgcggcggcctgaatgatcttcggaatcacctcgtcggtaagttgcttgagctcgtcgtcacccggaaggccctgcaacagtggcatcggacggccggcaatcaacgcgaacagtgcgggcgcgccctgcacctgcaacgcttgggcaatcgaaggattggacgagatatcgatacgggagagctgaatctggccgttcagggcgttcaccgcgtcgcccaacgcacgggccatcgggaacaggcggtcatcggtcggtatccacaggagcagcaggatcgggaaggtcgcagaagtctgcaccattgcctggaaggtgttttcggtggtgtcgatcacgtacccaccagcggcaggagcgccacccgcctggccgggctcggccttgacctgatgcttcagcgcctccaaatcgacggcgcccgccaatgagactcccggattgaactgctgctctgccataatgcctcccgattccacgcgattcgcgtacaacaacaatcacatttgctgacattgattgtaatgccgattcccaccacgtagggattcttccactacgcggtgaaattcccaccacgtagcaaaacgcccaccacgatgtgactcaaaacggcaccattgtgcgaaaggtaaaacttaccgacatcgtggtggatgaatcatatcgtggtggggcgttaaccgcgcggtgggcggcggcaacaactacagcgcttcgacctttaccggctgacggtcggcacccacggcggtgatttgctcaccggagcttgccaacggaatgtacaaggccaccacgttcacatacgtgaccttcatggtgctggtgtacttgtcgctattgaacagcgccttctcgtcgtcggaagccggctgcgattcgcggccatcccccgccttgcgagtccattcgccgttaatacggccaaccaccaaatcaccggcaccgtctgcagcacgcatcacccacatctgttcaggtacaacggtgaatttctgctcctgcgtaccgttgttgcgttgcataccttcctgcaccttggccgtggtattggccagttcctggcgcagcaaatcgtctgcgaacttggaagcgtattggctcttggagccgttctgcagcacatcggcgtattgggtcaaggcatcggcgggagtggccaccagcttctcatcctttgcagtgcccatctgcgagccaatagtcggaatctcgaacttcggcagcttggccccctcaaacagtcgagccatggccatcagcttgtaattctgctgggcggattcctgatcgaagaccagcaaacgcttggactgctgatcttcggtggtggtcgtgatggtgaacaccgagcgaggccatccgtcgtccatgggaatcaccgtctgggcgatgtccttgggaatggtcgcgtatttggacataccgccgccgcgctggttgatcgtggtctggctgatgcgaatgtccagctggggcccgcccataacggccgcatatccatcgggattcttggcctgatcggcttcatcgatcgtcttgagaatcttcaggcgaatcttcttctcctgtgcctcggtcaaatccggcgcaaccttggtggaggtatcagcagccggcgtcggcagccggccttcacaggcggtcaacggcacgaccaacgccacgcaggcgagggcggccacacacagtttgttccatcgcttgttcatcagctttcctcctgtccgtcatcggccgagtcgtctccggtattgacctcttgggccaagcgggagaagtaggcctgcagttcgtcaggggtgattaccgaagtcgattcgttatcgccggcgctgaagccggtctcagcgccgctctcggcaccggtctgctggtcggcgaccaggttacgtgaacttgggtcgatgataaccggtgtttcggtggcttcagattgcgaggacgcacggcccgaacgccgatttgtggcgtggcggcgacgattacgtcgacttgcaccatccggcttcccggacactgcgatgctggcgggtgcctcttcctcgattacggcgcttgccgtgccttccaccatgcgcttgcggcgcttatgcggcggcatggcgaacacggaggcgcacagtacggccagcacggccagcaatccaccggacagatagaacggcatcgcaaagtccggcacttcggagcgcacccagtgcagctgcaccttggcgttggtggcattttcacccaaatccacaatggccaccgtcgaggcgccggtcttcttgctctccagagaaacggacccggtgccgcatttcacggcagtccacatatcggaatccttgaacgccaccgcgtcatcggcactggcaggcgctccctgactcgtgctgcttcccttctgggtgctcagctcgctccatgacgccaatccggtgatacgggtataggacttctcggacgcgacccatccggcaacatccttggacggacccaacgccacgcacgcctcgtcctgagaggatcccgagtccacggttatcgtggcgttctgatccaacaaggtcagcacattcggatcagtgacggcataccgggagccgctcatggttgcggaagcggtgatttcagtggagggcttccatatcgtggcattcatgtaccccaacaccacagccgccacggccaatagaccgaagataggcgtcaccactccacgcatgatcttggcatgacgggatggacgcttggcgcccttatccggtcttgtagtctgttcttcagcactcataacttaaccattctacaatcttcacctgtttattacctaggagcgcagaaaatcaaggttcaccagtagggtggtgtgtcatgcgtaagtctgttaaatctatgttatcccctctcggcaaggccgttgctcttgcctgctcgctggcgatgtgcgtatcgctggctgcctgctccagttcgagctcggactcgaaatcctcttccggctcttctgacaagaaggggcaaattgccggcgtgaccgccaagggcaagctcggcgagaagccgaccatctcctttaatacgccgatgaccgtgtccgacggctcctatgtggtgctgcaaaagggcgatggcgacgtaatcgaggagggcgaccgcgtctgcgcccaaggcatcgcgctcaacgttaaagacggcaccgagctcatggacacctggaccaagaacacgccggattgctcgctgaaggtggattccaagaccctctcctcgacctactacaaccagatcaagggtgccaagatcaacaccacgatcggctttggcgtcaacgctcaggattcgtccggatactcttacattttggcgatgacgtttgtatccaagtccaaggacctgaagaaggccactggcgaggaagtcaaggatgtgccggccaatctgccgaaggtgacgcgagccaagaatggcaagccgtccattgacatgaacggtcagggttcggttgattcgctgatctcgcagacgctgatcaagggtaacggcgccaagctgaccgacaagaacaccgtggtggtcaagtacaccggttggcttacggatggcaagcagttcgattcgtcctgggatcgcgattccacaatcgacgccgatctgttcagcgattccagcggccagcatcaggttatcgagggctggcagaagggtctggtcggccagaccgtcggctctcaggttctgctggtgattccgccggatcaggcctatggagataaggagcaaggttcgattcccgccaactccacgttggtcttcgtaatcgatattctcgccgcgtactaaacaatctcgatggctctccccaagaggggagctggcagcgaaactgactgaggggaggcctcacggaatataccgtgaggcctcccctcagtctctctatgtacgttcgaaaactccccttcaagagggaagccaagaacaatcagaacagcctgagactgtcgtcctcggtgcctttcatatcgtcgtaatcgaggatgaggcaggtgaagccgcggtccttggccaagacctgggcttgcggcgtgatggtttgtgcggcgaagatgccgtgcaccggggccagcagcggatctcgattgagcagttcgcagtagcgagtcagctgctcgacgccatcaatgccgccgtgacgtttgatttccacagccacatgctcgccctcggcattcacggccatgatatccaccggaccaatggcggtagggtattcgcgacgcaccagcttggctcccttgccgatacgctcgatctgctcggccagatagcgttgcagatggtcttccacgccatccttgatgagacccggatcttcgcccagatcataggtttggtcggaatagatgtgttgcagcgtcacttcaagaatgtcagagcccttgtcggcgctgacacgtagcaccttttccggcccaccagcggcgacactttccggggaatgcgtcgcggaatcaccatccacagccccaccagcgacactttcccgggaatgttgcgcggatttggcggctgggtcgatctcacgaatcgtgcagggcgcggtcatccagttcagcggcttgtaggagcccaattcggagaaaatcaacaggctggaatcggccttgatcagcaatacgcgcttggccaggggcagtgaggcgttgaggcggcccgaatactcggccgaacagtcggcaacaataactcgcataggccaccactgtagcgcaacacatggcatacatagcaaaaggggctctctggaaaaccagagagccccttgaggagttggttcagatcactcggcggtgccggagtactggacgtcgtggccgcgctcgaccgccacggtgagtttgttcgagtcgaaggagatgaatccgtcggtcacctcgaacatgtggcgatcgccatcgggctcaaccacggtgagcgtaccctgcttgatcaccgtgagcacaggctcatggtcgggcaggatgcccatgccgccctcagaggcgggaatggtcacgctcgtcgcctcgccgtgccacacagggtggtcagcggcgacgatgttgaccttcatcgtggttttttccgcagccatcacgcacccagttccttctgcatgttgtgccacttctcttcgagatcatcgatgccgccgataccggagaacgcctgctccgggacgtcgtcgtacacgccgtcgcagatgcgggtgaaggcttcgatggtctcgtcggccggcacgtaggagccggggcgaccggtgaacttctcggcaacgtagaagttctggccgaggaactgctcgatcttacgagcgcggttcacggtggtcttgtcctcttcgccgagctcgtcgataccgatcaaggcgatgatgtcctgcagctccttgttacgctgcagaatcgccttgacgcggttggcgcagtcgtagtgagcctggcccacgtaacgcggatcgaggattcgcgaggtggagctcagcgggtccacagccgggtagatacccttggaggcaatgtcacgagacagctcggtggttgcatccaagtgggcgaaggtcgtggccggggccgggtcggtgtaatcatcggccggcacgtagatggcctgcagcgaggtgatcgagtgaccacgggtcgaggtgatgcgctcctggagggaacccatctcatcggccaggttcggctggtaacccacggcggaaggcatacgccccagcagggtggacacctcggaaccggcctgggtgaagcggaagatgttgtcgatgaacagcagcacgtcctggttctgcacgtcacggaagtactctgccatggtcagtgcggtcagcgggacacgcagacgggtacccggctgctcatccatctggccgaagaccagtgcggtcttctcaagcacgccggcctcggccatttcgccgatcagatcgttaccctcacgggtacgctcgccgacgcccgcgaacacggacacgccaccgtggttctgagccacgcgctgaatcatttcctgaatcagcacggtcttgcccacacctgcaccaccgaacagaccgatcttgccgccctgcacgtacggggtcagcaggtcgatgaccttgatgcccgtttcgaacatctgggtcttggactccagctgatcgaaggccggcgggttgcggtggataggccaacgctcggagacggtgatggtctcatccggcttcttgttgaggatgttaccggacacgtcgaagacgtggcccttggtcacgtcgccgaccggcacggagatcggggcgccggtgtcggagacggaggcaccacggaccaggccgtcggtgggcttcagagcgacgcaacggaccgtggaatcaccgaggtgctgttcgacctcgagggtgatctcggtctccttcgcctcgccttcttccttggcgccggtgttgacgatcgttactttcagggcgttgtagatgtcgggcagatgacccaccgggaattcaacgtcgataaccgagccctggacgcgggtgacgcgaccgttggtaggctcggccgcagtggtctggttgtcagccatatgcgttcctactcttccttcttggtcagcgcgtcagcgctgccgatgatttcggtaagttcctgggtgatcgaggcctggcgggaagcgttgagcttgcgcgtaaggtcgtcgatcaggtttcgtgcgttgtcggttgccgtgtgcatggcgttctggcggcttgcggtttccgacgcggccgcggtcagcaggcactcgtggatgcgggactgaatgtacttcggcagaatcgcgtccagtaccttttcgaggctgggctcgaaagtgtacagcggagcgacatccgcagtagccggtgcctcttcatcaggatcgggcaccttggtctcgtttttcacgatttcgaccggcagcatgcgcagcacgcgcaccttttgcaccaccatgttgatgaactcggtgtagacgatgtagagttcggaaactccacctttctcagccggcttcatgtaggcgtccatcaaagtgttggagatcgtttcagcaatttccacgccgggctggtcggtgtcgccttcccacgtcgccgcgatgtcacgattacggtacttgtagtacgtcgaaccgcgacgcccgtacacgaacagctccggctgcttgcctgccgcatcgaggcgggacagcagcgactccgtttcacggataatcgaagaggtgtacgggccggccataccacgatccgaggtgagggcgagaacagccacgcgcgggttcttctcgtccttcaccgcgatcggatgcgtgatatgggtgtgggccaccaacgcttgcacggcatcgaaaatcgcatcggtgtacggcttcgcgttcagggccacatcacgggccttggcgatatgcgaagacgcgatcatctcctgagcgttgaagatcttcgccaacgactcggtggagcggatgcgtgatttcaatgcgagttgcgagcccatggcttacttttctcccgccacgatcttttcctgatcgaccggcgcggccttgtcaacgtccggcttcttctcgaccagcggcttgccggcggaagagacgaacgtcgaacggaactcgtccacggccttatcgagggcagcctcggtgtcggcggtgaattcctcggtctcgcgaatggtcttgaggatatcggtgttgtggtcgatgtagtccagcagtccctgctcgaacggaaggacgtccttcaggtcgaggtcgtcgagcttgccgtgggtgccggtccatacggacacgacttcctgttccggcgagtacgggtggaactgcggctgcttcaacagctcggtcaggtgggcaccacgggtcagctgggccttggaagccgcatccagatcggaggcgaacatggcgaaggattccagcgaacggtactgtgccagggagatcttcagcgtaccggagaccttcttcagagccttggtctgtgcggcgccaccgactcgagagacggagataccgacgtccacggcggggcgctggttggcgttgaacagatcggactgcaggaagatctggccgtcagtgatggagatcacgttggtcgggatgtaggcggacacatcgttcgccttggtctcgacgatcggcagacccgtcatcgaaccgccgccgagatcatcggagaccttggcgcaacgttcgagcaggcgggagtgcaggtagaacacatcacccgggtaggcttcacgccccggcgggcggcgcagcagcagggaaatcgaacgataggcctctgcctgcttggacaagtcatcgaagacgatgagcacatgcttgccgttgtacatccagtgctggccgatggccgagccggtgtacggggcgatgtacttgaagccagcggaatcggctgccggggaggccacgatggtggtgtactccatggcgccggcgtcttccaggctctgcttcaccgaggcgatggtggagcccttctggccgatggccacgtagatgcagcggacctgcttcttcgggtcgccggattcccagttggccttctggttgatgatggtatcgatcgcgatggcggtcttaccggtctggcggtcgccgatgatgagctggcgctggccgcggccgatcggggtcatcgcgtcgatggccttgaggccggtggacagcggctcgtcgaccgggtggcggtgcatcacgtcgggggcctgggcttcgaggatacgacgaccctcaatgccctggatctcgccgaggccgtcgatcggcttgcccagcgggtccacgacacggccgagatagccgtcgccgacgggcacggagagcacttcgccggtgcgtcgcacttcctggccttcctcaattcctgcgaaatcgccgaggaccaccacgccgatctcacgggcgtcaaggttgaacgccaggccgagcgtgccgtcttcgaacgtcagcagctcattggccatgcaaccaggcaatcccgtcacgtgcgcaatgccgtcaccggccgtggcgacatagcccacttcctgggtgggggtgtcgctcggcttgtacgacgacacgaagtcgtcgagggccttgcgaatcgaggcgggatcgatggtcagttctgccatgatcactccttctattggttattgttcagtcaagtctttgcttgtgtgtggtgttggacggattggctcggccggtcaggccggagtcgcctccgtctgcaccttgcgatgcaggttctgcagctgtgcgaccacggtgttgtccgtgacttcgtcgcccacctgaatgcgcatgccacccagtacggtcggatcgaccaccgagttgatgtgcacctggcggcccaccttggcggagtagacctcgaccagtcgctcaatctgctccttcttcagcggggtggcggtggtcacggtgaccatcgactcgcccatgtggcgggagaacttgttgatcagccactggatggtctccaagtagcggcggcggcgcaggttgcaggtggcgtgttcggcgagcctcatggtgaccttgttcagggtcttgccggagaacacctcgcggaacagcttcacacgggcctcgctggtggcctggtagtcgtacagcttggagcggacgaccggcaggttcagcagtgcggaatgcagctcggacagctcgatggatacctgcagcgtggcgtcggtggcgtcagcgtagtacatcatggcgtccacgccgaagtcctccaccgcgttggcgatgtcgcgcgcacggctccaacggcgggagaccaagtcggtcatgatctccatggtcataggatgcgcgttgtcaccgagcagtcccttcaggacggccaccttgtcggcgaccgggcgggacgggtcggtcagtgcgcgttccagctgaatgctgtcatcgagcaccttggtgatcgtgaacagttcgttgccgatccgccacgcgtcctcacgggtgtcgcgcagtttcggggccagcgaatcacgcgactcgcggtctgcaatacgtgatgcctctcctcgcatggtcacctccctttctggttacggatggtcacggtcacttcttggcgcccaggtcgtcgatcatcgaatcgatcatcgaggactgcacgtcgttgtcttccagcttggcaccgaggatcttgccggcaagcgcggtggcaagagcaccgacctcgcccttgagcgagacgatggcctgctgctgctgggattcgatcgagcgctgtgcggatgcggtgatttgagccgcatcggactcggcgcgggaacgagcgtcggcgatgatgtgggacgcttctgcgcgggcgtcgtcgcgaatcttggcggcgtccacacgggcggtgctcagctgggcctcatacttggccttggcctcgtcggcgtccttcttagcctgctccgccttggcgatgttgccctgaatcttggcggcgcgctcgtcgaagatcgcattgaacttcggcatgaagaacttgtagaagaacaccgcaacgatgacaagaatgatcagggaccacacaatgtcataggtctcgggaatgaacagatcaattccgccttctgcgagcgtcattatgaagtcctcctttcactggtggattcgttttgccttctgtattcgactgagaaaacgttcgatcagtggaacatcagggcggtaacgaagccgatccgtgccagcacctcgatcagagccaggccgatgaacatgatggtctgaatcttgccggacatctcaggctgacgagcggtggattccatggccttgccgaagaggatgcccagaccgatgccagggccaaccgcaccgagaccgtaaccgatgacggacaggttgccggcgaccgctgcgagggtgatgatatccattgtgtttcctttctaacgtacttggcgacgttataaatcttatttcgttcggtcctgcctacctaggcgaggccgggttccgaaagagggggttgaacctcactcctccgggaagcttaggttgatgtacacggtggaaagaatggcgaagacgtaagcctgcaggaaggcgacgaacgcctcgaagcacgtcatggcaagaccgctgacgaaccacatcgcgccgactgggatgccttgcagcttgttggctgcatcgacgatccagtactgtgcgaatgccaggcaggtggcgaccatcaggtggccggaaatcatgttggcgaacagacggatggtcagggaggccggacggatgaccagcaactcaaggatgttaatcggggtcaacaggatgtagaccggccacggcacaccgggggtgaacagctcgtgacgcagataatggccaagaccttgcgaacgtgcggcggcgatccaatactggaccatggtccagatggcgaacaccagcggcatgaccacagtggcggtggccgccatgttcatacccgggatgatgccacacaggttgaagatgaaaatcgtgaagaagatggtggtgatcatcggcacgtagcgcttgccgcgaacctcgcccatcacgtcatagacgaccttgtcacgcacgaagtcaagaccgtattccaccacgccctgccaacggccggggatgagcttggcgcgctttgcggtaagcccaagcaccaccagcagcacgaaggtggccacgatgcggatcagaataatgcggttgatggcaaacggagttccctggaacagaatctctgggggaaggaagtcgttgaccgagggcagatgagcaccctcgtccgccaacagcaatcctgcgctgagcgaaccgaccatatcacgcctcctgcttcttcaatatcaggtgtcagtttaaacccaccgggcaggcaaatgtgacgtgctcgttactttcgtctcctcggtgtggagtctgccgggcgcggacacggagtctgcgctgggcattcggctccgaatgactgaagagtgattatttgcctgcgtctagacaatgtcaatactacaccggcgcgtcttctggaatcggcggcggcgcaaggtttttcggatgttgcgcaagcgttgtgcgctattagtcataatacgaggatgtgcggcatttgcgctaccctctgatcactccgtatccgtcgtgggcgaacggcttgaaatcatcctggcgcggcccgcccggctcatgccgaatcgaacgatcagtaccgagcttcttctcagccctgagctgcggcacctcggtcaggtcgtacggcgtggtctggtacacccagttgagccagttgcgccacagcagattggcgtgggcacgccagacgaacaacggttccagcttcggatcgtcatgcgggaagtagttcttcgggaagggcacgttggtcatgcccttggccatatcgcgctcgtattcctcggcgagcgtgtacttgccgtactcccaatggccgagcgcgaaca

SEQ ID NO: 2741 - DNA, 2836 bp, Unknown
  R36_18m  MAG No. k141_12813
tacgtcgaacacggcgaagccgatgatctggccggtggtgatggtcaggatcgagccgaagaggatcgactgcatctgctgggaggcggaactcgacaatcgcgcgaagaacagacccaagccggtggcgaaggccagtacggtgccggttgcgatttcacgctcggaaacgcgcttgcccaaagcaccgatcaccagtgcgccgcccagtgcgaacacgcccatgcccagtgatacgggcaggccgagcaacaccgcgccggtcgcgcccggcagaccgatatgggccagcgcatgggccgcgaaggtggaacgacgggcgatggtgaagtatcccatgacaccggcggccagggcaatgcacaggccggcgatgaaggcgttggtcatgaatggagcggacagtgtgtccagccattcgggatcatacgaaaagttgatggtgctcatgtccctgtattttctccatgcctgagctgcagcccgttgacgggctgtggatcggctagcttgatgttatcgattctcggcgctgttggcggcactgccattggtggcgttgccgtgctcgtgatggtgcaattgcgccacttcggctgccgtgtgcatatcctgcggctggtcctggagctcatccggcgtcggggtcacgaacatgtctccctgcggagtggtgaccacctgcacctgtgtgccgtagaggtgggtgagtaggtcggagtcgagcactttgtgcatatcggcgtagtgcgggtgaccgtcgagcaagtagacggcaccggtcagaatcggcaagagcatattgagatcgtgcgcaaccacctggatggtcatgttcagttcacggttcagcttggccagcacgtgtacggtggcgcgttgactggccagatcgaggttggccaacggctcgtcaagcatcagcagttgtggatcgcacaccaacgcctgggcgatggccacacgctggcgcaaaccgccggacagttcggacagacggtactgcgccttgtcggcgatgccggtgaactccatcgcctcgagcgttttggctttctgggccttggtgatggggtggatgccgaatcgggtgccggtcaggcccagcaacacggattgttcggcggtgagattggaatcgacattcgccacatagctctgcggcacatatccgatgcgtttgttcatctcgcctgcgggcttgcccagtacggtcaggctgccatggcaaagcggcaaaagtcccagctcggccctcatcatcgtggttttgccggtgccgttggtgccgacgatggccgtgaccgaaccggtgggaatggcaaaggtgccatgctgccagatgatatggtcaccacgcttgatggcggcatcgctgaacacgatgcaatcggaagtttcactcataacgcccgattgtggcaaacgatgctgacaatcgttctcaatatcgtgtacggatggtgacaaccaaagaaaagggttgtgcggccatctcgacaatggtcgcacaacccttctcgtgcaaggcgtctattggcattggcacgaatccgatgccggtgtcctttgcttctaactatttgccggagtcggtctggtcgttgccggaggcatcgccggaattgccattggaggcatcggcctttgccgaatcctgagacgaatcactggatgtggccgccttgcactgacggatgtacttgggctccgtgctggaaccggtgctggccttggaatcttgcgcattggcatcatccgtggcggcgccgtcggcgctggaatcatcggaattcgcgttgccgtccgtggcgtcttcgcagccatagctcggatccaccgcgtcgatgatggtgttgatgagctggttgatccaggcgttcagcgtgtcggtatccttgggcatttgttcggagacgtcgactaccggcacatcggcacgaccggcagcgccagtgatcatattggtcgcgtcactggcttcctgcgtgttgttgaccagcacatccacgcccttgtcttcgatgagtttctggaaagactgcaggtccgcgggggccggttcgccgccggaagcggtcgattgcgtataccccttgggcgtctgattcttgaacccgagatcggccatcagataatagaccacgggttcggtggctgcataggtgaggtcggagtgggatctggtgaactcggacgcccatgtttccagcgatttctcatccgcctgccatgccttgagccgcttctggaaggccttcttcttgctggggagtgcctttatatatgcatcggtgatggccgtggccatgctggatcgagcgtctttggagaaccacagatgcgggttatcgccctcgacggcacccatgacggaagcggcggatacgatattcgtggtcttggtcatcgatttggtggcccaggaatcgtaacccgcgccgttggccacgatgatctgggccttggacagcttggcgacgtccgaggtctttggctcgaaatcgtgggcatccacattggtggagttcacgatggacgtgacttccacgtcatcgccgcccagctcggcggccagcgagccccattgattgagggaggcgaccacattgatcggcccggtcggtgcgggaacactggtcttgttgtccggctcggtttcagtgggggaggtggctgcgcatgcggcggtcgcgaacaacaggacggcgctcaggccggctgcggcgagtcgcgtaagtcgtgtgatttgagtccccatggcacgccttcttcgtgagagcgaacgatatataatcctgacttgttccaacgatagcctatcgtttcgatagaa

SEQ ID NO: 2742 - DNA, 7378 bp, Unknown
  R36_18m  MAG No. k141_12908
ctgaagctcaccgcttccgatggcgagaaggaaggctccaaggaaatcaccgttcacggcatcccctctgacggtaccgtgaacgtagccccgcagtcgagcgcctctgccagctacaccaacggctaccagccgaaggacaacgccaagaaggtcatcgacggtcaggtggtatacaccaacacgccgaacgagacctggaacaactggggcgacaacactggtgtggagccgtggctgcaactgaagtgggccggcaaggtgccactgaagaaggccaaggtcttcttctggaccgatggcggtggcgtgccgatggcctcatcttggaagctccagtacgctgacgctgacggtaactggcaggatgtgaagctggctgacggccagtcctacacggtcaatcagaacgaaggcaacgaagtgaagttcgccgacaccgtcgaaaccgacaagctgcgcgtggtcttcccgaagggcgccatcgtgggtgcttccgagttcgaggcgtacgccatcgagccggtgagcgtggacgaagtcaaccgactggtgcagaccggttccaaggccgatgatctgaagctgccctccaccgtgagcgccgtatacaccgacggttctcgccgtgacctcgccgtcacgtgggataaggtgaccgacgctcagctggccgccgatgccgtattcgatgtcaagggcaccgtcgccggtgcgctgaacggtacggttgcacacatcgcggctcgttccgataccgcatcgcagaccgtgggtaatgcgcagccggttgagcagaccgtctaccagaacgccaagtccatcgacctgcccgccacggttccggtgaagttcccgaacggatacaacgacgaccgcaaggtcacgtggaaggatgccgacatcaaggccatcgacctgaccaaggttggtgactacgaggtggctggtaccgtcgacgacggttcgtcttccgcagctgccaagctcactgtccacgtggttgccgacccgaacggttcctccactcctgagcctgagcctgagccgttggtcggttggattgaaggcaaggcgaccaagaccaccatttcgcctgattccgaggcgacctggtcaccggccgaaggcaagctcaacgacggcgtagtcgtcgatgatacttggccgaccacggatgatcagaacgtcaacgacaaggtctggggttcttggggcaaggcaaaggacggcatgtacgcccagtacgacttcggtcagtccgtgaccgttgaccagagccgcgcccagttctgggccaacttcgctgagactgacgattcgaagggtggtctggaagtcccggacgcttggaagattcagtacctcgccgaggatggttcttggaaggatgtcgagcccaccgaggattacaccattgtgcgtaactcgccggcttctcgtgcggataccgatgccaaaggttggagcactgtgaccttcaagccggtcgccaccaagtcgctgcgactcgtgctcactccgcacaccggcagcagcaccttcggggccgccgtggccgagtggggcgtgcatggtattgacggcaccgagcctgaacctaccccggtcgacaagaccgcgctcgagtcggctcttgacacagccaacggcctcgatgcaagccgctacaccgccgcttcatgggctgagttccagcaaatcattgacgctgcccaggctgtgtacgacgatgccaacgccaccgcagaacaggtcgccgagcaggtgaccaagctcgaggacggccagaaggcactcgttgcgctcgccaccgacgtggagaagtccacgttgcaggcggccatcgatgcggccaaagccgaggccgcttccggcaagtacacggataagagtgtcgaggccttgaacaaggccatcgaggctgcggaaggtgtgctcaaggtcggtgaggtcggtgaggtcactcaggccgccgtccaggaagcgtccgcttcgctgaacaaggccgtcaaggccttggaagagaagcccgccgccgaaacggtgaagaaggagtccctcgaggcttccatcgagcaggccaagaaggctgacaagtcgaagtacaccgaggaggcatggcaggctctgcagagccagattgccgccgctcagaaggtgtacgacgacaaggatgccaagcaggccgatgtcgatgccgcacaggatgcccttgacaaggcattttgggccaccaaggttgagcagaagcccggctcccagcagcctggtgtgaccgacactgataaggatgataaggacaacaagggtgatcgtgtgcctccgactggtgccgcggtttccgtagttgctgcggctgccgtgctgctcaccgccgcaggcgtgaccatcctgaagcgtcgccagtccggcgaccacggttcggctcgccactcggcctgacccgcaacggagtcattctgccgagtgagccccctcacagagggggctctagccttttccttctacccatcattactcttttcactcactcaatgaggagcactatgagtttccatgtatccgcgcaatcggttcgcgcggtggccggtggactcgtcgccgcagcgacattgctgtcaggccttgcccttgcgccgaccgcaatggccgccgattcagccaccgctgacaacgcgcccagcgttgccggtcacgcgtataacgaactgccgtataacaatcctgatgtcaccgtcacccaaatcgacaatagcgcactgcccagctacatgcgcaaccccatcgggcagaacgagggtattgacaccccgaacgatctttcgcagaactactactctgcagatgcatccgcgctgagctatgacggcaaactcttcgtcttcaccggtcacgatgaggcttcgcccgactacggctccttcaacatgaaggactggggcgtatacgtcaccgatgaagacggcctgaatcaaggcaaatggacacattacaagaccatcgccaaggcagacctgttcagctgggccaccggcgatggcgcgtacgccggccaagtcgtagccgacgataacggcaccccgagcgacacttccgatgattggttctactactacgtgccggtgaaggacaaggcttctgaggcggctggacaggacccgttcgccatcggcgtggccaagtcgaagagtccgctcggcccgtggaaggatgccatcggcaagccgctgctcaccacatcgcaaacccagattgaaaccatcgatccggcattctttgtggacgaggatggcaccggatatttgcactttggtacgttcggcactcagctcgccatcaagatgaagaaggacgccacaaccggccgcacctcatacaccgaggtggaaaccaaggctgatggcaccacgccgaacctccacaccatgaaggacgcggacagcaacgcgaacggcccgaagggattcttcgaggcggcgtgggtgttccgtaagggcgatacctattacaacgtgtacgacggcggtaagcccggttcgggcacggccacctgcgtggaatcgaactatcaagcttgcatccagtactccacttccgacagcccgctcggcccatggaagtaccaaggcgtaatcgtgccttctggctcggccaccacgatgcacccctcggtgctccagttcggcgacaaatggtatgtgacctatcacaccggcgacaaggaaggcggcaccgatttccgccgtgccgtgtgcattgatgaagtcgattggaccgccgacggccagatggtttccaccgcccatccaaccaaggccgagaaaacgcagccctccaccaacgtggctccgtacgcaaaggtgagcgccacgttcactgaaacgcctgcttggaagggttcggtgaacgacggccgtgtgttgcaaaccgctgtggtcccgccgaatcactggaccaactaccgttctatcccgcaatcgcagtccggcgattctctggtctaccaatgggatggcactgtgcgcgtcaactcgtctaaggtttggttcgacgtggattccaacgctctgcgcgcgcccgcctcgtggaagattcagtacttggacgcggacggcacatggaaggatgtcaccaacccgagtgcctatacaacgaccacaggcaaggccaaccccaacgccgtcaccttcgatgcggtgaccactactgccttaaagctcgacatgaccggtcaagctgtggatggcggctatgcctccgtggccgttgctgaatgggaagtcggctccgactccagcgaatcgccggcaatcactgcgccgaagagcgtgaccaccgccaccggtactgcgcctactctgccggccacagtggatgtgaagtacgggaacccaactgttgcctccccagtaatttggcgtccagttgatgcttcctcgtatgccaaggtcggttcgtttacggcctacggcgtggtcgccggcgtgcccggtgaggcaagcgagcagggcaatgtgtcggtaaatgtcaccgtgcaggacggctaccagcctgccgctgataccacgaagccgactgtaaccgttgccgttactgctaacgcaggcaatagcgagtggctcaccaccgctccgttcgccaccgtgcaggccacggacgacaccgcacctatcgccaagctggagatttccgctgatcaaggcaagagctggaccaccatcgccgcgaatgcaaacgcggccattgccacgctttcccagcagggcgatgtcgaagtgtgggctcgcgccaccgatcaggccggcaacgtttccgacgtggccaaggccggcggcaaggtggactccgccgcgccaaccgtgaccgccgccgccgataaggaggagcgcacgctgaccttgaccgctgatgacggcaccggttccggtgtcgcatcaattgaataccgcattggcacagacggtcaatgggccacgtacagcaagccgattgctgcaccgagcgcgtcgcgcgccaccgtgtactaccgcgccaccgataaggccggcaacgtgtccgcttcggcgaaaaccgacattccatccgacacttccgtgccgctgaccggctacattgagggcgatgccaccgccaccgatgtggacggcaaggcatccggctgggtcaagggtgccgccgcgttgaacgacggcaagatcattcccgatatcaccattgccaacgaggatgtctggggcacttggcccaacaccggtgagatgcgcctcgactacgagtgggaccgtgaagtgactatcgactctagccgcgtgcaattcacctcggatgatggcggattgggtattccggcatcgtgggaattgcagtactgggacgccttggcgaacaacggtgccggcaacttcgtggatattcccgacgccacctacactgtgaccgccaattcaccgtctgctggctgggccaccggcgatgccaaggggtggtctgatggcacgtggaacactccggtcaagactaccaagttgcgtatggttatcacgtccggctcggcttctccggctgttgccgaatggcaggttcatgccattgacgacagtacgcctgagccgcctgagcccacaccgatcgacaagaccgagctcaagcaggcgctcgctgactcgcctaaggctgacgatgcctccaagtacaccgagacttcatgggcggagtacgcggcggtattggattcggcgcagcaggtgtataaggctgaggatgccaccgaagctgcggtggtggatgccgcaacccagctgaagcaggcagcgaagaagctggtgcttgtagctacggtgcaagatcgtgccgcgctgagcgctcagctcgatgccgctgctgccgtggatcgcacaaagtggactgatgaatcgctggccgtgcttgattcggcagtcgctacggcgaatgcgctgacgagtgatggtcaggccgcccagtctgacgtacaggctgcgactgaggcaatcagcgatgccatcgcgggtctggttgagaagagcaccacgaagcctggccagggtggcgataagcccggttccggcacggacaagcccaaccaaggcaacgattccaaccagaacaagggtgatgcagactccggcaagcacaagaagatacctgacaccggtgcagccgtgcttggtgttggcatcctcgccgtggtacttgctgttgcgggtgtaatcatcctcaagcgccgcaagtccggtacctgctagtcccactcgctcggcctagcatcaccaagcccccgcgcatgaacagcgggggcttcacttttgttcaataacaagcattatgtgcgcgtatgagactacgatggtggggaatctacgaacaggggcagcaatgacggcatacatggaccataaggatctcgccaacgaagttatcgatcaggcgcgcgcacaagagattactgatggtgtgcatcgcgtgcttgaccggattgcctcagcggagtccgcagccgggcgtgctgccggttcggtccaattgctggctgccaccaagacgcgcgatgtcggcgagattctggcggctatcgatgctggtattcgcgtgattggtgagaatcgtccacaggagattactgtcaaggctgacggtctggcaaaacgactgggggagcgtggttattcgctaggcgtgattgatgccgctgaggctgacacggccaatgccgcagctgcaacgcatattcctttccatctcatcggccaattgcaagccaataaaatcggcaaggtgctgccggtagtggacaccatcgaatccgtggattccatcgaactggcggagaagatcgcccgccgcgccaccatgcgcggcatcacggtcggcgtgttgctggaggtgaacgaatccggcgaggaatcgaagtccggctgcgcacccagccacgccatcgacttggctcagcgcatcggtgcgatgggcggactgcgcttgcaaggattgatgaccattggtgcccatgtggatgatgagcgcacgattcgtgcgggcttcgcgcatctgcgtcgcactcgtgaccagattcttgcctccggtgccgaaggcacggccgactgcaccgaactgtcaatgggcatgacccacgacatggcctacgccatcgaagaaggctccaccatcgtgcgcgtcggcaccgccatcttcggcgagcgcgctttcatctgattggagctatacgaaaaaacgccgcttgatcaatagacgggtgtccgtaaaacagttgatcctccgtatggcgtagaccatgcggaggatttgtttatgtctaatcttcaaacttgctggcggcaaacggtttgtcaaaaccgtttgc

SEQ ID NO: 2743 - DNA, 3428 bp, Unknown
  R36_18m  MAG No. k141_12992
gacgtcccagatatggtatgcgccgatgagtccgaagcaatcggactttgattcggaaacggccttcataccgcacttgtccatcacacaaccggactggaacatgaacaggcacgcagtcacggttgcataataggattcaagtcaatagcagccttccacgcatcctcacagtgcgcaacccggaaggtcctttttattggcgaactcgaccggtttggtctatcgcaacagtcgttcgttgaggatgacaggagcgtgttcgattgacggctgcaacgcatcgagctggtcggacagcttcgactcgtcgaccaccggcagttcgagcagggatcgtgcggccgcgtgcaggtagtcgttcaacgcctcgatgcggcccggctccagcgggtaagccgggtcgttctccaaggtgacgtccaacgttttgcgcaacatctcatgctgcgcgctgcccatgatggccgcgcactggtcgcggaacgtcatacgagaatttgccggctgacgttcggacagtacctgcggaatccacgcgccgccctcccagtcggcgcgcatgtcgttcttgaacagcgacatgttatggtcgaacaacggcgccggacccagaatccggccggtacggttgtcgcgcaggaacccgtggttgttggcgtgacggtcctgattgacgatgagcgcgtcgaacactagcatcgtgcgcatcgcctcgaacgattcctcggacacggcgcgtgcggcggcgaggatctccgggaacgacgccagctgcgtcgccacatagaacggcacgaacgacacgtccttcgagttcatcgaaccgcacaccgacgcaagcttgcccttccaacgggcgatgcggtagtcgaccgcgttcacaccgagcctgcgcgccagctgcgaggcgagatactcggaatacggttccaaaccggcgttcgcatacccttcggaacccgccttccacagttccagcccacgttccgtatgccgccacgccttcgggaactggccgtccgtcgtccactcgctcgacaggccgatcgcatgcttctcgctcgacgtataccccgtgtaggccacgatggcgagcgtctcgtccaacggattgtcatacaggttgatgtccgcgaacttgaggttctcaccgtcgcgttccacccagaacgaatcgttgaccgacagccccttgcacaggtcgatgatgcccagcgtatccgcaatgttcaaccccgcctgcgcgagaacctgcgtggcgaactcacgattcttcggaatcgtgcgccgctccagccacgtcgtcagcttcgcattatccggctccggagccaacggaaacggcagcaacgcgcgcttcgactcatcgaaccagcggacatgcgcctcgatcttgcccgccagcaggccctcgccatacgacgcatcgaaccggagcagcggatcatcatagagccgcagcacgtaactcgtcatatccgtcccctccaatcaagcccgctccaaagtcatatcgggcgattcacatatgaagaacaactgtctacagtatagacaagggccttggaacgcgggggcttcactctgaagtcaagtatttgatacaatttggtgcaaaaagatagtaaatagcaataaggagtggctatgagcatgcagattgccacgcgagttgatgacgagcaggctgcgttgtttaaggagacgacccgacagctgggtaccaccccggccgatgccctgcgtatgttcatcagcgcgttcaatgattaccgtgggttcccctatgaggtgcgtttgccacgaaatgacgtggagccgtttgcgtccgagcgggacgctactgagtatgccagtcgtctcgccttgaggatgtccgatgaaacgaggtgagattcggacgttgcaggccgatggctacgccagcaagccacggcctgttgtcatcgtgcagagcgatgccgtcgatcggttcgattccgtcatcacttgtctgctgacctcatacgattcctccgacatcgacacgcgggtccgcttggaaccaagtccggagaacggcctgaacaaagtgagttacgtgatgacggacaagatcgtcaccgtcgaccgcaaactgctgggataccaagtcggcgtggttgatgatgcagccatggcgaatatcggccgtcagctcatgcgggttctaggtttgctgtgacgtttgggatggctggcgggcgtgcgtctacttgtgacatcgtttatgcacccttgaggccgtatgatgatggcgtcgaattcaagctctccccaacgtctaagaaatggcttccttcatattacggtcatacgaccaacaccatatgaaggaagccatcatgaatggtctaacggcaatcagcttctcatacgtgattgtcagtcattcaccgaatcaaccgcggttgtcgaacatctgcagcagcatcttgctgggttcgacggcatagacggtgtgcggcagacgggcgctcaggtagacgatgccgccggccgtaagctcgacttcacggccttcgccgccgacgcgcagcttgccttccagcacctggatgatcacgggcatggccgcggtgtgctcgctcagtgcctggtccttgtcgaagccgaacagcacggcgcgcaggccgtcctcgcgcagcaccgtacgggagacagtggcctcctcctgaatatcgatcaacgaggccaagtcttcgatgaatccaagatgcggctcggtcgaaatggcgtggccttcggcgtcgtgggcgtcgtgcttgcaggcgcagtgcttggcctcacccgcttcagcggccgcgacttcgccatgcttgcagtggcactccttcttcgcgcccggctccgcggccgcgccctcggcgtgctcgtgcttgcaggcgcagtggtgttcgccgttggcggcagccgcctcggccgccgcggcggcttccctacgctgcttgcacttgcaatgctgctcgtcgcgccctgccttgcatacggtctgctgctcgttctcatcggtcatgatgttctcctattcgtcgcgcgtacctcacatacacgtcatcgcttttgcttgttttccattatccggccatcgtgggccggcacaccgctgttacgcttcgggcttgcgcacctcatccttgacggattcgtccaggttgtccggctgcaggccgagttcgtgaatcgagtaggtgccgccggcgcgcagtagtcggaaggcctcgccgataatcgcctgcttgccacgctcggtctgcatggtaagcatggcttcgccgatcaccacgtcggcgctgttggattccagaccggtgtcggcggcgtcgcgctgcacgcagcttgccggaatcgtggccttctcactggtgagtttggagatgatgtccacgacctgctggtcgcggtcc

SEQ ID NO: 2744 - DNA, 3774 bp, Unknown
  R36_18m  MAG No. k141_13082
cggtggcgtagccggagatacgggccatggtggccacggtcacatccgggtacttaccaacggcggtctcgttggaggtcatggtggcgtcggagccgtcgaggatggcgttggcgcagtcggaagcctctgcacgagtcggaaccggggagttcaccatggagccgaggacttcggtagccacgatgaccggcttggcgtactggcgagccagctcgatgatgcgcttagtggccagcgggacctcttccagcgggcactcaacggccatgtcgccacgggcggccatgacgccgtcgaaggtcttgacgatctcttcgaggttctccagagcctgcggcttctcgatcttggcaatgatcgggatgcgacggccttcctcgtccatgatctcgtgggcgcggtcgatgtcggtggcgaaacgcacgaaggacctggcgatgatgtcggcaccggtgcggatggcccaacgcaggtcagcctcatccttctcggtcagggccggcagggagacggcgacgcccggcaggttgatgcccttgtgggaggacacaggaccggccacgacgaccttggtgtacacgttgttgccctcgaccttggtgacctcaagacggaccttgccgtcatcgatcaggatcgggtcgcccgggtggcaatcgcccggcaggcccttgaaggtggtggaggtgatgtgctcgtcgccctcgacgtcatcagtggtgatgacgaattcctggccgagctgcagctgaaccttgtcttcgccatcggcgttcttcttgaaccaaccgcagcgaatcttcgggccctgcaaatcaacaagcgcggcaacgttgcgaccagtggcttcgctggccttgcgcacgttgttgtagaccttgaggtgatcctcgggggtgccgtgggagcggttcagacgagcaacgtccataccggcttcaacgagcttcaggaggttgtcgtaatcctcggtggaaggaccgatggtgtctacgatcttggctttacgcatgaatgcctgcctattcttgttcaatttggttcgaggcgcgattgccccatttgccgaaacccagtctactagcgcgagccgactcatgacaagttttcttcacggtgtgttgtgagcgctcacattgttgtgttgactgggtttaagggttgtattctctaacgatttcaggccttctcggcgctttccatgctcttcatcttgatcacggaagccacggatgcgccgccaattgcgaccacaatcacagccagcgacagccatgtgggcacttccggcacccaatggatgccttcgccgccgttgatgaacggcaaggtattgccgtgcagggcctccatgatgagcttgacgccgatgaagcccagcaccacggacagaccggcaggcagatagacgagcttgtcgagcagagcacccagcaggaagtacagctgctgcaggccgagcagggcgaacacgttggaggtgaacaccaggaacggatccttggtcaggccgaagatcgcgggaatcgagtcgaaggcaaacatgacgtcggtggtgccgatggtcaggaacacgatgagcatcggggtccagtaacgcacgccgttcttggtggtgcgcagcttctcgccgtcgtagtcgtcggtgatcttgatgatcttgcgcagattacggatgatgccgttttcgtgatattcctcgtcttcatcgccgccgagcaccagtttgacggcggtgtagatcaggaaggcgccgaacaggaagaacacccatgtgaagcgggtgatcagggccgcgccgatcagaatgaaaatgccacggaagatcaaagcgatggtgatgccgatggacagcacatacttctgaatctgcttgggcaccgcgaagttcgacatgataatgacgaacacgaacagattgtcgatggacaacgagtattcggtgagccagccggaatagaactcgatggcgggcttggagccggcgaagaaccagatgcatccgccgaagatcagcgccatgaccacgaagaaggcgatatgctgcacgcattccttggtggagggcacatgcggtcggcgcccgatgacgaacaggtcgacgatgaagaacagcgcgagcaccacgaaggtgatgatttcaaatgcgagtggggtttctgccatgattccctacactaacccatgtatgtgacgggtcattgccccgcctcggtcatctgccggagctccttcttgagatcacggatctcgtcgcgcagacgggccgcgagttcgaactggagttgttcggcggcggtgtgcatctgttcgctcagttggcgaatcaggtcggcgaggtcctgcgcgggcaggccggccttcaggatctcctcgtggcgtttgtctgcctcgttgggatcgagtaccggcacgcccaggtgtgtgttgccggccttgcccgcgttgcggtagccaccttcaagcaaggtctgggtgtccacatcctccttggcgagcatgtcgttgacgtcgctgatcttcttgatcaggggcttgggatcgatgccgtgttcctggttgtaggcgatctgcttggcgcggcggcggtcggtctcgtcgatggcttgccgcatggcttcggtggtttcgtcggcgtacatgatcaccgtgccggacacgtttcgggccgcacggccgatggtctggatgagcgaacgataggagcgcaggaatccttccttgtcggcgtcgaggatcgccaccagcgatacttccggcagatcgaggccctcgcgcagcaggttgataccgacgatgacgtcgatcttgccttcgcgcaacatgcgcagcagttcgacgcggcgcagcgtatccacatcggaatgcaggtattcgaccttgatgccgcgttccagcagatagtcggtcaaatcctcggccatcttcttggtcagggtggtcaccagcgcacgctcgttcctggccacacgggccttgatctcggcgagcagatcgtcgatctgccccttgaccgggcgcacgtcgatcttcgggtccagcaggccggtcggacggatgatctgttcgaccaccccgtcggacaagcccaactcgtagtcgccgggcgtggcggacagatacacggtctggccgacgcgctgcaggaactccggccatttgagcggtcggttatccatcgcggagggcagacggaagccgtgttcgaccagcgtgcgcttgcgggaggcatcgccctcgtacatggcaccgatctgcggcacggtgacgtgtgaatcgtcattgaccagcaggaagtcttgggggaagaagtcgagcagcgtgtgcggtggggtgccggcggcgcggccgtcgaagtggcgcgaatagttttcgacgcccgagcacacgcccacctgggtgagcatttccagatcgtaggtggtgcgcatgttgaggcgctgcgcttccagctccttgccttgcttacgcagttctgccaggcgttcgtcgagttcctcgcggatggttttgagcgcgcgttccatgcgttcggggccggccacgtaatgggaggccgggaagatgtggatttcgttttcctcgtcgatctcgtcgccggtcagcgggtgcagcgtggagatgcggtcgatctcgtcgccgaagaattcgatgcgcacggccagttcctcgtagacggggatgatttcgaccgtatcgccgcgcacgcggaaggtgccgcgcgtgaaggcgatgtcgttgcgcttgtactgcatggccacgaattggcgc

SEQ ID NO: 2745 - DNA, 7241 bp, Unknown
  R36_18m  MAG No. k141_13241
ataggagatcatgcgcaccacgtcggaattgcgctcgcagccggtcaggaacgcggcctcgccgagcgccgacttccacgtgttcgcgccttgttcggtctgtggttggccggcaaaatagccgttggctgaatattcgccgaaatagacgccggcgccacaacgcgggtaagcgtcgaatcgtgacgcctgggatgcaaaccattcgggggagtggtaggaatgctcgtcgacgataatcgcgtcaccggtggcggaatcatgtgccccggaatcggttgcggccaacgctcgcgcatggtcccagctgcgcttcatcgccggctggaaggggaacagtccggcgctcatcacacacagcatatccgggtatcgttcatgaatggcctcgctgatcatgtcaaacttggccacgtagtcagccccgaagttttcgttgcccacgccgatcatgtccaggccgaacggttctggatggcccatatcacgccggaccgcggcccacgagctggactccggatcgccattcgcgaattcgatgaggtccaggtagtcctgaatcacattgttgcggaaagtggccgaattgatatccatgtggcgcggatcgcggccgggcgactggcatgcgatgccggcgaacagagtgggcagcggcttggccttgaggtcctcgcacaggcagaaatactcgtagaagccgatctgatagctctgcgaatagctggaaccatccggcatcttgaacgaccacatcgaatactgttggcgtcgcgcggccagggagccgacggtatccttccagcgatattcattgccgggcgtcacaccttcgacgatgcagccgccggggaatcgcagaaacgctggatgcaacgcctgaatggtttccaccagatcgcggcgcagcttgccgtaacgccatttcgggtcgcccgcgccccaatagtccgcatccatgaactgcaccagatccagatcgaacgtggtgcgttcgccggcgtcaatggtgatacgcagcttgccgtaatcggtgttcaggccggttacgtcggcgttgaaccggtaccagccgtcacggccgatggcgatggcaccatccgacgaatccggactgatcgaaacgccggaatcctgcgcatcggccccatcgtcctgcctcagaccggtctcttccgtatcgtcaagcggatctgcgtccacgatatacgacaatcgagtggtgctggtgagcggcagaccgtacctatcgaccacgccgacggacagcttcgcccgcccatgaaccggacgtaccgcgagactgacggaataggtgtggtcggcggcgatggagaacgcgggctcgcccccgttgtcgccgcctccgttatagccgaggttttccagatatgcagggccggtttcggaaggaacatcggacgtgatgcgagcgtatcggctatgtgcgtgaattggcggggcggggcagtcggtggtcacccgctggccgtgaatcccgcgtatctcactgccaaggctggcggcggaacagttgatgaaatcccagaaacgcagggaatcagcctgcgtacgccaccgttcggcaccggccatacgccacgtgtgatggtcgagataaacgccgtcaaaactgtagttgttcaccatgttggcgttcagcccgccatccgcaccatggttgatgtcctcgaagaacacgccgtacagtcgcccgcttgtgtgatgggtggggcttcccacgctaatccgcaccatggtttcgattgtagagggaatggagcggaaaggtaaacggaagagttcgctcaccgttcatgttgcggtcaatccaagtcgactgttcgccggtatacagccggtaccctcgaaacaggaatggaaaatacggacgactaggagcgcggctgtgcaatcctcggtgggaatacgtgagcgcatcgaccacgtgtatccgtcgctgcgtccggcggagcgcgccgtggcccagtatattcgggatcatatcgaggaggcggccgacctgaccgtcggccagatggccgacatcgcccacgtcagccagccgacggtgattcgtttcgcccgcaagctcggtttcggcggttaccgtgaactgcggtacgtgttgcgccatccgtccgccgagcacaaagtgaccttcaatccgttggctggattcgatctgaatccgtgggatggcgaagatgagattcccggcaaagcggcctatgtcgcgaaggcgctgatcgatgagctgcacagtgcgttggaccccaaggcctatcgcaaggcggtcgccctactcgccgaatcggagttcatcgatattttcggcgtggagaactcgttgacaccggcgatggatctgttcaccaagctcggctacctgggactgacatgccgtctcaataccgacgcttatctgcagcagatcggtgccgggcacctgccccacggcgctgtggccgtcgccttctcccattcgggcagttcggcggatacggtcaaagcgttgcgattggcgaagtcgcatggcgcgaaaaccatcgccataaccaatgccatcggcgcgccgctggccagctgggccgacgtgacgttgctgacgggtcgtgactcgcacacgatctatggcaatgcgattttctcgcgcgtggccgataccgcgctcgtggacatgctgtacatgggcgtgattctgtccgactacggccgtttctccaccgcgctcgacgaatccggtcgcatgattcgcgatcgcgtattcgagaactgagctgctgctttatcgtgccttgggctgtattgctctggtcgttgccgctttgttgccgctctggtcgttaccgtcctgaggcatgtgccagcgaatacgtagtggacttggcgtgcgtatgacgttcgatcttgccgctcaactccagctggtccaagagttgcgtcatctgatccttgttcaggccaagcgctttctgcatggttttacggctgagcttcacgccgcggaacgcgaggaaattgagcgtgaactgctccaacgtttgaggcgacggttccagcgtcgccgtatcgagcgggcgggtactgacctggtcgtcaccgtccgggcgctcgccgaatccactgccgagaatcagcgtctgcaatggcgcgcagccgatgatgcgtgcgccggccaaagcatctgcggcgttatccgtcatgcgctgaatcgtggggaatgagtacattttggcgcgctgcgcttcgtcagtggtgctgggcgcggcggaagcatcggtatcggtccgatgcaaggatgcggcctcggccgataccgggatgggcagcaccattgccaccgaagtggggcccacgcgcagttgcggactgaccgcgctctgcgcgtaggcgtccataatgcgttgaataccggtaccgcagttctcgcagaggcccaaatcggcgaacaattcagccaaacgcggggtgcgtggctggcatacgccgttgagcagatcgttgatttccaaaccatcggtcaggccgccgagcgagacgatttccaggcgggaatcgaagatattgatcagtgtggggccggagtacgtgtaatcgcgatgttccagtgcgttgaccaatgcttcgcgcagggctatggccgggtattggccggattcgttgatgccgttcagcagggcgctggcttggtcgagctggcgcagcaccgagccggtgaatgtgtgacgttcgcgaatggcgtttttgccattgccctcgaaaatggtggccttgataacgaacgggcattggttggacagcagggtggcaagcgacgattcggtggcgctggtgaaggtgttgttggtgccggtgttggtgatgttgccggcgggggcattgccggcatcggcagagacggatgcagccatgttggtcacaaccgggctttcccaatccctgccttcactggcaaaacgaccctgtgcgtatgtgaaagtgagctcaccactatcgcctgcgacggtctggcccgatgcggcgtgatctacgttgctctccgttgtccccatatcgccgatggtaccggtgcaagccgacgttacgccgaggtgttttacacccctacggctagacttacacgagtttggccccgtagctcagctggatagagcatgtgacttctaatctcaaggtcgacggttcgagcccgtccggggtcacgatgcaataaacccttggtccctcatcgtctgtgggggccaggggcttttgagtattatgccggtctgggtccgtctggagcctgaactgtcgaccttgagattagaagtcacatgctcatcatcaccatccgggaacacccttaaggggtgcggctcctgcataacggctatactctgacttgagatgtgctgaataataaccagctatcgcgcgtccgccaatggcgacgaacaagggaagaagggcccgtgccgcgagcaatcatcgaggtaagaaacctacgcaaggaataccccgtcgaggatgagacggtggtggcgcttgaccgtgtcaatctcagtatcccgcaaggccagatctgctgcattttcggcgaatccggctccggcaaatccacgctgctcaaccagttggccggcatggaaaaaccgacgcacggcggcgtgagaatcggcggcgtacccgtcagcaaactcgacgagcgtgagctggcggccttccgccagaagcatctcggcttcgtattccagtcgtacaacctgctgcccaatctgaccgcgctcgaaaacgtggcaatgccgctgatgttccgcggcgtgcccaaggaacagcgcgaacgtgcggcgcgtggcgtactcaaacgagtcgggctcggccatcgtctcagccattacccgcgccagatgtcgggcggccaacagcagcgcgtcggcatcgcccgggcgtttgtgaccaagcccgaggtggtgttcgccgatgagccgaccggcaaccttgactccaaaaccaaaaccgaggtcatgacgatgatctgcgcattcgcccatgacttcaaccagaccatcgtgctggtcacacacgatccgcagatggcctcatacgccgaccgcattgtcaccttgctcgatggccgcatcaccagcgatcggctcaacaccgacctttcccgcccaactgttccgtctacgccgtccgccccaaccacaccaactacaccgtccacgccgtccgcccatagaacccaaggaactgaccgatgaagcacctctcccaccacaccatcgccatcatcgtcgcgttgctctccacgctgtcactggcacttgccgtcatctcccttccgcatcaggcgtacgcggtcgacggcacagacggcacaagcggcacgaacagtacgtctcagggaaacgacggcgattccgcgccgatcgccggaccggtgcccaacatcatcatcaccaacttcgcgtatggaggtgattccgtggccgccggatccaaattcaatctcgacttcaccttccagaacaaggggcaggtggcggtgacgaacatggtcgtcaccgtggacggcggcgagagcttcgccatcgcgggaggcacgaacacgttctacgtcgacgcgctgtgggccggttacgccatgacgcaaagcgtgccgatgcaggcgctcgcctccgcgaaaagcggtgcccagtccgtgaccgtgaacttccgatacgagtatgtggacgccagcgcccgctcctcaagccagtctgacgtcaagatttccgtgccgatcagtcagcctgaccggttcgaaatcagtgatcccgtagtgcccgaccaggtgatcgccggccaggaaaacacggtcacgatggaatatgtgaacaagggcaaaggcgatatcgccaacgtcgaggccacgatggagggcgaaggtttcgatgccacgatgaaaacccagtacgtgggcaatgtggcttccggcgccaccggcacgattggttacgccttcacaccgcacgcgtcaggcgagctgaagaccacgctcaaagtcacgtacgaggattccgacggacagaccaagaccaaggaattcccgctcaccatacccgtaaccgatatgcagccgatggatgattccggcatggccgatccgaacatggaccagaacgccaatcagggattgccggtgctggtgtatgtggtcatcgtcgtgatcgccgtggtcattatcgtggtgattgtgctgctcgtgcgtcgccggcgcaagcagaaggccaagaagaacgatattgatgaggactgggatgattggtccgaaggcaaggatgataagaccgataccggcgtgacggatggtgctgcggcagacaccgctcctatcacaccagtcaccccagcctcatcagtcgcaccagccggctcatcccacaaggcctgaaaggcccgaccatgcgattcggcgacatactgcggctctgcagacaaaacctatggcggcgtaaatcccgtacgattctgaccgtgctgggcgttatcgtcggctgctgctcgattgtgctcatggtctctttgggccaaggcattaacgagcagaacgagaagatgctcaaatcgatgggcgatctgtccatcgtcaccgtgtacaccaacggttatgccggtccgatggacgatggcggcttgtccaagatgggcgataccaagctcgacgacaaggccgtggaatccttccgcgcgatgagcggcgtatccggcgtgacgccgatgatgaacttcccttataacgtgacggccagagccggcgcgggtggccgttacatctatgattacgtgcagatcatgggcatcgacatgacccagctcgaccagatgggctacaagctcgtcggtggcgagaaaccggtcaaaaaagaccaggtgcttgccggcgaatggttcgcctatggtttcatggacaccctgaagaacggcgaacaacgcaccagcacacgtggcggtcagtattcctcatgcacgtttaaccaggccaccggccagtgcgagaaagatcaggacgaagatccgttcttcgacccgctcaccacgcaaattagtctgaccaccggcaccaattatcagggcgaccagtacagcatgaacatgtacggcggcggtggcggcgcgggcggcggtggcggcgcgggcggcgcaagcggcagcgccgcgggtcagtcggaaaacgtcaccctcgatgtgcgggcttccggcattgtggcggg

SEQ ID NO: 2746 - DNA, 13345 bp, Unknown
  R36_18m  MAG No. k141_13268
accggcctaccgactgacagattcgactatgtgtccgccaccaagcagatcgaacgggtcgaggtcttctacgatcacggtgtggccgaagtgttcgtcaacaacggcgaagacgcaggcgcgattctcttcgattgcgacactgtcaacgccccggatttcaccaccgagctgaccgtcacggagctcagcgggactatcaccgtccacgagctgcgcagcacccgctaaaacataacccatatctcagtcgaggggcgtgatcagcgccccagacatctatctgcgttcaaagaggtacattcggggtcttgcggaatgctatctgctttcaaaggagtacctagactgcaaaactgcgagtatggtcgttggaatatcaacgctcatactcgcgatgtcagagtttcgatacccctttgaaagcagatagtattccgcaatcaggcaaatgtacctctttgaacgcagaaagcccctcctttgaaggaggggctttcgtatgttctgcatatttctctcactgagtttgtgccagcgagaaagctccaggggaaactcccctcacccgcttcgcgggagctcccctcaaagaggggagccgagatccggtgcgctactggctcccatcaaccgaggggagccagaggaatcaggcctcgtagtagccgtcggcaccgaggcgggcgtccgggttgaggagcatcgccttttcgacctcgtggtggtcgtagccacggtgatcctcgcagaagcgacggttgtcgatcggctcgtagagcgcggcgcgacccatcatgccttcctcgaggtgacgctggccggcggccaggcgggcgttggcacgctcacgccaggcttccagcgcggcctcgccatcggccttggccacggccgcttcgaaggcacccggatgaaccagggccacgaagccggaaacatgtccgaagccgagcgaggtggccagaccggccttgaccgggcgaccagcggtctcgcgaccgaactcgtcctcgccaccgccgatgcgcaggggcttcctaacccagaccatgtggtcgtcgcgctggagcttcggatccacgcaatcgagcgctgcgttcgccggaatcacgccggacttgaacagctgcgtcagaccgttgacctggaagatgcaggcaccacccttggcgtggccggtaagcgtcttctgcgaaatcacgaacagcgggttgccgtcggagcggccgatggcgtgggccagcgtgttgtgcagctcggattcgttcgggtcgttggcgttggtggacgtgtcgtgcttggagaccacggcgatgtcgtcggctgagacgccgagcttagccaggtcgtgcacgagcttggagtccttgccaccgaggccggcagccagggcaccgaggcccggagccgggatcgaggtgtgagcgccatccgcgtaggagtggatgaagccgaccacggccgcaaccggcaggccgagcttttcggcgatgtcaccgcgggtcacgaggatcgtgccgccgccctgggattccaggaagccgccacggcgacgatcgttcgcgcggctgaagaagcgcgcgtcgatgcccttgccgtacatttcctccgaattggcggtggcgttcatgttgccgaagccgatcacggattccacaccgatgtcgtcgatcgcaccggtgaccacgaagtcggccttgccgagggcgatcttgtcgacgccctcttcaagggagacggccgcggtggcgcaggcggagacgggctggatcatgttgccgtagccgccgatgtaggactgcatcacgtgagccgcgaccacgttcggcagggcttcctgcaggatgtcggtcgggatctcgtggttgaggaagcggtcgaggtacagcttgcgcatcgacatcatgccgccgaagccggtgccctgggtcgaagccaccagcgaggggtggatggactcgaggatttcggccggggtgaagccggcgcccagataggcgtccacagtggtgacgatgttccacagggcgatcttgtcgacgtcgccgaccatcgaggcgggaatgccccatcgggtcgggtcgaagcccttcgggaactggccgccgactgtgcgggtcatggtggcgcggcgcggcacgcggatcatcgagccggcgtggcgggtcacattccattcgccggattcctcatccggggcgatggtggtgtgagcctcgtccaacttgacgtattcggcggcgacttcgcgggtgggcacagagaaggtgacgtcgtggtcgaggaagacctcggcttcttcttcgtcagcaccgtccttgtagtcgttgcccatgccttcctcgaacgggcggatgccggagcgggccacgacctcgtcgtggtagcgctcggcgatgtcctcttcgggcacgaggttgccgtcggtgtcgtaccagccgggcttcgggctgtcggcccaagtcagcagacccatgttccacgcaagttcgagcactgcgccggcgctcaggtctacagtgccgtccgagtggatgccgagctcggcctgggtgcgcgtacgaccggagccccacgggcccagctcaccgacggaaacgatgacgatttcgtctttcggcttggcggtgacgttggtccagtcgttgaggtcgaccgaagcctgcttggtgacgatcggggtgggcagcgccttgatttgctgcccacgcgaggagtcggacagtccagtggaccgtccggcgacggaaccatccgtctcccgagacgaggccgcaacagcttccttctcggcgtcggccatggcctccgcacgcagggccttgatgtcgatgggctcggagccgagaccaccggtcaggtccacgtcgagcggggccttgagggcctgctcgcgcgattcgtcggtgcacaggtcgagcagcttggccgcgatctgtgcggtggagtaggtgtggatgccgtgacgctcaacgacggcgaccagcgggtcgttgccgcccatcaggccggtgccacgcacccagccgatcttcgggtgagcgaaggtgacgcggctcgaccacaccttttcagcgcgggcacggttgacgatggcgtcaaaggcgctcttgacttcgccgtaggcaccgtcgccgccgaatacgccgcggttcggggaaccgggcagcaccacgtggagcttgtgctgcacgttggtgtcggcaccgatgtggctgaagccggcgatggcgcgttccacgccccacagcatcagtcgggcctgcgattcgaacaggtcgccggagtcggcgagcgtgccatggaccggcggagctgcgaacgggaagaacagggtcggttcccacgcgggcttcagaatcgtggtggtggcaccggaggtcttcttctgctcgtgccccacccagtcgaccagcgcgtcgacatcgcggtagctggagaggttggccggaaccagccacagcttggcgttgccggtggcgtgctcgcggtaggcctgcttggcccaagccttgatggacggcttgaagctgtgcgaggtggccaccacagtggcaccgcctgcgagcaggccttcgaccacctgagcggcaatcgagttcgggctcacgccggtgacgatggcgatatcattcgagtaacgggaggcgttcttgttggacgcaacctgttcgagggcctcggagccggccttctggaaggcggccttgagtttttcgctctccgacttgttggcgaaccactgggcttcggcggcgatggtcttgccaaggccgatgaagctgccgttcagggcggcgggatcgttgccgtagtaggcgcgggcgaggtcttcacgggcggaggcccaccggtcatcgaagaggatggccttgttggcgtcgaagcgcggagcgacctgcttggtccagtcggagccaagttcggcttcgaccgcggccacgacggcggcgttctcgtcctcggattcttccggagccggagcggccacgccgagctcgttcagcacgaagcgggcggtggcggcgagcacgccgttggaaccggtgaccttctcggcgaaggcgtcgagcgcggcggaatcgaccacagcgccaccagcggcaccaccggcggacggcagggccacggcaacacccttgagctgggcgacgacctcaacggccgcatcgatcagcttgtcggcttccggcttgttctgcacggcggcggtgggcagcttggccaggtcgccgccacgggagctggcaccctcgcgagtgtcgagcagcagtgcggcgagcacgctggccacccagccttcgccgagccgccatacgttggtcacgcggtcgcggatgtgctgctgtttgacgccggcggcaccgaacagcgagcgcaggcggtcgcgcagcgcctcggagagcacggcaccgaacggcttgtagttcggggcggccttgttgacgatttgggcgagcttgtcgagcgtcgcttcagcagcaccgtccacgctggcgactcccagctcggagctgatgtccatgagcagctggttgcggcgagaagagacaccgttggtcagggtgtcggtggtgtcgttgctgccgatctggtcgaggcgcaccttggcggagtaggccatgagtacgccgatggcatcggaagccttgaagggcaggtcggcgacggcggcaccagacggtgcgccagcagcggcctgccctgattgcaggccgcgcgaggaggcggacagtccagtggactgtccggcgacggagccatccgttgtctgagcagcctcagtcgcggcatttgccggagcagcacccgatccgagcttggcgacggcggaaccaccggcaggagcggtttcgaccggggccgaggccgcagcctcttccggctcgtcgtcgggaaccagcgaatcggtgtcggtcatgtagacgcggccttcatcgcggccgacgttgtagacgaccgtatcgttgccggcgaactcgggcagacgtagggtcttggtaccgaggttggccagggtcggggcgttgccgaggccgacttcgacgtattcttccacgccgaggccgccctgttcgcgctgaccgaagagcagcgcctgggtttcaatccaacgcaccggggaggcgaactgccaggagagcagttcggtcaagagcagacggccgagcttctggtcgtcggcggcgtaggaatcccacacggccgggtcgtcgagcacggccttgatgcgttcggacggcacggcttcgaggatcttggcggcgaattccttggtcatctcgaacggggtggccaccaggttcgggatgtagcggtccaccagacggccacggtagtcgatgtaagcaggaagcagcgcgtcgagcttgtcgcggaattccggcacgcccttgcgcagtagcgtggagtggaacggcacatcgatgccgggcaccagcatgaacgcgggcttgccaccgaatgcggccacgcggcgggcggaatcggccttcagggctttgagtccggcgatcgtaccggcgatggcgtactgctggccggcgaggttgtagttcacaatctccaggaattcgccggacgccttggccacggattccacatattccttgacgtgcgcgtcgtccacaccgaactggttcggacgaagggcacccatgcggtagttggagcgaccctgtgcgtcacgctcgatgaggtggtgcatggtggaaccacggtggaacacgagctccagcacggtttccagcggaatcacgtcggcgaacgcggacaacgcgttgtattcgccgagcgagtggccggcgaagtaggcgggccagatgtcggcgccggcttcgcgcagacgggcggtctgggcaaaagcaaccgtcgcgagcgccacctgcgtgaactgcgtcaggttgagcaggccttcggggtgacggtaggtcacgccgttggcggtgagttccttcgggttgtcacgcacgaggcccaggatcgagaagccgagcttggagcgggtgagcttgtcggcgcgctcccacacgtcgcgggcggcggcggacttggcgcgctcgtccagaaccatgccctgcttctggatgccctggccggggtagacgaaggcggcgcgcggtgcgcggaccagtgcggtgccgcgggagacgagctggccgtcgatacggcaggtgacttcgagggtcatgccgccgtggcgcactttgccgacgcgctcgacggagatttcgacggtgtcgtcaagctggaccatgccgtacatgttgtaggtccagccggcaatctcatagtgggcacccttctcgtcggtcgcctgcacggcgtgctgggcggtggcggacagccacatgccgtgcacgagcggggcggccaggccggagatgcgagcgccacgagtggaggtgtggatcgggttgaagtcgccggaagtgcgggcgaaggcggtcatgtcgtgtggggcgacgaccttcacgcggcgcagcagacggcgcggagtggcctgcactacttgcaggccgcgcgaggaggcggacagtccagtggactgtccggcgacggagccatccgcttccttattcaggagggcaccaccatactcgggggcgtctgcaggcaaagcatcggagtagacgcggccgcggatcgcgaaacgctcggtttcgcgggcaagcggcgtgccgtcggcggcggtgtgggtcacgtggatggtgaccacgcggccggaggcggactcgaagtaatcctcggcccaagacttcagggtgatggtttcgccggtgtgcttgagcaggtcctcctcgttcacctcaagttcgatgaggtggtcgaggtggacggcgttgagcaggccttcaatcaccgggtagcccttgacgtacacggagccgagcgccgtgtaaatcgccggccaggccgggccgaccagcgcatcgggagcgatgcggctgggctgcagggtcgtcggcagagcggcgccggtggccgcttcgtggtcaaagccgaggttggcggatagggtgtaggttgcggttgcggtaccgaacggacgctcgtcagaggtcttgtcgtcaagctgcggcatctcggtgagcttgtcgccggtgatggcggtgttgccgatgcctgcggtggcggcgagcatcgcgtagacgtccggaatcaggcgttcgcggtccacgaccggcacacggccgggctcggtgccttccacgatgagcgggatgacgatatcgcgcacggcgtgcttggaggtgccgccgtccgggtcgttgtcccagtaggtgtcgaggtggatgtccagatcgtacttgccggccgcggcgtcaaacgcgcggatttcgtagtactggtcgcccagggcggtgccgtaggccgggttgtcggtgatgtggccgacccaggagatgttcggggacttgcggatgaagtcttcggcgctggtggcctcgccaagtgcggcgaaatcgtcgttctcagcggcatcggcggcttgctgttcgtcctgcacgcgcttgatggcggcggtttcgaagcggccgaggatgtcggcgatcggctcgtcgatggtggtgatgccggcaacggagatcgggccggggatggcacgcacggaatcggcggagtagcgctggtcttcggactgccagagctggtcctgaccccaccaacgcagcaggtcgttgtcgatgacgggtacgaacggcatgggcttggggtattcgcgcacgagcaccgggaaccaagccacgtcggtcgggaccaccttgagttcggcggtctgcgggtaggccagtgcgagcttttcgagcgcgggggccgggtcggcgagaatgtcgtcgtgggtcagcaggccagcggcagctgcctcttcagcagaaacgccatcagcggcgaacaacttggaggtgaattcgccggagtccgtgtcgttcacacgggcttcgatgcgctgcagcaggtgctggaagcggtcggcgtaagtcgggtcgacccacgggaaggcgagttcggcgaagcgctgcgcccactcaaggtaggtcatggaggccaggtcgccgaagtaaggcttggcggtcttgttcagggcttcgatgatttccttgcggcgggagtcgagctcttcggggtgcttcatgacgcgcacgagcagacggccgcattcggcggagtcgttctcgagctcgtaaatgtcggcgtgcaggtggctcaggccggaggacatgccaccgacggacttgccggacggcacccagtgggcggcctgcggggcgaacacgtcgtcggacttggcgtcggccggaataccgggcgtcttgacgagcagctgcttgacttcggggctggtgtgagcctccttggcggtcatcgcggcggtaccgataagcacgccgtcgaccggcatgtcgggcaggccgtaggcgtgggcccactggccggaaatgtagtcggccgcgcgttcgggggtgccgatgccgccgccggcgaccagcacgaggttgtcgcaggcgcgcacttcggcgtaggtggcggcaagcaggtcatccagcgcttcccagctgtggtggccgccggcttcaccgccctcgacctgaaccatgatggtggtgggggacacggccttggcgatgcgcacgacctggcgaatctggtccacggtgccgggcttgaaactcacgtacggcagaccgtccgcctgcagcgactcgatcagggccacggcttcgtccagctcggggatgccggcggagacgaccacaccgtcgatcggcgcgccggaagcacgcttcttgggcacgatgcgggaggagccgaactgcaggttccacaggtaacggtccatgaacatcgcgttgaattcgaccgtgcggccttcctccagctcgtcttcgagggcggcgatgtggcggtcgaacacttcggcggtcacctggccgccgccggcgagctcggcccagtagccggcgttggccgcggcggccacgatttccggttccacggtggtgggggtcatgccgggcagcagtaccggcggcttgccggtgagcttggagaacttggtgaccagcttggcgccggccggggtgttgatgacgcgcggggcgaatgccttccagttctgggtgcgctcaggctcgctttccagcgtggagagcgtggagcgttcggacagcgtggtggcttcgaccacgccgatgccggtgccctgcaccacattgccgatcagcttgccaagcgtgttgccgggaccaaggtccacgatccacagcttggccgggtcggcggcgttgaacagcgccttgacgcgggcgttccagtccacatggttgagcagcacttcctcggcaagcgcacgggtgcgcttctggtcgaagccgcaggcgccggcccaggccacggtctgctcgacggcgtcggccatgagcggagagtggaagggcagggtgacttcgaggtattcgagagtggggttgaacacagtgccgccgtggagcttctgttcacgcagcttggcctggtgcttgtgctcgcgctcggcttcgagggcgagtgctgccaggtcttccgggtagccggaaagcacgtggtggttgtcggagttggtgacggcgatggagatcgggcctcgggcgttgttcacgcgcttgaccagagcctcaacctgttcgcgggtggcgcccttgacggagagcatcggactggcttcgccatacttggggttcaggcccagttcgcgcacacggcgggtgccggctgcaccgatcagggcggcgacggccagaatctcgtcgagggtcttgccggcggcctcgatggagccggcggcctcgatggcgcgggccatgtgcacggcgagcacgccctgggagtggccgagcacggcgagcggcttggcctgggccacgctgtagccgaggtgttcgaggtcgagcagggcgccgagctgggtcagtgccacgccttccacggacgcggtggcgtcggctgcggcgccgaggcgggccgggttcggagtgaagccgaacaggtcgaccggacggccggtggtggtcagcaggtcggcggcgaccggggtgagcagtcggttggctgcggcgatgtggccgcgcagggcctcgtcaaggctgggatcggtggtctggtctgccagggctaccggccacggggtggactggccggcgaaggcgagcgcatggggctcggtggccaggcgattgaggaagaaggtggtcattgctttccttacttgtgtttggttgatgtcttcagaaatcagaggggctggttgccgtggtgtttggtggtgcgcttgacgcgccgcttggtggcgagcgtggccagcgattcgacgatcacctcacgggtctgttcggggtcgatcatgccgtcgatctgcccgatttccagcgacaggttcgcgttgacggtgctggtctcgtactccttgatgtacttggcccgcagcgcatcgacgtcctgcccggaggctttggccttggccaggtcgtggcggtggatgatgttcaccgcgccggccgcgccgagcaccgcgatctgggaggagggccacgcgaagttcaggtccgcgccgatggctttggagcccatcacgatgtacgcgccgccgaacgccttgcgcaacaccacggtcaccatcggcacttgcgcgttggcgtaggcgtagatcaccttggcgccgcggcggatgatgccggcgtgttcctggtcggagccgggcttgtagccgggcacatccacgagggtgaccacgggcaggttgaaagcgtcgcacaggcgtacgaatcgggcgaccttctcggacgagtcgacgtccaggatgccggcgagcacgttcggctggttcgccacgatgccgaccggcttgccgtcgatgcaggcgaagccgacgagcgcggaggcgccgaacagttcctgcacctgcacgaattcgccgtaatcgacgatgcaacgaatcacttcgagcatgtcgtagggctgacgttcgttggcgggcacgatggtggcgagtcgcttggcggtctcgcgttcggcgcgggtgacggcgtaggcgtagaccggcggcttgctttcgctgttggacggcaggtaggcgagcacggtgcgcgcatagtcgatggcgtcggattcgtcctcgccgaggtagtgggccacgccggacacccggttgtgcacttcgccgccgccaaggtcggccatggagatggtctcgccggtcgaggccttgaccacgtccggcccggtgacgaacatgttcgagttctcacgggtcatgatgatgaggtccgtcagggccgggcagtagacggcaccgccggcgcaggggccgagaatcaggctcagctggggcacgaagccgctggcctcgcaagtcttgcggaagatgcggccgtactgggtcagagcggccacgccctcctgtatgcgggcgccgccggagtccacgatggccacgatcggcactttgaggtcgatggccatgtccatcagtcggcagatcttctcgccttcggcggtgccgagggtgccgcccttgacggagaagtcctgggcgtagacggccactttgcggccgtagacctggccgaagccggtgatgacagctgcaccggcgttgccgccggcgatgttgccgccctggaagcggccgatctcctcgaacgtgccggtgtcgaagagcaggtcgaggcgttcgcgcgcggttttcttgcctttagcgtgctgcttgtcgcgggcgcgctcttcggcggcgcgggccagttcggcggccttgaccacggcggtgcgcagcggctggtgggccgagggctgggcggcgttggcggccgaggccgcagccgcggccttcacggccggcgaatccatgatgtcagtcattgccgccctccttcttggcgtcggcggccttggccttgccggcgttcacgtccagcgtgaccagcgtgtcgccggcctccacgccatcggccgggccaacgaaaatcttcttcacttcgccggcggccggcgcgtacacgtagttctccatcttcatggattcgagcaccaccagaaggtcgcccttggccacttgctggccttcggacacgttgatgcgcgtgaccacggcctgcatcggggaggcgatgacgccggatttggcaccgtcgttggccgtggcggcaccggaggccacgttgtgcaagcctgcgccgcgcaacggctgggtggggcgcttggcaccgcgggcgcgggccgagccggtgatgttctccacgatgtcgagtggcacggtgagcttgacgcggcggttgttcatctcgatgacgaacgtctccgacttggacttgtcgggcgcggccggggcagcggcacccggggcggtggacaaggaggccggctggccggaggcggcggaagccggtgtgcggttcaggtacgtgcgctccagccacttggtggacacggcgaacggatggccatgctcggcggtgaagtcgtcgttgcggaagatctccttgaacagcggaatcggcgtgggcacgccttcgatcacgagctcgtcgagcacgcggcgcacacgggccacggcatcgagacggttctgggcagtgacgatgaccttgcccatcatcgaatcgaacttcggggagatggtgtcgccctgttccacaccggtatcgatgcgcacgccggggccggccggccactggatcttctccaaggtgccggagccgggggtcaggttggtggccgggtcttcgctggtgatgcgcagttcgaagctgtggccgcgcagttcgggggcgcgggtgagctcgccaccggcggcgatattgagctgttcgcgcaccaggtcgaggccgctgacctcttcggagacggtgtgctccacctgcagacgcgggttgacttccaggaagtacactttgccgttcggggtcaccatgaattcgcaggtgcccaggcccacgtagccgaccgtggtgaacaggcggcgggagtattcctcgagcgtgctgatgatttcctcggacaggaagggcgcgggtgcctcttccacgagtttctggttgcggcgctgcagcgagcagtcacgggtggagtacacggtgaagttgccgtgcgagtcgcgcccggactgggtctcgacgtggcgtgccttgtccacgaacttctcgatgaagtattccttcagatcgccgccttgcagcgcgtcgtggttcatgtagaagcggcgcagctcctcgtcgtcatgcaccacggtgatgccgtggccgccaccgccatcagtgcgcttcatcatgatcgggtagccgtgggtgtgtgcgaagtcgagcagcgt

SEQ ID NO: 2747 - DNA, 19448 bp, Unknown
  R36_18m  MAG No. k141_13341
accgtcgaccacctgaccaaggaattcaagctgccccgcaagaaggagatgttcaaggccgtcgacgacgtgtccttctccgtcaagcgcggcaccaccctggccatcgtgggcgaatccggttccggcaagtccaccgtggcgaacatggtgcttcacctgctgaagcccacttccggcaaagtgttctacgaaggacgcgacacctccacgttcaaggccaaggatctgctcggtttccgccgccatgtgcagccggtgttccagaacccgtacggttcgctcgacccgatgtactccatcttccgttccatcgaggagccgctgcgcatccacaagattggcgataagaagtcgcgtgccaatcgtgtcaaggaactgctggacatggtcgagatgccggcttccgtgatgggtcgttacccgaacgagctttccggcggccagcgtcagcgcatcgccatcgcacgagccatggctctggatccggacgtcatcgtgtgcgatgaggccgtctccgccttggacgtgctggtgcaggatcaggtgctgcgtctgctcaacgacctgcaggccgagaagggcctgagctatctgttcatcacccacgatctggccgtggttcgccagatcgccgacgaggtcgtggtgatgcagcacggcaagctcgtggagcacgccaccaccgacgaggtcttcgaccacccgcagaagcagtacacccgagacctgctcgacgccatccccggcggcaagctccaactcggtctggactgataatctgcgtttgagcgcattgtattgggttctttccatccgtggaaagaacccaatattcgtatgtgcaggtttgcattatggttcgcgtgggacgaaaggcaaaaatcggtgttttcccgatgttgtcccacaatttgtgggacaacatcaacatcaatcgatggacatgagtgttgtcccacagcagatttctcacgaagcccggaattacgccattcttagtgtggttgataattactcatgctgtggggcgtgggacgacccgcgaaaatcgtcgattttcggatgttgtcccacggaatatgtcatacctcgtatgtgatcgtgagtggggcgtgatcggaccagcgtttgtcatacgtgggagccttgtcgatgacgaatccgcgtgcggtctccgccagctcgggcgtggcgaactggtagtcgattctccagccgacattgttgtcgaaggcgcgccctcgttggctccaccatgtgtacggcccctgaatatcaccggccaacgaacgcatcacatccacgaactcgtattcgtccagccatttgtccacgtaggcacgttcttcgggcagaaatccggcgtgcttctcattggccttggcgttcttgatatcaagcggcgtgtgcgcgatgttgaaatcgccgcagagcacggcctgtttgccgccatgcgcagcctcgtcccgcaacgcgcccatgcgcttcagcatcgtgtccagaaaacggtacttctgttccattttggtcggatcatcggtgttgccggcatgtatgtacacggatgccacggtgatcgtatagccctcaggcgttttgacatcggtttcgatccaacgccccgaatccacatcctcgctcagacctggcagaccatatcgcttgtcaagcacttccaagtcggtgagcagcccgactcccgcgcggcctttcacccggcagacctcgttcatggtatggaggttggccggtgcctcgattttgccggcggtggcgtattcaaaaccaaattcatcgaaaatagaatcgacatcgtcctgaggcgcgcgaacctcctgtatgcaccagacatccggcgcatgcttgccggcccaatcctcgatgcccttgcgcttggccgcacgaatgccgttgacgttagacgtggtaatggtgatggtcatgcggccatactattttggcctccctacgaatcgaaccggacatcggcggccgcgatgctcagctttctctaagcctgagtgctagtgttagcaaggttgcaaccgttacatgaaacgaggaattatgggactgttcggattcggcaagaagaagagcaagaaggaagccgagccggccgttgagcctgtcgatgaggacaaggtggccgccgcagaagcgaacgctgccgcaaaggccgagagcgcggagaccgtgctcgccgagccggccagcgaataccagggccgcggcgaagagcgaggcccgtgggatgtcaacgatgaggacgtgcccgattatgacgattatctggatctcggcgcctactacctgcccttcctccagggcatccagctgcgcatcaaggccaaccgcgccacccagcaagtgcttggctccaccatcaccttcggctcctccagcctggagatcgaagcctttgccgcacccaagaccctgggactgtgggatgacgttcgcggtgacctgcttgaagccaacaaggccgcttctgaagtggacggtgtgttcggcaccgaactgaagctgccggtcaatgtcaagggcggcaagaccgtgaacacgcgcatcgttggtgtggacggcccgcgctggatgctgcgtggcatcttctccggcaaggctgctatcgatccggacagcccggagaccgaggcgctgaacaagttcttcgccgacatcgtcgtcgagcgtggcgaggagcctttggcgccgcgcgatctgatcccgatgcatccgccggtcgcccccgctgagcgtaaggccgccaaggccgcggccgaagccggcgaggagaacggcaaggaacacttcaaggacattccggacaacaagccgaagggtccgctgagccaggaccagcagaccgaagtgaagaccacgctgtctcgcggcccgatgttctccgaagttcgctgatttataggaagagacttggcagacaacaaacgcaccggcctgtccgctctagccgacgccggcaatgaaggcgaggatttctccgtcatcgacgccatcggtggcccgcgtggcgtcatcgaatccatgctgcctggcgtggtgttcgtcgtactgttcgtggccacgagcaatctgaatctcaccattgcggtttcggccgtgttggcggtattgcaggttattgtgcgactgattcagcgccagtcggtaatgggcgcggtctctggtctggtggcggtaggcatctgcctgatttgggcatggcagactcatgaggcccgcaattactacatcttcggattcattaccaatgccggctatgccgcgttgcttgccgtgtcgctgattgcgcgcgtgcccggactgggtttggtcgtcgaattcatccgtagcctgcccaccgagcatttcaaggcatggttccatgactggatggacgacaaggccctgaaacgcgcctatatgattgtcaccggcctgtgggtcggtctgttcctgctgcggctggtggtgcaggtgccgctgtatctgaccaaccatgtggctgcactcggcgtgacccgcctgctcatgggcattccgttctgggcattggcgatttgggtgagttacctcattattgccacgccgatgcaccggcataaggtcgcggctaggaagatacagactgaagtcgctgttgatgccgaacttgaaccgagcgcaaccggaaaggacgatgatgcaagctgaagttcgtatcgaacgatacgccgaccaaggccgctgcgtggcccatatcgacggtcgtgtggtgttcgtccgcttcgccttgcccgacgaactcgtgcgagtcgaacttgacgagccccacgaccgggacgaccggttctggaccggcgaagtcgtcgaggttctcgagccgtccgaagaccgagtcaccccggcatggccacttgccggtcccttggcgatgggcgggggagtgggcggcgcggatctcgtgcacgtctctttgcccggccagctcaagtggaaggccatcaccgtctccgaacagatgagccgactcggccatatcgacgtggccgttcccatcgagcgcatgcccggcgacaaggcagccggcggcctcaattggcgtacccgcatcgaaatgattgccgacgacaacggcatgccatccatgcgccggcgcggcacacacaaccgcgtggccatcgacaccatgccgcttgccacgcgcacgctgctggacgtcgccaagcgcgaacacgtgtgggaaggcggctttgaacccggctcccagattcgtctttccgtgcccgaaccgcgcggcgagatcgtcgataccgcggcagcagacgacaattacgccgtacttgtggacggcgaactgcgcgccggctcccagctactcaccgaacaggtgaccatcaacggcacgaccttcgactatcaggttgacgccaacggtttctggcaagtgcatcgccaagcgccgatcgccctcggtacgcacgtgatcaacctggtcaacgggcagctgcagtcagcggcggacgccgtaatctgggatttgtattccggttccggcctgttcaccctgccgctggccacaatgaccggtgaacgcacccgcatgctcagcgttgaaggcgcgcgtgtggccgtcaagaacgcccagcgcaatctgcgcgccatgaacctgaacgacgtggacgcccgcgcgggtgacgtctcgcgcacgctggaccatgtgccggcgcatctggccaagccgaatgtcgtagtgcttgatccgccgcgtgccggtgctcgtgccaaggtctgccgccagattgccgcggccggcgcatccagcgtggtctacatcgcctgtgatcccaccagcctcgcacgcgacaccgcgacactcatcggcgaaggctacgagctcaaagacatccgtgccttcgatatctacccgatgacccaccatgttgagacggtggccctgtttacccgctgacaggtgagcatatgacacgacgaattctcggattgctggcctgcatggcggctgtgttgtccctggccgcctgcacgccggccggtagggcggtcggcgatacccaagacagcatgccggaagtcgcccacgattccacacatcccacggatgtcacagtcggctttgtggggtcgactgacaccgccgcagacaagtccgccatcaatgcgctgtctgatgacaaactcaatgtctactatgcctcgctcgaaacatccgcaagctcggcaaacgcaactgatggtgtatccggtgaaaccgaatcttctgacgccggcactaccagcgaaaacggtgccgatagtatggatgctcatactggcgtcgacaagaatgcggccaccgcacagcagggtgttgccgatttcgtagctcgcgcggtcaaaatcgtggttatcagcggcatcgacgttaccgacgccaaccgggagagctggaaccagacgttgaccaatgcgcgtgaagccggtattccagtcgctctcattgatccaaagcatgcgcccgaagatgaactgctgtacgccgtcatccttcacctcaacaccaacagtgccgattctggcgacactgccgataccaagccaatgactattactgacgccgtgctcaccatcacgcgcgacgaaccccacgaacgcgagatcaaagtcaccgtttcctgagccgaatcaggcccttgaagctgagaaagcaccctgaatcatccctgagccttagcggattgcgaaacaagacgcggtaggctggggaatatgagtgcaacaacagccgtggaaatgcctgaaatcggagcaaccggtcttacccccaaagaagtggtgcagcgtatcgaaagtggccaatcgaatgcggtgaaaacatccacctcgcgttcggttcaagatatcgtgcgagccaacgtgttcacgctgttcaacggcatcatcttcgccgcgatggtactggtgctgatcaccggttcctggagggacgcggtgttcggtttcgtcatcatcatcaacacgggcatcggcatcgtcaccgaactcagggccaagcgcacgttggataagctttccatccttgtggcctccgaattcctcgtgcatcgtgacggcagggacgtggaggtgccccacaacgagatcgtgctcgacgacctgctgtggatccgtgccggcgaacaggtgccggccgacgggcagatcatccagacctggggactggaactcgacgaatccatgctcaccggcgaatctcgtaccgtgcgccacaaggtgggggagcaggtgtattccggtgccaccgcggtctccggcatggcattggtcaaggtcaatgcggtcggcagccattcctacgccgccacgctcaccgcgcaggccaaggtatacaagaaaaccgtgtccgacctgaacaagggcatcaacacgattctgaaattcatgaccttcctcgtggtaccgctgtgtattctgctgattctttcgcagattcatacggtcggcggttggggcacggcactctccaccggcgaatggcggcaagccgtggtttccgcggtcgccggcgtagtaggcatgattcccgaaggcttggtgctgctgacttcgctgaacttcgcggtggccgccatgcgtctcgcccgtcacaatacgctggtgcaggagcttgaatccgtggagacactggctcgcgtggacgcgctgaacctcgataaaaccggcacgatcaccgatggcggtatcgccttcaaccggctcgtgatgctcgattccgccaatgcggctgcggaacaggcagccacgcaggccctctacgactgctgcaacgaagagcagcccaacggcaccggccaagccgtactcgccgggctcaaggcccaaggatatggggcaggtgcggttgagtctcgtgtcccgttctcttcggcgcgcaaatggagtgcggtgcgtaaatccggcgagacctggtacatgggagcgccggaggtgattatttctgcgcttgagggtgactattcgtcggtgttgcagcaggttaacgagtatgccaatgacggcaaccgtgtgttgcttgttgcgcggtctacagctcccctcagtccgcgaagcggactgagggacgcagttgagggagccaatgtctcggacggcccgcaactggatgtgcaggctgagccggtggcgttggtgttgtgctctgagaagattcgcgaggacgccgagcggacgctcgcttggttccgtgagcagggtgtgcgctgtcgtgtgatttccggtgacaatccagtgaccgtgggtgccatcgcccgcagagtgaaactgacaggcgaccatgagccggtggcgatggacgcgcgcgaactgcccgaggacgtgaacgaactggcccgcgtgctcgaaaacgtcgatgtgctcggccgcgtgctgcctgaccagaagaaggccatcgtgcaggcgttgcacacgcagaaccacgtggtggccatgaccggcgacggcgtcaacgacgcgctcgccatcaaggaggcggacctcggcatcgccatgggcaacgcggcacccgccaccaaagccgtggcccaggtggtgctggtggattccaagttctcgcacctgccggacgtcgtggcgcggggccgtcaggtcatggccaatatggagcgcgtggccagcctgttcctcgtcaaaaccgtgtactccgcgctgatctcgctcggcgtagtgctgacgcaaatcccatacccatacctgccgcgccatatcacctatatcggcgctctcaccatcggcatgcccgcgttcatcctggcgctcgcgccgaacacgcgccgctatattccgggattcctcaagcgcgtggtcacgttcgcgctgccgggcggcatcgccactgcgctgtcggtgctgctggccgcttgggtgctgccgccggtcatgggctggaacgtgaccggcgatgccgcggacctgtccgccctgcgcgccaccagcgccatcatcctgttcgcgatgggcgtgttcgtgctggcccgcgtggccagaccactcaacggttggcgtggcgtgctggtggcggtgttcgcggcggcgggcgtgatcggcgcgttcgtcccgttcgtggcgaacttcttcgccctgattctgccgaccggcgccacgatggtggccacgctgatcgcgttggccggttccgcgctgatcttcgcgctgtgcctgtggctggcgccgttcgtgcgcggactgacgggcaagctctcgcgtcggcattgagacggcggcgcgattgtctcatacttcaagccgacacgccagagcctcggtaacgtgcccgtaccatgtgtagcggataatcagcggcatcataagccgattcatgatttcggaggaagcatgtccttacgcgacgaccagctggctaccctcaaggcagccggcaaggacttcgattactacaacatcgccaatctcgacggcatcgatcatctgccgtactcgctgaaggtgctggtcgagaatctggtgcgcaacatcgacggtgccaacatcaccgacgagcacgtcaagaccctgctcgactgggatccgaacgccgaacccagccacgaaatccagttcacgccgtcccgcgtgatcatgcaggacttcaccggcgtgccctgcatcgtggacctcgccaccatgcgtgacgcggtcaaggacctcggcggcgacccggaggtcatcaacccgcaggtccagtccgatatggtcatcgaccattccgtgcagatcgacaagtacggcatcgccgacgcggtccagcaaaacatggacatcgaataccagcgcaacggtgaacgctaccagttcctgcgctggggtcagcaggcattcaagaacttccgcgtggtgccgccgggaaccggcattatccaccaggtcaacatcgaatacttggccaaggtggtcatgagcaaggccgaggccaacggcaacgcgctcgcctacctcgactcctgcgtgggcaccgactcgcacaccaccaccgaaaacggtctgggcgtgctcggctggggcgtcggcggcattgaagccgaggccgccatgctcggccagccgatctccatgctcgtgccgcgcgtggtcggcttcaagctcaccggctccatcccggagggcgttaccgccaccgatgtggtcctgaccatcaccgacatgctccgcaagcacggcgtggtcggtaagttcgtggaattctacggcgaaggcatcgcctccgtgccgctggccaaccgcgccaccatcggcaacatgggccccgagttcggctccacctgcggcatcttcccgattgacaatgtcacgctcgactacctgcgcctgaccggccgctccgaagagcaggtcgcgttggtcgaagcctacgccaaggccaacaagctgtggggcgacgcttccgacccggattacgtggaaccgcagtactccgaatacgaggaactcgacctcggtaccgtggtgccgtccatcgctggcccgaagcgcccgcaggaccgcattctgctgtccgaagccaagagcatgttcgagaagaccgcccccgcctacgagaccgagaagaccgtcaaggatccggtggccgtgtccaccgacttccgtggcgatttcgacatcgaaaacggcgacgtggccatcgcctcgatcacctcatgcaccaacacctccaatccgtccgtgatgatcgccgccggcctgatcgcccgcaacgcacatgccaagggccttaagcccaagccctgggtcaagacctcgctggctcccggctcgcaggtcgtggccgactacctcaaggccgcggggctgcaggacgacctcgatgcactcggctaccagcttgtcggcttcggctgcgccacctgcatcggcaactccggcccgctgctgcccgagatttccgaggcgatcaacgccaacgacctgaccgtcaccgccgtgctttccggcaaccgcaacttcgaaggccgcatcagcccggacgtcaagatgaactacctggcctccccgccgctggtcatcgcctacgcgctcgccggcacgatggacttcgacttcgagacccagccgctcggcaccgacgcggacggcaacgacgtgtacttgaaggacatctggcccaccaactccgaggtcgccgccgtggtcgacggcagcgtgagccgcgagatgttcctcaaggactacgcctccgtgttcgacggcgaccaccgctggaagggcctcgacgtgccggaaggcgagctgttcgcgtggaacgacaagtccacctatgtgcgcaagcagaccttcttcgacggcatgaaggccacgccggacccggtcgccgatatccacggcgcccgtgtgctggccctcctgggcgactcggtcaccaccgaccacatctccccggcaggcgcgttcaaggcctccagcccggccggcaagtacctgaccgagcgcggcgtggagccgaagaacttcaactcttacggttctcgccgaggcaaccacgagatcatggtgcgcggcacgttcggcaacatccgtctgcgcaaccagctgctcgcctccgtgggcgaggaggtgacgcctggcggcttcacctacgacttcctcgccaagaagccgaccacgatcttcgaagcctcccgcgactacatcgacaacaaggtgccgctcgtggtgctcgccggcaaggaatacggcaccggctcctcgcgcgactgggccgccaagggcacggtgatgctcggcgtcaaggccgtgatcaccgaaagcttcgagcgcatccaccgctccaacctgatcggcatgggcgtgctgccgctgcagttcccggcaggcgaatcctatgagtccctgggcctcaacggcaccgagacctacgatatcgccggcgtcgagaagctcaacgagggcgtgacccccaagacggtccacgtcaccgccacccacgaggacggctccaagaccgagttcgacgcggtggtccgcatcgacacgcccggtgaggccgactactaccgtaacggcggcatcctccagtacgtgctgcgcaacctcatgaagtaaccaccttcttggctcccctctcttgaggggagctgtcagcgaagctgactgaggggagcaaggccggtatccgccaacggataccggccttttccatgcatgccaaagtgctatactgtatagcatcttcgaaatggaggttgccatgaccatggtccaaatgaacgttcgcattgatgcgaaactgaagaacgaggtcgaagaagtcctcaagggcaaaggcgtatcggtgagtgacgtaatccggtcgctgtggttgtacatcgccgaccgcaaggaagtgccggcattggaaacgaccgccgaagagcaagcccgcgaggaggaaaagcagcgcaagctgaaactgattcgagaaggtgccggatacgtacacaaggaactggtcaaggccggactgatctcagaagacaccgacctcatggaaggccttacctacaagcagttccgcgacaaaatgtacgacgagcaacttgatgcgtattacaacatgaagagggccgattgatgaccgacgtttccatgcagcgtattttgcttgataccaacgtactgttggactatttgctccatcgcgatgatcacgccaagatggcggaagcggttatggaacttggcgcgaagaacaacgttacgttgttgtgcgcgtcattgtcgctgaaggatatcgcatacctatcatcatcggcgattcgtagggaattcaaaccgaatgaatcggaagtggagaatttcactcgcggctttctgtcgtcacgggtgccatggcgttgtatcgagcaggtgaaggagatgtgtgacatcgtcgctgtcgatgagtcgacatgtgatagggctttttccctgcaaaaacggcatcgggattttgaagatgatctgatcatcgttgccgcgcaacaatccggtgccaactgtgtggtcacatcggatgccgaattaatcagtcattttcccgaatattgcaaaacaccggctgaaatcgtggcggcgctggaataaatgagcgtgtggctcccctcacggaggggagccaccaatgatgtgccggctactgtagcctactgcgcctgtagacggaactgcttccagatgtcgctgagcttctgaccgttgcgcgtgcgcttccacacgtccagaccgccgccgcgacgtcctccggcggcggcacgggccgcggcggtcggagtcggatattcggagccgtcatccagacggagacgaccgttttcggtgaccgtggcgaaccagcgctcgcccttgcgcggccgctcccacaccagacgctcgcccggcaccagcagaccagcgtcaatcacctgccggatcgtgacgcgccgcgaactatgagacggccgtggagaggtcttcgacaactcatcgacattctgcttggtcagatcacgggcgtccttgtcataccggatgccccagtattccacgatgagtcggaccgactcttcctgccgcgcctccagcagggcaggtgtgcagtcagcgaaatccttcaactgattggtcagcgggaaacgacgtgaatccgcgcgcaacagcatgcggtcgcgacgtgccggatattcactcaacctgtccaactgatcctcagggccctgcaccagcgccatattgccgagtcggtacatccagaaatcatgctgatcctgcggccagtccgcaaacgatttcgaccgttcgatatccaacggcataatcggcagcgcactgaaccggcgtggtcgatccaactgcatgccggccttctgctcgttggcgcgaatcagcagcagacggaccaaatcgccgtcaccctgcatctcgccatgcaaacggaccaatgcgccttcacggtcgccgtccgagacatgcaacccgttcacgcgctggaccaaatagcccttgtcaagatcacggatggcggcgttcgcataaccgcgccgctccaacgctccagtgcgattcagcgtgcggatgccggtcacctgttccaatgcggtcagaatttccagcagccgacgctcgtcatgggcgcccaacgattccaacgtggccgtggttctggcgatacgcgaggcacgaaccacgaacggcgacaaatcggcgtcgcccagcccgcgatacgaattgaccaacgcccacatggccacgggcttccactcgtggctgcggtaatcgtccaatccctcaagccggctacgcacctcggcgggcagtacggtatcgctggggcgcgcgatgatccgccacgccatcgcgtagggtgccagcacctggttgatgaacgtgggcaccgtgcctttgtcgatgtacggttgcagcacgtcggccaggaaatcctcgatgagcttgtcggtggccggcttgtgcgtgagtacgagatgcagataggcgaagaattcctcacagtcatgcggatcgtcgccaagcgggtcaatgatgtcatcccaacgggctgcgtacacgtcaagttcggcggtcgacaggctggccgtggcgcgcgccttgaacacgtcggacggggtgagcggcaggccgcgcatgttcatcacgtcgaagatgcgatgcgcgccgtcgagatcgtcggtggtcacgatgacgagcgtcacctcgttgaccagatactgcgcgaattgctggcgttcggatgccgaccaattggagatctcgtcgtacgtcttgcggatgttggcgacgatgttgcgttgcgcagcggtcgccagatcgtcgtcgttcatgtcgaacacggattcgaggttgtcctcctgcacgtgttcgcggaagaacgccgcgtcgcgctcgcgcaacgtgaggcgaggctcggtgacgatgccgcgcagcttgtcgccgggctccaccagcagcgcgtcgagttggcgcatgaggtccgggtctcgctccagatcgcgcagcacggcgatgatgatcgacagggataccagccgctgctgcccgtcgatcacgtcataacggttgtcgccctcgcgtaccagaatcagcgagccgaggaagtacggggtaccgggtgacttgcaggcgtcgtccaagtcgcttaccagttgcaggatgttctcggccttccatatgtaggcccgctggaatgaggggattgtgaaccggaaatccggggtgaacactttcccgagtggtagttccttcgcgctgattgccatgtcaatcccttcgtcgccggcctttggacggtatgccgacgtgccgactgtgctcaagcctaccagtgttcgcccggcggcgggcgcatcacgccggctcgggcaccgacccctcgtacaagtagaacgaagacgggttttctcccggcccggatgcgggcagtgactgctcgcacacctgcgtcaggccgcgatgtacatagaatccgacatcgcacgtggtatccgtgaataggaagtactgacgtatgccggctgcgtggaatgcgctcatcatcgtctcgaacatgcgccggcccagaccgtgaccgcgcgccgccggatcaagtacgaacagcaccacttcagccgaatactcatggccaatgttcgccgcctgcttacgcagttgcctatcgacatgaagagtcccgagaatctcgctcgcagctgccatgccgtcgtgggcaaacgccagttgcaatagcttgcgcaacgaatgacgccggtgcatgttcagcgggctgcgatggtcgagctcgtcgatacgccccacaatcaatgcgacgggtttatcttccagctccgcgacaaaggccgtggtcacacgtgccagacagttctcccaatcggcctcggctgccagcaagccggtccgctcatcatattcggcgtaccaagtgcggcgcaccaggtcgatcagcgccggataatcgtctttacgtaacgttcgaataatcgcttcactcatgttctccattatgactgatatggctcgataacccgacgtgttacagtcgcgccggcaaatcggcccgctccaccagcctcgccatctgtacgcggcccatattgagcttgtccgccgcggaggagagatgcgccttggccgtacgctccgagataaacatacgggaggcgatttcggcgttgggctatgtgctgcaagacgattcgccgattacggtgcatgccacgcgcatggtggaaacgcccgttacgctttgcgatgagcagaacgagccgatcgatcctattcatggaatgttcagctttgttcctctaagattggtactggaacaaacgctaaaggagcgattatgacattcggtcagcagccccagaacaacgggcaatacaacccgcgatacaacacgcctgattacaacgccgcccaacagtctggatatggccagcaatacgcacagtccggttacggccagaactactatgcccagccgcagggcgcccccacctaccagtacgcgccgcaggatgcggccggtgccggcgcgggtgccgccaccatcaacacgacgatgacctacaactacgaggaggcccgccgcgtctccgtagccaaggtgtacggcgagatgaccatcggcatcctcgtcaccgccgtggtcgccgtgctcggccagatcaccggagcctactacagcttcctcatggccaccggcatggtgggcctcatcggcctgtgcgtggtgcagattgccctggccgtggtgctcggcatgcgcgtcaccaagatgaagtcggccactgcgcgcgtcatgttctatgtgtacgccgcattgatgggcttcaccttgagctcgatcttcatggtctacgacctcggctcgatcggcgtggcactcggtgtcaccgcagcgttcttcttcgcgctgaccatgttcggcatgactaccaagttcgacatgctcaaggccggcccgatcctgatgatcggcctgatcgtgctcatcatctcgcagatcgtgctcgccttcgtgcaggtcgacggcatgaccaagatcgtctgcgccatcggcctgatcctgttcgccggcatggccatctacgacgcgcagtccacgcgcgcgctgctgaccgaatacgaggcccagggcccggaaatggtcaagaagatctccatcctgtgtgccctgaacctgtacctcgacttcgtgaacatgttcctgtacatcctgcagctgctcggcaacagggactagcctcgccagccgattggtgggcggcatgtagcctgctcgtcaaacgtcacagcccgaccacattgtggccgggctttttcatgtctgtcacattcgcacgttaggctgtctccccgtgaaaagacaagaactcgtaggcatgctgagcctgttgttgaccgcgctgatctggggttttgcgttcgtggcgcaggtccagggtatggattcgatgtcgccgatgttcttcaacgccacgcgcttcacgctgggagcactgtctttggtgccgattctgctgtggcagcgtggccgggggagcgcggataagggcgatacagccggggccgatgtcgttggggccgaggcatccggggccgtctccacagatgccgcatcgaacggtgcatccgacgtcgttaccatcaccggtgccaagctgaatgcgaacaagcccgattcggccgtggcgcgattgctcgccaacccggtggtcatttccgtgatctgcggcatcgtgctgttcaccgccagcaccctgcagcagtatggcattctgtacggcaaatcggccggccgcgcgggattcctgaccgccatgtacatcgtgatggtgccgttgctggcctgcgtgttcctgcgccggcgcatcggcatgctggtgttcgtggccgtggtgctgtccatcgccggcttctatctgctgtgcatcaccgatggtttcggttcgatcggcctggcggatatcctgctcgtgttcacggccgtgctgttcgccgtgcatattctggtgatcgatactttgggcggcaccgtggacgccatcaagctttcattcggccagttctgcaccaccgccgtgctgagctgggcgggttcgctgatcgaaggctcggtcgactgggccggcgctgctcattcctggattccgattctgtacgccggcatcggctcggtgggcatcgcgtacaccttgcaggtggtcggccagcaatgggtgccaccgacgcgagccagcctgctgatgagcctcgaatcgttcttctcggcggtaggcggtgcgttgcttctcggtgaagtgatgaccccgcgcggttacctcggctgcgccctcatcttcctcggcaccctgctggcccaagcgccggccaggctgccgaagtggctgcaacggtgaatgaatcggacgcaggccgattccatagcacctcagtccgtggtcttaggcgcttcacccacttgcggcgcgccgttgatgtcgcggtggatgttctgcatttgcacttcgatgttctgcagcgaacgggcgcagtcgagcagtgtctgtgaatgctcgctgagcttgttgtccggcaaatcggtcttgtagcgcagcgcatgctccagcgacgcccaataatccatggcgatggtacggaactgcacctccaccggtgtgtaatgcgcgcccgaggagagaaacacgggcaccgcgtagattacgtgcaatgaacgatacccgttctgtttcgggttcttgatgtaatccttgacgcgcagcacctgaatatcggactgcgacgacagatagttggacacggaatacacgtcgtcgcggtaattacagatcacgcggatgccggccacatcgaacagattgtccttaatcgaattgacactgattggcagattcttgcgctccagcttgccaatgatcgaactcaccgacttcagacggcgttccatatgatgtatcgggtcatggctgaaccgcacctggaactcgtcgtcgagaatctccagcttggtgctgatctcgtacatcgcgccttcatacacctgcatgaggtcaacgaatttaacgacctgttcgggagtgaaggtgcctcccggaagatccaacgctttgagacgggcctgcagatcggaggttttgagtcggctatgtcggtcaagtatcacgtccaccaatatactcggcggattccagacaatctggatgttcgcggggaatctttccaagaacccatatttaagatcgtgacaaccaatggcatacgtgaccggagcatgacgaaccccgccgatagaatcggtcgttatgaatgaagacatgatgaccgaggcggagcgtgcctcgattgcagccgatggaaccgatagcttgttgggggagcgcggcaagggcgtattccatatccacacgctcggctgccagatgaacgtgcacgattccgagcgcatcgccggcgtgctggaggccaatggctacgtccctgcaaccgaggaccagatcaatgacaatgacctcgatctgctggtgctcaatacctgtgcggtacgcgagaacgcagccgaacgcatgtatggcaccatcggccgattcaatcgcgtcaaactggttcggccgaacctgcagatcgccgttggcggctgcatggcccagcttgaccgcaagaagatcgcggatactgcgccatgggtttccgcggtgttcggtaccaagaacatcgaagatctgcccaagctattggatcagaatcgtgcgaccggcaaggcgcaggtccaggtcactgaacaattgcggcagttcccgagccagcttcccgccgcccgcgcctcccgcatcagctcgtgggtggcgatttccgtgggctgcaataacacctgcacgttctgtattgtgcccaccacgcgaggcaaggaaaaggaccgccgccccggtgacattcttgatgagattcgccaatgtgtggccgatggtgccaaggaggtcacgcttctcggccagaacgtgaactcgtttggttatggtattggcgatcgatacgctttcagcaagctgttgcgcgcctgtggaaccatcgacggtctcgaacgtgtgcgcttcacttcgccgcacccggccgccttcaccgatgatgtgattgcagccatggccgaaacgccgaatatcatgcatcaactgcacttcccgctgcagtccggttccgaccgcatcctgcgcgcgatgcgccgctcctacaggtccgccaagttcctcgatatcttgggccgcatccgcgaggccatgcccgacgcacagatttccaccgatatcatcgttggattccccggcgaaaccgaggaggacttccagcagaccatggacgtggtgcgccaggcgcgcttctcctcggcgttcacgttcatctactcgccacgccccggcacgccggccgccgcaatggaacagattccgcgcgacgtggtgcaggaccggttcgac

SEQ ID NO: 2748 - DNA, 3309 bp, Unknown
  R36_18m  MAG No. k141_13376
ccattggcagtatgcgagtacccatccggcccagtattcgggtgttgagccggcgcgcagtgcggctggcggcatatcgagaatgcgcgcccaaccggtttgccgcatgacttcggccaccagctcctcgccggacatgccacacacgtatttgggcgtgcctcgcccgaaaagcgcggccgcctcggaggtggcgaagaagtccatgaataggccgaccggcaacccgcaatcgttcagcgcataatcgaaggcgccggccaagttggccatggcgtccggcaagtatgtcccatcataggcggggatcatcgttggtcactttctcgcggatgatgtcgcgcatgaacaggccgtcgagatcggcttctgcacttttgcggcggtaggcttcgcgagctgtgcggtcgcgctcgttacgcaatccgtggtaggtcgaagcgcgggcgatttcgcagccttggaaccgcagtgccgcgaatgcctgaggactggcgagtacgatctgcttgccgagctcgcccaaccgcatcgcctcagcgagttggtcgatggaaatcgcgttattgacaaaagcgcgggcgaacgagaaatacgaatcgtcggcacgatatccgacgatgacgtcagcctgactggcatccggcagaaacacttgtttcagatattcgatgccttgcgcggcgacggcggtggtcggctggaaacgacggttttcgaccagcatggccagccagttcaggatggtgtagggcggctgggacaggtccaggaagaggagcccgtccgtggtcaacgtgtaccgattcgcgaaaccgtcatccagtcccgcgcacgcccattccttggccagctcgacgctgcgcgtgcaatagaatccgcggccataatcgttgttcggcttgaccagcccgtattcaggatgcttgatgacatgcgaagagccatgccacagttcgatcgatgcggtctccattggccggctccttctctctccttacatattcttgattatatcactgtggtgatagccataggggaaatacgagatgaaaaataccgctgtatacgttcgtacacaacgtgaaatgtatacgaacgtatacaacactgatgtccggagtcatgctccgcagtggcgcagcggacgcgccactacaatcggaatatgggactgaagacgtggaagaagtggacggactggccgctgatggtgctgtccgtggtgtttctggtggtgtattcgtgggaaattctctcccgcacgcatatcgcgctgtgtgaaaccgtcatcaacgtgatctgggtggtgttcgtcgtcgattatgtggtctcgctgtggttggccgacgatcgctggcagtggttcaagcacaacctgttcacgctgctgaccatcgcgctgccgatgctccggcccttgcgactgttgcgtttgctgaccgtgctgcacgtgctgaaccgcacctccggcatggcggtgcgcgggcgcatcaccgtatacgcggtcggcgcggtgggaatgctcatgtacgtgggcgcgctggccgtgtattccgtggagcgcggggcgtccggatccacgatcaccgacttcggcacggcgttgtggtgggcgttcgtgaccgtgaccaccgtgggatatggcgacttctcgccggtcaccttccaaggcaagatcattgcggtggtgctgatgttcaccggcatcgcgttgatcggtattgtgacggccacgctggcttcgtggatcgtggatcaggtcaatctggagacggatcggcgcgaggacgctcgggagaaggaagtggccaaggaagccgcgcaagaggctattgcaacatcagccaatcccgaaatcgacctattgcgcgaggaagtgcgtgagctgaccgctacggtagccggtctgcgcaccgaacttgagcgacgttgattggcgaagcgggacaaacaacgattctgccaagaaggtccgcgtcagttgttgtcaccgcggattgcggcagaatcattgtcgccacggctgttttcttcagtcggctcaacccaacttttgataatttttatttttttgatatttttgataatttttattttaggttgattcagcgaggaggcggtccacatgaaggcaaaggaaaacccattcaagccaacggcaggaggggaaccgcccctgctcatcggccgaggcaaagttatccgcgatttcgagaaaggtctcgataacggagtcggtgccccagggcgcattatgctcgtcaccggcgctcgtggaaccggaaaaaccgtgatgctcactgtgttcggagaccgggccaaagcgcgcagatgggatgtcatcgaagaaacggcctctgccggactatgcgaacgccttgttgatgccttacgaaccgggcgaggggcccttgaccacctcactatccgaccatcgttgacttttgctggagcgggcatcggcctcggagaagccgaactatccccgaagcgtatgcccgaaacgttgagaagtgccattgccggacggttggatgcgcttgagaagcgccatgctgggttgcttatcaccattgatgagactcaagcggctgagcgatccgacatgattgccatcgccactgccatacagcatcaaatcagggaacgacgcaatatcgccatcgtgttcgccggtctcccacagatgatttctgatttgttcaatgacgaagtcatcacgttcctacgtcgcgcgaaaacgaacatactcacagatattcctcttgatgaagtgcgcgatgctttcgccacaacattccgcgcctccggcatgtccatcaccgacgctcaattaagcactgcagccaatgtgacagccggatacccctatatgattcaactggttggctaccatatctgggatgccgcagacatgcgggactcggataccatcatcgacgctgatgttacggcaggtatcgaggaagcacgtattgaccttgataacgccgtgtgcatcccggagttgcaaggcttatccaaaaacgaccgtgagtatctcgaagccatggcagcgtcagatggtccctctcccaccgtgaatgttgcacagcgcatgggcaaaacgcctaactatgccgccacctaccgcaaacgcctccttgacgccttcgttatccgcgaaacagaacgaggcgaagtcgattttgccgtgcccttcctgcgcgaatacttgcgtcggaatcagtaatcggcacaatgcacagtatcgatatattccgttccatataatgacttttcgcattcagatacacaatggacggc

SEQ ID NO: 2749 - DNA, 26837 bp, Unknown
  R36_18m  MAG No. k141_13496
ccattgccggcctcgcccaaaaggaggtctccagcctgaccgtcacgccaagcaaaaccacctatcaggtgggcgatgccatcgatgccgaccatgatctcaaggtcgtgggcaactattccgcaggcatgggcaacgtgacgctttccgccgaccagttcacgctcgattacgatttctccgctcccgctgatgcggcgaaggttaccgtaacgctcaagtcgaatccgaatgtcaccgaaacttatacggttgcggttaccgctcgggccgaaggtggttccggcaacggctcggacggtgcgggtaatggcggggctactatcaatcccgatacgggcgagggcgataagaccaacggtgcgaatggcgacaagatcactggtgtgctgagcaataccggtagcgcggtgactgccgtgggtcttgcggttgtcgttctcggcgtggccggcggggtctcgcttgctttgcgtcgtaagcgctcctgatagagactgatgcggcattatgatgcggttgccggcagccggcaaccggctgccagatgccatctgtcggctgtcgtttatcggttgtcggctgtcagatgcgtctgtctcggcgcagcgatgcgattctgtcccggttcgtgcatcaatcgtttgatgtgggtaccaggacagaaatcactgtcctggtttgcgaaaacgggtgtttttcgcgtaccgggacaattcccgttgccccggtttgcacgtcaatcgttctacgtgagaaccgggacagtatgttgatttcgggattggctgtattccgccgattctgtttgtcggggtatgtggactttggggattgtcttgtcctggttctcgaaaatggcccgaaattgcgtaccgggacaacgatttctgccccggtgcaaacgtcaatcgattgacgcctgtaccggggcaaattcgcgcccgggaacaatagggcgagggccggtcgcaggagtagagcgtgatgttgtcatgattgcgcccggctctcccacacggaaggccgggcgcaatcatgccgtttggttgcagcacccgcacatcgcctgcataaccgtgtacagtggcgtgtagttgcagtacatgaaggagcatcacaagccatgaccaacggacacatcaatcccgccaacgtgccggacatcgccttgaaagacggccattccattccgcaggtcggccttggcgtgctacgtatcgatgacgagggcgtggcccctgtcgtcgaatctgcgctggaagccggataccgccacatcgatggcgccgccggatacaacaacgaggccggcgtgggtcgtgcgctcgccgcttccggatacaacaccggtgccaagcgcgagaccctgtgggtcaccaccaagctgcgcgactccgagcagggctacgactccgcgctcaaggcattcgacaactccctgaaactcctccagctcgattacgtggacatgtacatgatccattggcccacgccgttcgactggcgcagcaccgacacctggaaggcgttcgtcaagctgcgcgacgaaggcatggcacgcacgctcggcgtatgcaacttcatgcccgccgatctgaagcgtctgcacggggagaccggcgcatggccggccgtcaatcagattgagctgcaccccacgtggcagcagcgcgaagtggtggcgttctgcaagaagcacggcatcgccgtggaggcctactcgccgatggcgcgtggcgccgacctcaacgccggcgacggcaccatcgagaagatcgccgccgcccatgaggtcagcccggcccaggtgattctgcgctggcacatcgaaaacggcacgatcatcatccccaagtccgtgcatgccgaccgtcagagggagaatctcgacctgttcggcttcgccctgaccgccgatgaacacgctgccatcgacgccctcgacggccccacccgcgccggccacgaccccctcaccttcacctatgcgtgattgatggcacgtcgtaacgcccactttcgccgtcgtttcaacgcctctggaccgctggagcgcgtgctgattctcatcgttctcgccgtagcaatcggcgtgaccatcggcctgttactgccgcaggtcagctccgacgtggccaaaatcaccggtggctacactgccgccggttcagccgccgacactttgaacgcgctcgccgtagacgacaaccaaagctcctccggctacgaccgcgattccttcggtttccgcaccaccgacgtcgacggcaatggctgcgacgtacgcgacgacgtgctcgcccgcgatctcacggacatcacctacaaatacgccggttcctgtgtggtcgagtccggcacactggccgatccgtacaccgcccagaccatccatttcgtacgtggccgcgccaccagcgccaaagtgcagatcgaccatgtggtggcccttgaaaacgcttggcaatccggtgcgcacgactggtccactgccaaacgccatgaattcggcaatgacccctataacctgctggccgtcgacggtccggccaatcaggagaagggttcggcttccgccgcctactggctacccaccaacgccgactaccgttgcgactacgtggcccgccagattggcgtcaaagacaagtaccagctcaccgtcacctcccaagaaaaggacgccatgctcgccgtcctccacgcctgcccgggccaggccgtgcccgcagacgaataggggctaccgctcaggattgttgagcataggtgcctgcccctcgtcataagcgcgcaggagccgtcggagcaaaaatgtggtgaagtatggtgcggtgaacacgtgtttgctgctaccgatattgccggcggatagtttcacgccgaactgaatttccggataagaatccgaagcgattagcgtccgcatggatttggcggtgccttttttcgatttcacctccaccggcaccagccattcgcgcgtgcggacgaagaaatcctgttccagtgtggaatcctcttttttgtagtagtacaggtcatagccggatttccgtagcgcttcagagacgatgctctcgtacatagcacccttatagacaccaagattacgattggcccgcagatcatcactggcctcgtcgtcaagcatcgctacgaacagaccggtatcgccgaaatatatcttgaacttgttttcgtcataattgcctttcaacggcagttcaggataggacatacatcggcagatattcaccattcccgaggtttcaagccattccacgcatcctcgatagtctttgaaacgcgctccgctggcaaccttgctgatttggaacttcttgttttccttggcgagttgcacgggaatatggttgaacacgttgagaattcgtgcctgatcgggtccttgcgtgtatttgcggatatcctcctggtagtccaaaataagctggcgctgcaattgcagtgttccctcgaacgtgccagtgcgtatatgggaggcgacaaccgcaggcatgccgccaagcacgcagtaatccataaatgccgtggagaagacgttcatttccacttcagagaatggcgtagcatcacacaggtgggtgaacatgctttcgatgacggcctcatcgtatccgcgagcccacagaaattcttcgaagtccaacgatcgcatttcgtagtcggtcttatatcccacgctattgctttcgatttgcttatagctgatgcccaacattgaaccgctgcaaatcacatcatatttgccgtcgattttaaagaacttcagtgcagtggcgatatcaggatgggcctggatttcgtcgaaaaagatgagcgtatcgcccggaatgaactttttagctgggtcgatcagggaaatattgcggacgatggtattcgcgccataaccgtccgcagtgattgcacgatatttcggttcctcaacgaagttgatttccactaccgaacggtagttgtgtgcggcaaagtaatcgatagtctctgtcttgcctacttgacgagggcccttgatgattagcggggagcgattcgggtcggatttccatgcattgagataggcatcggctttgcgtttgagatacatgaggagcccctttccgaattactgctatatcaatgattttacactttcatgagcgagttttctaccgtctggcacatttcatgagcgagttttcggcggtttttcacatttcatgagcgagatggcgggaaatgccagctgccagtccgccggtcatccatcaatcgtccgcagattgtccgtctgttgactcgggaaacatgcctgcgctataactgtgcgcggtatgaagggaacaggtacaaacgatatggcagtaacacacaccgaagcagatgccactgcggcaaccgctatgacgaacgctgtggcagacatcgaacaggaaacaccggaaatcgggaaggaacgccagcttgccggagtcggaaccggggccggagcagggacgaataacaataagaagccgcatgaccatgcgctggccagcatccttggtcccgcgttcgtggcggccgtggcctacgtcgatcctggcaacgtggcggccaacatcacctccggcgcgcgatacggctacctgttggtgtgggtgctggtgctcgccaacgccatgagcgtgctcatccagtatcagtccgccaaactcggcatcgtgaccaacaaatccctgccggaactgctgggcgagcgtatgagcgatgccggccgcttcatgttcttcatgcaggccgaggtcatcgccatcgccaccgatctggccgaggtgatcggcggtgccatcgccctgaacctgctgttcggattgccgctgttcatcggcggtctggtgatcggcgcaatctccacggtgatgctgtggttccaaggcggcaagacacagaccacattcgagcgcatcatcatcgtgatgctgctgattatcacattcggtttcatcgcgggtctgttcgtagccccgccgaaccccggcgaagtggtcaaaggcatgattccacgcttccaaggcgccgactcggtgttgatggccgcctcgattctgggcgccaccgtgatgccgcacgccatctacctgcactccacgctggtgaacgaccattacgcaggcggcgaaaagccgtcgatcaaaacgcagctgagaggctcgaaaatcgatgtggcctgggcgctgttgctggccggcaccgtgaatctggcgatgctggtgctcgccgccaactcgctgcatggcatgtctggcacggactccatcgacggcgcacagcgggcgatcacgcaggtgctcggcccggtgatcggcacgatcttttccatcggcctgctggcttcgtcgctgagctccacatcggtcggcacgtacgccggctcggaaatcatgcacggtctgctgcacgtcaacgccccgatgtgggcctgccgcgtggtcacgctggtgccggcactgattgtgctgtggttcgccaaggacccgactcaggcgctggtcatcggccaggtggtgctttccatcggcatcccgttcgccgtgattccgctgatgcgatacacgcataacaaggaactcatgggcaagtgggctgatggaaccgtcaagcacgtgatctttatgatcgtcgtggcgctgattgtggcgttgaacgtgctgctgattgtcctgacgctaatgggcagggcgtaatagactccagctgaaatcctgcgatagcacaacataataagaagccccggtgttggaaaccggggtttcttattatgttgagaatggttggatctgccgtcagttcgcagccatacgccgcgcacgccgttcgcgcagcgcgcgcaaggaaataatgtctcgcgtacgaccggcaccgtcgcccttgacgccgaagaacaccatcaacaccattgccagacagatcattgcggagatgcgcagcgcccattgaatgccgaaaatcgaagcggcgacggcggaggcgccgccctgcttatgcaaagcggcaaacgtttccatcagaatcaccaacacgggtgcgcccacagcgcccgcaatctgacgcgcggtattcgtcaccgatgatccggcggacacttcgctcggcccgttcaggcaattcagggaccacgtggtaatcggcatcagcaggaaacccatgccgatctgacggatgaactggcagatcgatacccaccagatccacgtatccatcgccaccagcgacatgcccaaggtgccaagggtcaacacaatcgaaccgaacaaagccaccgggcgcgcgccgaaccgatccatcgcgcggccgccgaagaactgggagacgcactggccgatagcgcccggcagcatgatcagaccgctcatcgtggccgaatagccgcggtcagtctggatgtagagcggcatgatgaccagaatcgaactgaaggcgaaaaatgccagcgacgcggtaatggtgccgacggtgaacgaagggttcttcagcacttccaagtccagcagcggcggctgggggagtgccgactcgtccttggctacggcctcgcgataccgcttgccagcgcgcaggttgcgcatcacaaaccacacgatgccgaccagtcccacaaccatcggcccccacgtgaccggtgccgcgaatccataggtctctgaattggtgaagccgaacataagcccgccaaagccgatcaccgacaggcatgccgagaagaagtccgcgcgggccgaagggtcgtgtgaaccgaaattatgcagtccgaacatggccgccagcagcgagattacgccaatgatggtcatggtcaggaagatcgagcgccagccgttggcatcggtctgccagccgcccaaggtggggccgattgccggagccacgctcatggccatgcccaccgtgcccatggcaaagccgcgtcgggacagcgggtagatggagaacacggtgatttgcagcaccggccacatcacgcctgtgccggcagcttcgagcacgcgcccgaccaacacccatacgaagtttggccccaaccatgccagcacggagccgattgtgaacaccgccatcgagcagatgacgatctggcgggtggagaagcgtcgggtcagaaacgcggtcagcggcaccatcacgcccatgaccagctggaacacggaggtgagccactgcccggtggttacggagatgtggaattcggaaacgataatcggcagcgcggaactcagctgcaactgcgtgaagttgcccacgaaggtaatgaaggtcaatatcgcgatggagatgaacgccgcccggctgagtttgccgtctacatatgattcctcgcggctcagcacccgctgcagttcgccgcgacgatttttgattccccgagctccgttcattccactcacgtgcatactccactctcgctgatcgaccgcaacaacgcatcaggcagtttctcaaagcaaccccaacacgctacacccaggggtagtccgtcgagatgcaatgccgagatgactggccgcccggttgcagagcaaattagtcccgttattcgagacgtcaaaatgaacgtagttactatccgatcacgttcgctatgtggttttccaacacccccccccctagcggttaggggtgtgatgtctgtaccatgttgaaggggtaaccccgtatacacccgtacacaggggaatccagagaagtgagagccgcgagacctgcggtatacggtcgaaaaggaagaattggtgtctgagatgtcatctatgagcagtaacggtcagccgtctacacgcagcagacaggccaatggcggtgaccgaaccaccgctcagctcagtgatatccgccaaaagcagctcagccacgtgctgtactggcgattcttcatcaatctcgccctcatgcttatcgacgccgccatgtacatcatcgccggagccacggtgctcaatctgcgtcatgaggcaatgccgttctattcaatgagattcggctttacgattgagtccaccatttatcttattattgtggccgccttctgggtgtggtcgctctatgttgtcggcatttatcaccgccatgttatgggtgacggttaccagctcaatgtgctgctggtcaaaggcatggtcgtgtgctgggtggtgcagtgcgcgttcaactacttcttcgatctgggtctgacccttacctcgctctgcttggtggtgattgccggatggttgctcaccatggtggaacgcattgccagccgtgcattcattacgtgtagtcgtcgcaagggcgcctacgcttatggcacggtgatcatcggttccccgcacggcattggtcgcacgctacaattcctcggtcagcgtcggcaactcaactaccgcccggtggcagtatgcccgattcatctcaatcccgataccggattgattgaacagagcaccgaccatgagacactccgtgaggagatgcaaaagaacgagggctgccagctgcccgtactcgagtacagcgatcataatcttgctgaacagattattgacatgaacgcgcagaccgttatggtggctgacgagctgcatcgctattcggataattacgatatcttctccgtgcgcatggaatcgttcggtctggagattgccgtgctggcttccgccgctgacacttctaaccatgagattcaggttcgatccatacagggcaccacgattatcacgcaacgtcttgcgcaatacacgccagcccgccgtatggctaagcgcctgtttgacttggtgatttcttcgctagcgatcatctgttcgttgattatcaccatcccggtggcgatcgccatcaaagtcacggacggcggaccggtgttctacaagcagacccgtatgggcctgcgcggcaagccgttccagatgtacaagttccgttcgatggtggtgaatgccgatgcgctcaagaaggagctcgcaaaagaaaccggccagaccgaccgcttcatcttcaagatgaagaacgacccacgcatcaccaaggtggggcatttcattcgccgcttctccattgacgagttgccgcagttcctcaacgtgtggatgggcgatatgtccgtagtggggccgcgcccgccgctgcctgaggaatacgcccgttacaaccgtctgtacgccacccgcatgctggtcaagcccggcatcaccggtccgtggcaagtgtccggccgctccgatttgtctgccgaagagagcgaggcccttgatgtggcttacgtgcagaactggtcgattatgggagacattgtgcttctcttccgcacggtcggtgccgtgctgagccataaaggagcgtactgattccttcccgtttcgctgctacagttttgccgcgcccttgccgcaccgcccttgaacgtgattccagaaagataagtcgatatatctatgactgactcgaacataccagaaatacctcagccgccggcaccctccgagcggtcggaaaacgcggatggtcgccaagtgatacagccgtatgttgaccccgaggtacttgctgaagacgctcgagcggcggaacggcgtaagcaccgcaggcgtatgagccatgaacatatcaggcggatcaagcgcaaaaagcgcattcgtattgtgctgattgtaatcggcgcactgctgttgattattgccgcgctcgcggcgtggctcggcctttccgcgctcaaagcgaaaaatgaagtggaagcagcgattcaggccgcaagccgcatccaatcacaagttcaagcaggcgacaccgacaaagcgcaagccagcattgaagcattctctcagcatatcgacaatacttatgcgcagactaagcagccggtatggaaactggccacattggttccctattacggttctgacgtgaaggccgcgcgagacatggtgcacattttggaagacgtgtcgaacaacgcattgccgaagcttgccaaggcggcgcaggccttggatttcaacagcatcggtatcaaagacggcacgattcagctgggggatatggccagcgtggctcaggatcttgccgccgccaatggagtagtggcggatgccagcgtagacatgggtaagattggcgatacgcatattccgcagattaccgaggcggtgcagcaggggcgtagcaagttcaaggagcttgccagactgacggatgcggccagtcggctggcggatgtgctgcccaagatgttcgacttggatagcagcgagggtagtagcagtggcccgcgaacctacctggtgttggcgcagaacaatgccgagttgcgtgccacgggaggcattccaactgcgtgggccacactcaccgtcgataccggcaagatcagcatgagcacgttcggcgatccgcctcggaatggtctgttcagccaggatgaagccgcgagcgtactgacggcggaagaacgcaatctcttctccaccaagatggccacagactacccggacatcaatttcactcccgatttcccccgcgtcgctgatatcgcgagtcagatctggcatcgagccggtcatgacgatgtggatggcgtcatcagcgtggacccggtgttcctgcagcggttattgaaggttgctggccccgtgacgctctccgacggcacggtgatgagcggcgacaatgccgagcagcgaattctgaaccagatttatattgataccgatacacaggcggagcaaaccgacttcttcacgatggcggccagtgagatcttcactcatgtgctcaagaatgtggacggcaagaatcagcagctggtgcaaacgttccagaagtccgtatccgacggccatctgtatgtatggagtgctcatgaagatgagcagcagcgtatctcgggtacgaccatcgccggcgaattgcagtcgaacccggctcattcggttacgggcgtgtacttcaacgacgccaccatgggcaagatggactggtacctgaagcgtgaagtgaccagtacatatgacaaaacctatcccagtggcgccaagcaatacaccattcacatcaaactgacgaatacggccgatgccgccaaggtgaatgccgctccggatctgttgcgcggctatgaccataacggcaacccccgtacaggggagatcgaaacggtgctgtacgtctacgcccccgatgaagggcgcattgtggattggacccaggatttcgatcagttcgctgtgcacgatggactgacggtgggtgtgaaaaccgtgacattgcggccgggggaaagtttcgagaccacggtgcatgtgctggccagtcctgcggccgatgagaatgaaatgattttgagacagacccccttggttgattaaagggtcaacccctatacattaaggtggaatcatgaataaggaagaacggagtatggctgtggatgaagctgaacaggtgcaggatggtaatggagtcaccattctcgatttattcaatgcggtaagaaagcatgtgattaccgcagtggtcacactggttattgtgatggtggcaatctgcgcgtacacctttacccgcactccgcaatacaccgcgacttccgaactcttggccacttatcgcagttcagcggctgcagcgggcgcatccagcaatgcaggcgagctgagctctggcgccaattacatcaatagccagattcaaacgtatccgcaattggtaaaaaccgagtccgtattgcagccggttattgatgatctggggcttgacaccacggtaaagggattggctgcgagcgttaccgcttccaacccggatgacaccatgctggtggatatttcggttaataatccagacccgaagcaggcgtccagcattgccaattcggttgccgaaaacctgagaaaacaggttacttccacgatttacagcgatgagggcgataagatcttctctcccgtcaacctgactgtggtgcagcaggcgtacgctccggcttcccccagctcacccaacgtcaagctcaatctggcggcaggtcttgcggtcggtgtcattctcggcatcgtggttgcctttatcaaggatttgctggacacccgtgttcgccgcgattctgatgttaccgctgttatcgatgcccccgtactggggtcgctgagccgcaatgaggcttatgccggtacgtcgccggtgattatctcccgcccggcctcccgcgaggcagaagagattcgacgtctgcgcaccaatgtgatgttcgtgctgcccgatgagccgttatccaatgtaattgtggtgacttccgccggcccgtccgaaggcaagaccacgctgagcgtcaatctggcgaccgcatttgctgagaacgatagcaaggtgctgttgatcgatgccgatgtgcgcaacccctcggtgagcaaggccctaggcattgagggcgcagtgggcttgacccatctgattaccaaccgtgtatcgtcgcatgatgcgattcaacgctactggaagccgaacttccacgtgcttcctgctggaaaacaaaccatgaaccccagcattctgatgaattcccgcgctatgaaggcactggttgagcaggtttccggagcctatgactatgtgattattgataccgcccccatgcaggtggccaatgatgccgccgtattcgccaaggaagggccagaactgctgctggtggccggcttgggagtgacggaaaagaaactgctccggcagaccgggcgcgaactgagcacactgagcatcgatcccgtgggcttggccatgaattacggcgagacggagaagccccagaagggtggctattactactacggcgacgagtccgacgacaacggcaggaagcgccaaatccagcacaaaaagagcgagaaaacgaagaaagactgaggccatgaggatcgcgttcatcggccacaaacgcattccgtctcgcgaaggtggcattgaaatcgttgtggacgaactggctacacgtatggctgcacgcggggagcaggtcgtggtttataaccgcaaaggccacaatgtggccggtgaggagttcgacaaccagtcgagcaccagtgacaagccgtatatgtatcggggagtgaaggtcattcccgtcacgaccatcgacgccaagggactggccgccctcacgtcctctttcttcgccacgttgaaggcgatcaaggcccgtccggatgtgatccactaccatgcggagggcccgtgcgtgccgcttcgtctggcgcattggttcggcatccgcaccgtcgcgacgatccacggcctcgactggcagcgcgcgaagtggggcaggttcgcgtctacgtatctgaagctgggcgagcgtacggccgcgacatgcgcggacgaggtgatcgtgctcagccgcaacgtgcaacggtatttcaaggacacgtatggacgtgacgtccgtttcattccgaacggcatcgaacgcaatacgccggtcgcggcggatgcgatcacgcgcaagtatggtctcgagaaggacggttacgtgttgttcctcggccgcatcgtgccggagaagggcgtgcattacctgattgacgcgttcaagcgcctcgacacggacaagaagctggtcatcgccggcggcgcctccgattccgccgaatactacgagtccatcaagaccgccgctgccgccgatccgcgcatcgtgctcaccggattcacacagggcgaggaactggcagaactctatagcaacgcctacgtgtacgtgctgccctccgatctggaaggcatgccgatgagcctcctggaggcgatgagctacggcaactgctgcctgacctccgacatcccggaatgcgcggaagtggtcggcgaccacgccgtgacgttccgcaagggcgacaaggacgacctggccgacaagctcggcgacctcatcgcgcacccggaccgcgtggccgggctcaagatgggcgcggccgactacatcaccggcgaatacagctgggacaaggtggtcgaccagaccctcgccatgtaccgtggggaggagaagcgatgaggatcctgctcgtcaacaagtacttctaccgcaagggcggcgccgaaacgtatttcttcgcgctcgccgaaggtctgaaggcgctcggccacgaggtcgcgttcttctccatgcgacatccgaacaatgagccgagctactggagcaagtacttcgtctcggagaaggactacgtgggcaagatctccgcattccagcaggcgaaggaggcggccacgctcgtctactccttcgaatcgaagcgtcagttcgaggcgctgctcgaggagttcaagccggacgtcatccacatgaacaacgtgcaccgtcagctgacgctgtccatcgtcgacgccccgtatctgaagaagcaccatgtgccggtcgtgtacacggcgcatgactatatcctgctgtgccccgcctacacgatggtcgacggccatggcaaggtgtgcgaccgatgcctggaccgccgtttcctccacgcggtggagaatacgtgcgtgaagggctcgaaggtgaagagcggacttgcgttcctcgaggcggagttcctgaagcgccatcacagctacgacaagatcgacaagatcatcgcgccgagcgagttcatgaagagcaagctcgacgagggcggctatgcgggccgtaccgtggccatgcagaacttcctgaccgaaagccagatggcgatggcccgcaaggtgatgaacaccggcaagttcgatacggtcgaaccgtacttcctgttcttcggccgcctctcccgggagaagggcatcctcacgctggtggaggccttcctgcaggccgtcggtctgcgccctctgtcagggggagccgttccgcaaagcgggactgaggggggctggaccatccccgcgaactggaagcttcacatcgtgggagacggccccgagcgcgccaccatcgagaacctcgtcaggcaggccggcccggaggcggagagccgcatcaagctgctcggctacaagacgggcgaggatctccagcgcgaggttggcaacgcccgcttcagcgtgctgtgctccgaatggcgcgagaatatgccgtactccggtctggagtcgctggccgcgcagaccccggtgatcggcgcgaacatcggtggcatccccgagtttgtggtggaagggaagaccggtttccgctttgaaagcggaaacacggaggcgcttgccgggacgttgatgaaatccgcaagcgtaatgtccgaagaataccagagtatgcaggtggcatgtgccgagtatgtggaaagacattgtcaacaggaggattacgtggagcgtttgataaagagctatcgtgaacttcttgattagtagagggcaataagcatagatgattgccatgattaaagtgttatggcacatggttgcgtagggaatcgaaaggacttgttgtgtataacgcgttggccccacgtatggcattagacagccgagcaggcaacatgtccgtgtatttaaacaagttaaccattcgtattatcactttattacctttggcgacattgttgcaggctcagccgggttttggagcggtgaatcagctggttatcgccttaagtgttgccagtttcctattatctgccatggtgaccgattatccgcttggttattggttattgatagctctgacgattgttacgacgattttcggtattgcaataactcaagggcaatttatcaatatcaatctggtcgtgtacttgatgttttgggtattgttgtattcgcttttctctgcgaaacttgattcattgaagtcattgattactagtgatatgcaatggatacgtgcgatttgcgtcatctggtgtgttctcgtggttgtttctattccgctcccgcgttcgtattacatcgtggagggacaaggacggttcttctgctcatttgcaggtgactcattcaggttgagcccaacggcactgatggttcttgtcttgattacgttgtgccttaaactggattataagaacaagtggtggtatgccttgatatcgattgttccattgttctgtgcgtttatgggatattccaggacatatctgggcgtgatactgctgatgtatatcctgttcatatgggaattttccgttacaaaaagtaggttctatatttcaatcataatcggaggcgccgccgccgccctcattatctcggtgtcttctatttcatcgaaaatcaattcgacttcacatggtggataccttggtttctgggatacgctgaccagcggccgcagctccttctgggcgcatgacatgcaacagtattcacagtttccgctgcataatatgcttttagggggcggattcaataaaatctatgagattaatcagcagattggaatcaatatctgggcgcataatgattttatcaatctgcttgttactaatggcgtcatcggtttgatgatctatatggttcctttagtgttgctaatatgtaggagttatcggaatcgtgtggatgctcctaggtttctttattggattctggtggcccaatggttcatcaatgctttctttaatatggaatatacatatgtttgtgcggcgattgcatcggcgttcgcttttctgatgcttacgatttcgggtacgaaaaaccataataaaagataatattatgccatatttctctcttattgttccagtgtataacgtagaacgctatctagaaaattgcatttcctccttgctttcgcagacgttccaagattttgagattatacttgtcaacgatgggtctacggattccagtggtgtgatttgtcggcgtttgcgtgacggacatccggacttgattagggtagttgagcaggagaaccgtggcctactgttggcccgtcgtgccggtttctccattgcctatggtgatgtcatcatgactgttgacagtgatgatcagctcagagttgatgcgttggaacgtattcatgatattttccaacgtcatcaggctgatatcgtgtgttttgaaggtggtcgaactaaagattttcagctcaatggttctcctatgttttcgtgtgagcgatgcttctcggctgcggacaaaattgatgttcttgaaaagctctgtgattcgtaccggtttaattctatttggtcaaaagcgttttcgaggcgaatctttgatgctgagaatggatatacgcaatatgcgggattgagttttggtgaggatcttctgcagattgttggactgtttgatagggctgaaacgtttgtatacgtgccggaggtgctgtatttttacaggccgaatccggatagtctcgttcagaagttcaatcccaaaaattatgatgatcttactatttctcgtggttcactggttaaatatgccaacatctgggatgaacagtatcctggccacgatttgctgaagcacgtgtatatgatcaatctttggattactgggttgcttctgcaattggctgcggggtcgatgtctcgtaaagacttcatcggtttctgcaaacgtgtacgtcagtcagagttcttcaaggagtcttacaggtgcaaggcggctgtaagcatgttgcgcccggatatccgagtcgtcattgtctctgctgctaatggtctgtatgatgccatccgcggcatggcttcgttgaagaatctgttgttgggccgtgtaaggagttgattcgtgtcgggagatcttctgaagaacctctataagcatttgccatggaggaagggtctgtttacgattgctgcgtcatgtgccactgtctgtgggcgtacagtacatgttcgcgatggagagtcaagactgcggtcgatatcgcccgagcctattgcgaccgacactgggcaatttacgtattcgtatgaaactacttgtgatgtatcggtcatcgttccagcttataacgtcgaattatatattgctgattgtcttgattcattgattcatcagcaaacctcctatgatgttgaattcattgtcatcaatgatggttctactgatgaaactccatcgattataggtacttatgcaaagcgtgattcccgtattcgtgtgattaatcaggaaaatagagggctctctggagcgcgcaaccgtggcattaaggaatcgcgcggacgctatattgcgtttgtggattccgatgatgagttagagccgaatcacattcagacattgatggatgcgttggtctcctcccatacggactacgtaacctccgggtattcgcgtatcgatgagcatggcgagttgatcgaacgcgttcctgataacacctatggcaccgcgtgggcaaggatctataagcgagagatttgggaaggcttgagatttcccgagagattatggtatgaggatacggttctcgcatacttcgttaagcctcgctatgacgaacatgttattcacgatacgagctatcgctatcgtgtacggagtgggtccatctcacatgcaatgcacgggaagaagaaggtcgtcgatacctattggataaccaagaggatgctgacggactaccgtgcatccggcatgccatggactgatgagatttatcagataacactcaaccaactggggccacttgcttattggcgcacgagatcattgctgcaagaacagcggcttgccgtgttcacttgttgctgtgatttatggcaatccacaatggaattccgtacttgttcgtcgggaagcggaatggttttgggagctgtcgaaaaggcattaagccagagagactatacattgtggagacttgttggcgcctatggaaccttggagaccatgatcggagagcaactgtgattactagcaaggaagaatataaggcatatttggaacatgatcgcattgcgttgggagagattcgttcctatccattaccattcgatgtgatatggcggtttgagcggctactcagaaaagcagagtattacagaaattgccatcgcacggtgatagggaagatgtacgcgtattggttgcattaccgtgtgcatggcttcgggcagaaactcggtttctctattcctttgaacgtgttcggcccagggctttccatcgcccatgtaggcaccatcgttgtgaatggcaatgctaaagttgggaaaaattgtcgtatccaggaatgtacaacaattggcgcgacaaatggctcaggggatgctccaatacttggagataatatctttctaggaagcggtgcccggattatcgggggtgtggaactggccgatgatgttgcagtcggagcaaatgccgtcgtcgtccgtgacgtattgacgccaggcatcaccgtcgccggagtgccggcgcggcagatcagtacccatgattcgcatgacaatctcaatccgatgttggcggaacatggtttgctataaacaggcatacaccatgcaccgaaacctagagattggctaatagtgggcaaatacaagaatctgctgttgaatatcggcgtattcgccttgaatgtcttcgccaccaagctcatcaccttcctgcttgtgccgttgtatacctacaacatgagcaagtccgagttcggcgtgaccgatatggctctcacggttgtaacgctcatggtgccgttggcttcgctctcctttgcggatgccgtattgcgttatgtaattgatgattcgcggaacgtcaagcgctatgtgaccattggcttcatagccatgctattgagctgcgcaatcgtcgtgtgcctgcttccggtgctacgtttaggtttcttcggcggactgggcgactatccgcttatgttctggctcatgtatgtcgcgaatgcgtttttgctgtatctcggcaacgtggcgcgtgcggtgaatcacctgaagctattgaccgccgatgctatcgtcacatcccttgttaccggcgggtctgcggttgttttcatctcatggctgcggatgggagcatacggctatttctattccatgattctggggtctttcgtcggcgtgattatttttctcgttggaggtggttaccttaggtacctcacccgacttgaaaaggacgatcgacgactggttcgcaatatgatgggatatgccatccccatgatccctaatgcgctgttttggtggattggtaccagcgtcaacagattcttcattactggtatgatcggcatcgcttcatcggggcttttcgctgcggcaagcaaactccccaatctgctgaatgtcgtgtacagcatctttcaacaagcttggacgctttcagcattccaagagtttcgccggaacgatgttgcacaattcttctcgaccgtgttcaaactgttgcaatctggtatggcaatcggagcagcagggctgaccgtatgcacgccttggctggcatcgttgatgttgcagaaggatttctattccagttggagtttgattccgattttggtattggccttctatttcaattcactgaactcctatctcggtaccgtgttcaccactaccatgaagacaaaggcattgttcacgactactatcgtaggcgccgctgcaagcgtggcccttacgtgggggctgattactccaatgggcttgtttggtccgtgcgttgccatggtcgttagcaacgctgtggttttctttatgcgcgtactcagctcacgccaaataatgcatatccgcatcaattggttcacgttcctgctgtccatagtgttgctcacatgccaatccatcgtcatggccattcagccgaagtcctatatgatgatggcttccggtttgttggttgccatcatattgcttcaacttgtcgacctcatccccatatgcgggtctttcctcggacgtcatggacgtcatccaaggcatatgcgtcacgcgcgtgtgtaatcatcatcgtacggaaacaaaacaaggaacgccatgagtcaaatcaaaactgctgtccagattgccgcatgccggatactcggatcctatcgtgtgcattgtatgctgcacccccaaagagcgtttcgtgggttgcgacgcgcgaaggaatacctgaagctgcatgacggcaacagaagtgcgacccgcatccttctgtgcgatgtgcccaatcacggcaatctcggcgaccaagccatcgcgctggcggaagaggcttacctgtcgggtttggggttgcgttatgacgaggtcgatcagatcggcggcatcgaggatttggtgtactaccgccatatccttccattggatactaccgtcatcctgcatggaggcggcaatatgggatcgctgtataagagctttgagttcctccgtgcagctgacataggcgctttcccgcacggcaaggttatctccatgccacagaccgcagactatcgcgactccgaaggccgtatgctgagtcggtatatgcggcatgtctactcgtcggctgatcatgtcatgttgctggcacgtgacgaaccttcattcgagaccatgaaaagactgtttcccatggttcaggtcgagcttacgccggacatcgtgatgacgtatgagaccccttatgcgcatgttccgctcgccgggcgccaaggggctctggtagcgttccgcagcgatggggaggtcgcgactcacccgaccttcgaagatgtctccgaccgactgaatgcgctaggactgtcggatgtcaggaaaaccgatacggcgctgggtactggaggtctgctcaatattccggcggataagcgtgaacctatggtatacgggaaactcgaggagttctctcgcgctcgcatcgtggtgacggatcgtcttcatggcatggtgatgtccgccatcaccggtacgccatgcgtcgcattcaacaacagtaacggtaaagtgcgtgccctgtatgagacttggcttcgttcatgcccgtatattcggttcagcgatggtactgattggcgcgaatgtgtcgaggacgtattggaaacatccgataactgttacgacttctccggattccgcgacaagttcgatgtcgttgccgaatacctcaagtaaacggaaatagtatgtgggggcggttgttgaaaccgcacccacattattcttattcgccgatgatgaatccgaggtgaagatgcctcatcagttcggtcatcccgatggctatgctgccaaatccgatgaagttgatgaggatcatgagcagggggttgatgtcaggccagaaagtgaacgagatgtacagcatgggggaatggaacaggtatatgcccatgctgtccttgctgatgaatcgcatgaacggggttgagtgctgcggtgtgatgatgtagaccgccagcacgctgagacatgagcacagcagaagaatcggagtcgccggtttgaaccatgcggcagccatggctccggccaacacgatggcggcgaggggtttgggaatgatggggacagttgtgtggcgcagctgtttatgaagcagtctctcgttccggtggtagatgaatcccagggcgaagaagaggtagtagttgctgaactgtagcaggtaggtgttccacgacaccgtttggcgtgccgttccgtacaggcccaatgcgattacgccgatgacggccatgacgatgtccagacgagcgcccgtgccgcatattgtgatgaggacgagtgtcagcatgaacatgaggaacagcgtgggaaggaaccagagatgcccgttgtcggacccccaaagacactctttgagcaccactttccacagtgggaggttccgataattcgggtaattcagcgcaaaccgaatcgggagaagccaaagaaatccgatgatgaggaatggcaggaggatacgactgcatttattgcggatgaacgctcgcgcttctaggcgcccctccccccccctgagcagggtgaagaccagacaaaatccggagaccgagaagaacaacggcatctgaagcatgttcacgatgtttttgaggtgatcgagaacgggcgcttggactgaggtctgatacagattccatgtactggaatagatgatgatgctgtgtcccagtgccaccaacataattgcaatggcccgtatgttcacaatgtcttctctgtgtttgctcgtcatgtgggtcatcctaccagcaggtcacgctgacagtcgttgtgatatttgcatactattggtgggcacggcatgtgttgatacccgggcacaccctgaggtagttgagcgacatcatgtcgaagaagatgcattccggccggatcgagctcttctgctggcacgccttcttccgtggcgtacgggatttctgtttggctgtttcagaatgtgctgctgggtaggcgtaagtatccccctcatcacgtttctggttgaaatctacaatgctggtgagcaacagttgataggtgttgtcttggagaaaacgcttggcatcctctctgctgcacttctggaaggtaacgccatgctgagccatgacgtcgcactgctcttctgcgggcattgcgcgacgccgacgttccggcgttgggatgtcagcctgtgcgtctgtcatcatctttcctgggctataggaactaaacgtggtgtttatgttcggggtttgtccttgcgggagtaggcgtgtcggggtgcttttaatacgaggtcgtgttaaaggccgttgtttctaccgtcccctgcctgttcgatgggcgtatgaggacgaaatcgaaaagggcccgactgtgcccggtgtgcggccggccgatgaggaagaacggcaggacggccgccggcacgcaacgttggaagtgcgcggactgctctctggggaccacggcgcccaggccggaccgaaggcatgacgccgacctgcgggccttcctcgactggctgctttccggcaggacgcagggtgatatggggtcggggccccgcatgttccgcaaacgcacgtcatggtgctggaacatccggcccgagatcccaacgccggcggtcaaacaccacacggtgatggcggacggcacgtacatgagccacgtgtgttttgtcaaattgaagtagtccagaatggcgtgtcaatccagtccgaaaaagcggcgggtttcagtccagttgagcggaaagacccgccgccattattgtttggtttctatcccatcagggcgtgggtgcgcctgtacgactcgccctcgaacctgatcatcctgccgtgatgcaccgtcctgtccactatcgcggtggccatgttcgggtcgccgaacacgcgtccccagccactgaactcgatgttcgtggtgtagatcacgctctgtcgctcgtacgcgtcggtcacgacctggaacaggagcctggagccctcctcgtcgaccggcacgtagccaagcttgtcgatcacgaggagccgcgccttggatatcaatgcgagctcccggtcgagcctgccctcggccgacgcgcgcagcagccgcatgaccagtccggccgcggtgaagaacctcgtcggctggccctcgacgcacgccttacgggccagcgcgaccgcgagatgcgtcttgcctgtcccgggcgggccgaacagcaccacgtcctcgctgttggcgacgaagtccaacgattccaacgcctcgcgcccgtagtcgacggggaagcggaccggcgtccagtcgtagccgtcgagttccttgacgcccggcagtccggcctgtttgagcagacgcgcgcgtttcgaccgttccctcgacgccagctcctcgttcatccacgagagcatgaactccatctgggccggggtcgcggtctccaggctgtccgcgagcacctgcctggtcaggggcaggctcctggcgagttccatgatctcgtccatcatcctgcccgtggacgcgcgtctgcgtctggtgtcggccatggtccgcgacggcctcgtcatgactccgtccccttcccgtcggggttgttgaacgcgtcgtatacggcgagcctgccggccccgtcgtccgggtcgggcgggtcgccctgcgcgatccgtctggccagtgcgagcaggctggccttgtcgggcgccctgccgccctccacgatcgcggccatggcgaggaccgcgttcccgaagctgtatttcgtcaagtcggtgtttcgtgttgggggtggtgccgttttcttggactgtgatccgaggaggagacggccatggcgaagtacacgagggaacagcggcaacgcgcggtcgagttgtatgtgaaatacgagggctgcgcggcggatgtgatccgcgagctggggtatcccagccgggaggcgttgcgcatgtggcaccgggactggctcgacgaacaggagacgggcgtgtcctcgcagcgtggtgaacggtatgcgcgctacacggaggagcagaagcgtgcggccgtggaccattatctgacgcatgggcggcgtgcgagccgcacgatgcgtcagatggggtatccgagcaaggaggtgcttgcctcgtggatcgacgagctcgcgccgggcgaacgccggattcgccgtggcccggttcccggggaattgaaacgggatgcggtcctgaaggtcgcgtccggcgaattgagttcgcgcgaggccgcggaggcggtgggtgtggattcgtcggtcgtgcgaaactggaagcgtcaactgctcggagacgcgaaaggactcatggtgacgaagagggaaccggaacgcggggattcctcgcagcaggacgatccggacgcgctgcgcggcgagatcgccacgttgcgcgccgacctcgagcgtctgcgcgccgaacagcgggccatggagatccggttggcgatcatgaagggtgcggcggaactggtgggaaaagagccgggcgcagacccggacaacctgacaagccgagagaagacgaccctgatcaaggacatcagtgagacgttgggcgtgaacgcggagagcctgctgaaggaggtcggcatcgcgcgcagcacgtactactaccagttgaaggccatgcgccggccggacaagaacgcgaacctcctgtccctggtgcgcgaggcgtttgagaacagcaggaggcgttacgggtacaagcgcatccacctcgagctcaaaagcgcgggcatcatcgtgtcggccaagcgcatcatgcgcctgatgaccagccacggcatggtccccgtgctcaagagcgcgaagcgctacagttcgtacaagggcgagatcggcggcgcacccgcgaatctcgtgaaccgcgacttccacgccaccgcgccgaaccggctgtgggtcacggacatcaccgagttctcgatcccggcgggcaaggtgtacctgtcgccggtcatcgactgccatgacggcatgcccgtcgcctggacgatcggcacgagccccaacgccgccctggccaacggcatgcttcgcgacgcgtgcgccacgctcaagcccggcgagacgccgatcatccactcggacaggggttgccattaccggtggccggaatggatccgcatctgcaccgagcacgggctgacccggtcgatgagcgcgaagggctgttcgccggacaatgcggccgcggaggggttcttcggccgtctcaagcaggagttcttccacaagaggagcttccggggcgtgacgatcgacgagttcaccgcgatgctcgacgagtacatggtctggtaccgcgacaagcgcatcaagaccgaatacggcatgagcatcatggacaaacgcatccagctcgggctcgtcgcctgaaaccatccggtacactgaccaacgaccatacagacaacgaagtccaacaaaacgtcaccaccccc

SEQ ID NO: 2750 - DNA, 9751 bp, Unknown
  R36_18m  MAG No. k141_13502
ctcgcacaccaacgacaacccggtgtactacgtgcagtacgcgcacgcccgctccaagaacgtggaccgcaacgcagccgccgccggcatcagctacgagggtgccgacctggccctgctcgacaccgaggccgacggcgaggtacttgccgccctcgcccagttcccgagcgtgctcgccactgcggccgacgaccgccagccgcacaaggtggcccgttatctcgaagagctggccgccacctatcacaagtggtacaacgtggagcgcgtggtgccgatggccctgaccgatccggaaacccgtggcgacgatgaggctcgcaaggccttggagatcgccaagaatccggagccggcccgtgccgccgcccgcctgaagctcaatgacgccgtccagcaggtcatcgccaacggcctcgacctcctcggcgtcaccgcccccgaaaagatgtgattatgcccatttctccaatttggccggccgctacggctgtgaatgccgacggtgccattacattccacggtcgtaccgccgaatcgctgcttgacgagttcggctcgccgctctatctcatcgacactgatgaagtagtcgcacgtgccaggcacttcgtgcgcgctgccgccgaagcattcaacacatccactacgcacgtgagctttgccggtaaggcgttcctgtccaaagaaatcgtgcgattggtcaccgaggccggcatgttcgtggacacctgcacgatgggcgagatgaaaatcgccctcgccgctggcgttcccggacgtcgtctggtactgcacggcaacaacaagtccgatgaggaaatcgcgctggccatcgaacagggcttcgccaaaatcgtgatcgacgagcccgacgagccggagcgcgtcgccgccatcgcccgcaggctcggcaaacgcgcccgtgtgatgctgcgcgtcaccgtcggtgtccacgccggcggccacgagtacatctccactgctcacgaggaccagaagttcggcgtgccgctgctggccgccggggccgacgccgccgtgctcgacgtgctgaacgccctcaaagacgtgacgcctgccgctaccaacgcgcgtatctctgcgacgcattccccggaaaatggcgcggaaaagaccgagaaatcagagcgcgagctgcactacgacgtcaagtacccgtacgacctgagccacgaggaagtctccgacacagacaaggcgctggccgccgcgatggaagccattgcggacggtccatccatcgccgtgctcaagaccatcctcgccaaccaggacgtactcgaactggtcggagcccactcgcacatcggctccaacatccacgatgcggacgccttcattcacgcggccaagcgcatgatgctgctgcgcaagaccctgtgggccaccgacgcctacatcctgcccgaaatcgacctcggcggcggctactccgtggcctacaccgatggcgaagattcaatggacattgacgtggaactcactcgcttggcggatgcggtcaacagcaccaaccgtgcgctcggcatgcccgccccggccatcagcttcgagccgggccgttacatcgtggcacccgccggcgtaaccctgtaccgcgtgggcaccatcaagcacgtgcacttgtccgatgccaaagacagtgccggcaacccgattaccgagcgcgtgtacgtgtccgtggatggcggcatgtccgacaacattcgtccggcactctacggtgccgactacaccgcgcgtctggcgaatcgcaccggttccgctgaaacgatgcttgcccgtgtgtgtggcatgcactgcgaatccggcgacattgtggttcacgaggtgcagttgcccgccgatttgaagcgcggtgacattctcgccgtgccggttaccggcgcatacggccgcaccatggccagcaactacaaccaggcgctgattccggcggtggttgctgtcagcgagtccggcgcgcacgtcatgctccgccgccagaccgtagacgacctactcaacctcgacgtcagcgagtaatcagcgtgcagaggtgagcgcctgacagtctgtaatgtgcggccaaaaccgtcataatacgaaaagggccgtcagcttgatgagcactttcggtctgctgtcggaaataatccgtaaaataggcgtgggatatagaaaactttttggaaggaccctgaattggctcacaacagcgaaaccccgattcgcgtaggcctgcttggtgccggcaccgtcggctcccagaccgcccgcctgattgtcgagcagaaggacgaactgtccgctcgtatcggccgcccgatcgaactgaccggcgtcgcctgcctcgacccgaaggaaaccgagaagttcccgtggatcgaccagtccatcgtcaccaccgatactttgagcgtggccaccaactcggacatcgtcatcgagctcatcggcggcaccaccgtggcccgcaagttcgtgcttgccgccatcgaatccggtgcttccgtggtcaccgccaacaaggcgctgctggccaagtacggcccggagatctactccgccgccgaggccaagggcgtcgacatctacttcgaggccgctgtaggtggtgcgattccgttcctgcgcccgctgcgcgagtccctggtcggcgacaaggtgaccagcatgctcggcatcgtcaacggcaccaccaactacattctcgacgagatgaccaccaagggtctccagttcgacgacgtgctcaaggacgcccaggccaagggctacgccgaagccgacccgaccggcgacatcgaaggctacgatgctgccaacaaggccgccatcatggccaccctcggcttccacacctccgtgaccatcgacgacgtgtccgtcgaaggcatcaccaagatcaccgccgacgacatcgccgccgccaccgccgagcacaaggtcatcaagctgctcgccgtggtcgagaacggcgaggccggcgtctccgcccgcgtctacccggccctgatcgacgagaaccacccgctggcctccgtgcacggctccttcaacgccgtgttcgtcaaggccgaggccgccgacgacctcatgttctacggccgtggtgccggcggcgctccgaccgcctccgccgtcgtgggcgacgtggtgaccgaagcccgccacattgctgctggctgcaccggcccgtccatcccgctgtacaagaatctgccgaaggctccgattaccgcctccaaggctgcattcgccgtgcgcttcctgatccacgacaagccgggcgtgctggccgccatcgccgccgagttcgccaagaacggtgtctccatcaacggtgtgaaccaggatctgaagcccaccatgaccgaccccggctacgacggcgagattcagcagttgcgcatcgtgacccacctgaccgacgaggaaaccctgcgcaacaccgtcaaggccgtgcaggcgctcgacttcgtcaccggtgacccgtccatcctgcgcgtgctggactgacaccgtctaggctccctctgatgaggcggtcgaacggctgcccgtgagttgaaagctgaatacccaagctcccctgacaaggggagctcctttttaaggaacaaccatgaacccaatctgcaatagcgttcacgtgcgcgtgcccgccacgtccgccaacctcggctccggcttcgataccgtgggtctggcgctcgactaccatgacgagctcactttcacgctcaacgacgacccgaacgacggcattgcccacgtgatcatccacggcgagggtgccgacaccctcccacgcgacgaaacccacctcgtggtctccaccttccgccgtgcctgtgccacgttcggcctcggccgactcggcttcacgctggaagcgaccaacaacatccctcaggctcgtggcatgggctcttccgccgaggccattgtggccggcatcgccgccgccgcggccttcgcccagaccggtgacctcaaccgtccggccatcttcgatatggccgcccagatcgaaggccacccggacaatgtggccccggctgtgttcggtggcctgaccgtctcttgggacttcgaaaccgcggaaggcgtcggctcggtcgccgttcctggtggtgaaccgctgcacggcggattccacgccgtcaactacccggtggacccgtccatcaccgccgccgtgttcgtgcccgactatgagctgtccactgagaaggcccgtcaggcgctgcctagggaactgccatacaaggacgccgtctacaacgtgtctcgcgtgggtctgctgcccgctgcgatgaatcccatggtgctggcccaggccgcccagcagggcaagtccggcgtcgccgctgccccggctcaggatgccgatacgtgcgcttgcgctggcggaacccgtgaatcgccgttcgctgacgagcttgcggccgctcaggcccagtccaacgcgctactgttcaccgccacgcaggacaagttgcaccagccgtatcgcggtaccctgatgccgccgtccaccgagctcattgcgctcttccgctccaagggctatgccgccgccgtctccggtgccggcccctgcgtgctcgtgctgcactacggcaacgcccgcgaagccatcgaccagatcgcatcggagcagcttgcttccggccactggcgtgtgcttcacctgcccatcaacaccgccggcgtcgaaatcgagcgtcgctaagtcgaggagaaggctcccgctggcgggagctggccgccgcaggcggtctgagagtggtccgccataccggcagagaccaccctcagtctcacttcgttcgacagctcccgccagcgggagcataaggacttaagtcatgtccattccgctaattcttgcttccaagtccaagcctcgccgtgacgtgctgtattcggcgggtatctgccccacaattcgcgtctcgcacgtggatgagcctgctgcgctggaagcggccgcccgtgaggaaggtgtcaccgtcgacgatttgagcatcaagcagcgtgtgatgattcttgccgcagccaaggccgaggccgttcaccgtgcgtatcgcgatgtggccaatactgccgccgccgcaaccggcgatcgcgtgattgcctacccgctcaaggccaaggaaatcaaggattcggaacgcgaagccgtcgtcgaagacctgcgcaaagccgccgctggccggcccatcgactattccaaggcggaagtcgccaccacgcgcgacttctccggcatcgacatgccgaccatcaccgaacccatcgccaccgctattgccggacagccgggactgaccgaggcgacggtcggcccgctgattctcggctgtgattcgatgttcctcctggacggcgaatgctacggcaagccgcacagcgaatccgtggcccgagaacgactgaagcgcatgagcggcgcgaccggcgaactgtggaccggccactgcctgatcgatttcgcgaccggacgtaccgtgcgcggcgcaagccatgccaaagtccatttcggcgaattcaccgatgacgacatcgaacggtacatcgtcaccggcgagccgctggaagtcgccggatcgttcacgctggaaggcttcggcggcgcgttcatcgacagcatcgagggcgatccgcacggtatcatcggcctcagcctgccgctggcccggcatctggccggcgaactgggcatcacgtggaccgacctgtggaatgtcggccgtggcgaactggagccggaaagcaaggcctcgggcaaccagcacgctggcattctgccgccggtcgaaaacgtgcatcagcccggcgatggctgggtggactgcgcctgcggccgcaagcattggggcaccaacggtgcgtccggcattctgctggctcgccgcgacccggcgagcggcaaggtgactcacgtggtcatgcagcaccgtgccgcgtggagcgccgaaggtggcacgtggggtatccccggcggtgccactgcggacggcgaatcgtccatcgaaggcgcgctgcgcgaaagctacgaggaagccaacatcacccccgaagacatcgaggtggtcggctcctaccgcgaggaccatggcccgtggtcctacaccaccgtgtttgcctttgaaaagcccggccacaccgtcgagcccaaggcaaacgacgacgaaagcatggaaatctgctgggtcccgattgacgacgtgcccaaccgcaagctcctcaccgctatgaagaccgactggccccgcttcgccgcccgcctggacgagctggcctgtgctggacatcggtagtggtgttggctgggccaatgttttgccgatgagtttacctgggtaatgcgtgtgaaccgcgtgtggaccgggacggattctgctgccccggttcgtcatttcgtctcttttgggacaaccgggacagatttcgctgtcccggttcgtcattttgcctctttttgggcaaccgggacagaatctcattcacctgacgccctatcgtgcgatggtcgccgtcggggaatggcggaattccggggttttggatttgcatatatcgggtgttcatggaagggcctgtcccggttcgccaaaagaggccgaaatcccgaaccgggacagccgaatctgtcccggttcgtatgtcgatcgattgaccccgccaccgggacatcaaccgcgcatagacaggacgcttcaatgcctggcgggcatgaccatatcggatgacacacgttccctcgtgcgtttcgccacgacctccgccccaagtcagtgcgaaaatggcatttttagcggtgtggtcagctgtcgcatgcggaaaacctaaatcaaccgctgaagagacacatcgccgactcggcggaactcgctggtctgcgcgcaatgaggagtgttgtgtctgaatgcgattcagacaatggtcggcgtcaaatagcggtctccagccattaatcattggtgattgtggacattgagcggagtaaacattctagatgattcagggatatgccgaaaatcatatcgttcagagaatgaagtaccgcatctcggagtaactgactgtcgacgtgcatggtttgaaatctgatatccacgcccatcatgcctagcaaaattacgggaatggggttcggactatttcgcctcagccaaccgggcttccgaatgctcaatgctgtatgcacttagtgtgtggaaaccagccaatcattgaccaatggcaggccgcagtcgaaaccagaaatatcctcgctcgcagtcaggtgccgaggctcagtgaagttggtcacgtccatatgggatcacgctccaacaattcattcagacgtgggcccataggttcgtttaatgctgcggtgaaatcattccacgctttactgttgagccgaatgatatgagcttcatggatgtcccgatctgcggcggcgagcagattcgataatgcccattgcaacgaagtcatgcctttggactcggccgcttggtcgattctggaacgttgctcttaggtgagtctcatttcaaaacgactgttcttgttattctctgtagtcatactcctgttgtacgacttttgtacggacatgattggtgtgtgcgggatgtcgattgcgatggccatgtgggctcctttgcttggtctgttgtggttccagcttccgaaccggtcttccactgttcctcgtcttctcgagcaatgaacatctgatatatggattgtcgcgtcgactgcgtatctctaatccttgcggatgaggagcgggccggtgatccagaaaggttcataccgcagcccgatggtcggctgggcgttcgctccgtacgctcgggagtatgaacacagcagcatcgcaattgcagcagcctcagccggcgtcgggaccggcggctcagcctcagcagtctcagcaaccccaacagttccagcagccggcatcgcacacccagcagtgggccccggtcatcgaggcgcacgacctggtcatggactacaccgccagcatggcccgcgcacaggcagggcacggcgtcaccggcgtgatgccagccggcacgggagccggttatgcgtcggcgaatcccgctgcggccggaccgggtgccattcaggccggccagccatcccagccagcccagcccggcttcgccatgccgaccatgcacacgctcgccctgaaccacgtgaacttcacgctccgggagggtgagacagtagccgtgatgggcccgtccggctccggcaaatccactttgcttcacgcgttggccggcattatcaagccgactgccggcacggtcgtcttccgtggcactgacctgagccatatgagcgacgccgaccgcaccaaactgcgtcgtaatgtcttcggattcgtcttccaatccggccaactgctgcccgaacttccggccgtcgaaaacatcgccctgccgatgatgctcgacggcatgccctaccgcaccgccaccgacacggcgatcctgtggctggaacgcatgggattgcgcgcgctcgccacgcaccggccgggggagatgagcggcggacagatgcagcgcatcgccatcgcccgtgcgctcgccgtcaaacctgccgtggtcttcgccgacgagccgaccggcgcgctcgaccaagccaccggccgcgaggtcatgggcattctcatggccgccgcgcgggacaacggttccgccgtggtcgtcgtcacccacgaccccaacgtcgcttcgttctgctcgcgcaccgtgaccatgcaggacggccagctgggaggcgtacgatgagcgctttcgcattgtggcgattgttccatcgccccggctcgcgtggcagtgcgggtcatacttcggtgttggccatcattgcttttgccgcagccaccactatctttctcaccgttttgggcggcgtgcatgggttcatgtggcgcgcctccgccgaccacaccattggatgcgcaatcaatctcgacgcttgcaaacccggaacagcggaaatctggaagcagcgtatcgccaatccccacagcctggatcaatacgccacggcatacgtcgtgctggcgttctttgcctgcctgctgctgattgtgccgttcgtggcgcttgccggttccgccgcgcgattggctgcgtcccgtcgtgacgctcggctcgcatccctgcgcttggcaggcgcgaccacggggcaagttattcgccttacggcgcttgatgcggctgggcaggccttggtgggggcgctgattggcatcgcggggtactgcgtgttgatccccctaatcatgttgctgcatttccagaatcagacgtttacgttcgagcaactgtgggtggggccgattgccttgatcattacgcttgttggcgtgaccgtgttggcgctgatctcttcgctggtcacgcttcggcgcgtggccatcacgccactcggcgtcacttcacgcgttgcgactacgctgccgtccggctggcgtgtggtggtgttcgccgtcatcatggtgattgccgttcttctgttcaagaatccgatggtgctggctcaggccggtgaagtagtgatgtacggcgtgatcatcggtttcatgctgctgtgcttcgcgctggtgaacctcgtgggctcctgggtggtcaccgctcgcgccaaggccaaggccaagcgccccaaggatgcggccacgatgattgccatgcgccgtattctcgac

SEQ ID NO: 2751 - DNA, 13737 bp, Unknown
  R36_18m  MAG No. k141_13619
gcaccactcgttcatgtgggagggcatcgatggcacgcgtattctcacgcacttcccgccctcggatacctactgctcgtggatgagcatgcacgagctgatgtattcgcagcgcaacttcctggacaaggacctctcccgtaacgcgattctgctgtacggcttcggcgatggcggtggcggccccacccgtgagatgaccgcgcgcatccgccgcgaccatgatctcgccggcgcgccgaagatcgaattcggtactcccgaccaactgttcgaccgtgtgcgtaaggatatcgtcgacgatgcgcaaggggagaccccggtgttcaagggcgaactgtaccttgaactgcaccgcgccaccctcaccgcccagcaggacatgaagcgcggctgccgccaggaggagtcgatgctgcgcgtcaccgaatacctgtgcgccgcggcccgcatcaagaacccggactatgtctatccgcgcgaagagctggaccgtatttggaagacgctgctcctgaaccagttccacgacattctgcccggttcggccatcgcatgggtacaccgtcaggcgcggaccgaatacgcgcgtgacatcgctcggctgaacgagatcgcccttgaagccgggcgcgcgatcgcagccgtggaacccgatgacgcaaccataaccgacgccgtaatcgccccatattcccgccaagcctgtgagacgtgggtggtacgcccggcttcgagccgagccgaagcgggaaccgcatccatggctcgggtcgccgttacccatgacggcgatacgattgtgctcgacaacggccaactgcacgtgcgcattgaagccgacggcaccgtttcgtcaatcgtcgatcagcgaaccaatcgtgaactggtgcccgccggcacccgactgggccgctacgaaatgctcaaagacgaacccttccactgggacgcctgggatattcaacgcgatgcgttcctcaccgccaacgcgctcagcgaggcatcgattgcaagcgtggacgaaaccgccaacggtggggccgtcgtgcatgctgtcactcgcgcgaagggcgttgaaattcgtacgggcattgccttaaggccgggctccgccacactggacttcaccgccgatgtggactggcatgccgtcgaacagttcctcaaagtggatatgccggtcaccgtgcaagcggtgaacgcgcaatacgaatgccaatacggtctggtcgaacgccccatcaacaagaacacgcgcagcgatgatgccaaattcgaaagctgcacgcaccgcttcgtgcggatcgccgacgccgactatgccgccgctgtggtcaacgcctccacctacggctccgacgtcagccccatccacgccgatgcggcacatggcaccggccgcggcaccatggtgcggctctcgctgctgtccgcaccgctgtaccccgacccacgcaccgaccaaggcgcacactccttcgcgtggtctctggtcgctgacgccgatatgaatgcggtgctggacgaagcggcgcgacttaacagccccgtaataggggagttgcctgatatggcgccgctggtctcgctcgccgacgccaccggcgtcatcgtattggactggatcaagctcgccgatgacggttccagcgatctgatcgtgcgcctgtacgaggccgccggcggcaatgccacggccacactgcgccttgacgccgctctctccgatgccaaggccagcgtgcaggaggtgaatctcatggaggagccggagctggatgccgaactgccgcgcgcgctcgccggtgacgaaccaatgcctgccgacggtgcggtcgtttcgttggcgccattccagctcgccacgctgcgtattcgccgataagggatattgggcctaggctcgatattttgggtcgcgcccaaccgtaacggaaccggaacagaccggctctgccatacggttgggcgcggcccattattgtatgagaagagggagagcgatcccgttgggcaaatatcaatgcgacacgcgacgatgaattcgttgcgtgcatgtttcgattgtgttatgtttttactaaaccgatttagttaacaggttcgcgactggccggaagctaaaacggtttagtctcagcgatgagaactgaataaaggttgtgataccacgtcaatcaccgcgacgggtgactgtgctggagcacaacgattaggtttctccgtccacagcagggcgggatgaaaaaggaatcaaaaggaaaggaaaacatcatgttttctatgaagaagatcctcgccatcgccggtgccggtgcgatgctcgtatcggtggctgcctgtggtagcggaactgcgggggatgacggcggcaagaaggagatctccttccagacctggaacctcaagaacgacaagtacaccccgtatttcgaggcgctgatcaaggcctatgagaaggaccacccggacgtcaccgtcaagtggcttgacgccccgtccgatggttacgaagacaagctgtccagccaggctgcggccggcgaactgccggacatcgtcgacggcggcaactccatcctgtacggtcttgccaaggccggcgcgctgctcgatgtctccaagcaggctccggatgcggaaaaggactactacgaaggcgcatggaagtccgtgaccatgcagggcaatggcatcgagaagggtgcctacggcctgccgtggtatgtcaacgatggcccgacctactggaacaccgagctgatgcagaagtgcggccttgatccgaacaagattccgaccacatgggatgagtacttcgccgccggcgacaccatcgtgcagaactgcaaggatgtctacctgggcaccacgatgggttacaacaccgaagatctgatgaccgcaggcgtcaagtccttcatgaacgatgaccacagcaagtacaccttcaatgatgaggccggtgtcaagcagatcagccgcttcgttgagctgtacaagaagggcggcatcccgccggaggccctcgactcctcctggagccaggccgccgatctcttccagcgtggcaacctggtctccatggccggctccgcctactccgctgacggcttcaagcagaacgctccggacctttacaagaacctcgcagtcggcccgcgtatcagcaacgacggcaagtccgcttccgtggcctacgagatgctcggcatcagcgccaactcgaagcaccccgacgttgccattgacttcgcccgattcgtgaccaacgagaagaaccagatcgagttcgacaagaaggcctccgtgttcccgtccgccaaggggggtctggatgacgactactacaagagcatcgacgaaagcacccttgagggcaaggctctgaagatcacgctcgaccaggtcaaggacggctacggctctcgtccatccgagttcaccgacaacaacggctccaagaacttccagcagcagatcgccctcgctatgcagggcaagcagaccgccaaggaagcccttgacaagtccgtcgagttcgcaaacgagaagctcgcacagtgagcaacgcggcactcgccgctgacaggtcggaggcccgcacggcctccgaccggcctgaaccgatgaacctcaaccacggcaagaagcagaatcgtagcttcggcaccatcattgccccctacctgtttgttctgccagcgttcgcgattgtgtttgtattcatcgtccttgcggcactcaacactttcaggcttgctttcaccaactccacactgctccgtccgggaaccttcgtcggactcgaaaacttcatcaaactgttccatgacgagtacttcctcacggcactgctgaactccacactctacgtgatctgcgtagtgccgttcatggtgatcctcccgttgatcctggcctatctggtcaagggcaactcccgcatcatgggcttcttccgcaccgccttctacatgccggtggttatgtccgccgttgtggtgggtatgatctggaccaacctgctggattccgccggtctggtcaactccgtgctcaaggcattgaagatcatctccaagccggttccattcctcaccgatcgatggggcgtgctcttcagctcgatgttcgtgacaatctggctgggcctcggctactacatggtcatctacctgaccgccctcgccaacatcgatgaatccctttacgaagccgcctccctcgacggcgctggccctgtccgccagttcatctacgtgacaatgcccggcgtgcgctccacgatgatgctcatcatgatgctgtccaccatcgccgcattccgagtcttcaacgaaatctacgtgttgaccaacggctccgcaggccccggcggcatggatatgacgatgtcgatgcttatcaagcgcgaaggcaccggtatccaggcccgcactggttacgcgagcgccatctccatcgtcgtgctcgtcatcgtcggcgtcatgctcatcgtgcagcagatcgtacaaaagcgaggtgaggactgatgaataccaacacgcataaggtcaccgtcggcaaagtcgtccagtatctgattctgattctgatgttcctgctgctcgtcggcccgttcgtctgggaactgtccctgtcgttcaagggcaagggcgacaacgtctacgccgtgcctccctacctgatgccgaagaccccgacgctggacaactacatttccgtgttcaagcaggtcccggtattccactacatgctcaacacgctggtggtctgcctgatctccatcttcggcaacgtggtcttctccacgatggccggctacgcactgggacgcctgaagtggcgtggccgcggactggtgttcaccatgttcatgggcaccatggtcatcccgatcgaaggcgtgatgatctcccagttcctgatcattcgctccatccacctgcagaacacactgctggcagtcgcactgcctggcctgtgcggcgccatcaacatcctgctcatgaccaacgccttcaaatccattccaatggaactcgaagaggcggccatggtggacggtgccaacctatggcagcggttcttccacatctgtgtaccgcaggtcaaaggcacgatgaccgttgtcggcatcttcgcattcgtcggtgcctggaacgacttcctgtggccgttgatcgcgatctccgatgaaagcaagtacaccttgaccctcggcatgaaccgactcaagggcatgttcatccaagatccgcgactgatcgccgccggtgcgctcgtctcgcttatcccgatcatcgtcttcttctgctgcttccagcgctacttcttccgtggcttggaacagggtggactcaagggctgagcggactggaaaaaggaggtactccaatgaaattcggagtcaactacacgccgtcgcatggctggttccacgcatggctcgacccggactgggacggcatcgacaatgatctcaagcagatcagcgaactgggtatggaccatgtgcgcatcttcccgatctggccgtatctgcaacctaatcgcacctggatcaacaagaagggcgtggcggatgtgcgccgcatggtgcacatcgccggcgagcacggtttggatgcctatgtggacgtgttccaagggcatctgtccagcttcgacttcttgccttcatggctggtcacctggcatgcgggcaacatgttcaccgatgcggacgccgttgcggccgagcgtgaactggtcaagaccatgaccgatgagctgtccaaggaacccgcgttcaagggtctgaccttgggcaacgaggtcaatcagctgtctgacaggccgcatcccacgaagatgagcgccacggaccggcagatcgacgcatggctggacgcgctgcttccgaccgccgccggtgaagggcacaacgcgctgtacagcgtcaacgatggcacctggttcatcgatgggcacccgttcactccggtgcagtccgccaccaagggtgatatgacagtgattcactcctgggtgttcaatggcatcgcgcaaggatacggcgccaccagtgaggagtgctcgtcgtacgcactgtacctggccgagctggccaaggcgttcggcaaggattccgagcgcccggtgtggctccaggaagtcggtgcgccggagaatgtgctggaaaccgactacacgccggaattctgccgcaagaccgttgaacgtgccatggattgccggaacctgtggggtgtgacgtggtggtgctcgcacgatgtgcccgccagcatggaagacttcccgttcttcgagcactctctgggcttgttcgacgagcaaggccagctgaagccgatcggccgtacgttcggggaactcgccgcacagtaccgttccgcattgccggctcagccgaagaccgtcgccgtggtgattgatgtggatgaggccggaaacccggtgaaccgcagtgcgctcggcccgggaggctcggtgtgcgacctgtggatgaagctgcaggtggcgggccagcgcccgaccatcatcacctcgcaggtggcggccaatcaagaggcgctcgcgcagcgtggcattctggaattgcacgctgacgaacacccctatgccgcccgttactacactgcggtttcggacccatcgttcgaaacggctgattaaaccgatatccggttgtggaatcatctactctttgttccacaaccggatattttcaattgcagtgcgcacaattgcagtgcgcagggcaaaacataagacccggtactcgccgaagagcgagaagaacgagaagacaatatacgagaagggggagcgctcaatgagcatcaactgcgccgcagtggaccgactcattgattcgatgagcttcacgcagaaagttggccagttgaaccagcgtctgctcggttggaagtccgtggaacgcaatgctgcgggacggctggtggcctcggacgagctcaagcaggagattgaccgatggggtggactcggcaccctgtacggtctattgcgagccgacccatggtctggtcaacattggggtaacggcatacgccctgaggagcggactgaggcgattgccgtggtgcagcaaactgtgctggaacgtggcgcgcacggcatcggcgtattacttagcgaagaggcgcctcacgggcatcaggcgctgggcggcacggtgctgcccaccaatctgggtttgggcgctacgtttgacccgcagggggtgcaggaagcggaagctgcggttgccgcagaactggccgccagcggcattcatatcgcattggtatccggtttggacatcgcccgtgacccacgctggggccgttgcgaggaatgcttcggcgaggatccgctgatggctgcccgcatgtgcgaggccatcgttaccggcatgcagggtgagcatcgcagcaaggtcggccacgggggagtggccgtggtgctcaagcatctggcggcgcaaggcgaggccgtgggcggccgcaacggacagtccgccgtactgggcccgcacgatcttcatgaaattcatctgccgccggtggccgccggtgtgcgcgccggtgccttgggctttatggcagcctacaacgatatcgattctgtaccttgctgcgccaacccgtggctgctcaaggattatctgcgcgaccagctcggtttcgacggcatcgtgatggccgatggcctggccgtggatcggctcgaagacatggccggctccattcccgcggcagggcgtgccgcactgctcgccggcgtggacgtctccctgtgggatgaaggattcacccgcctcgaagaatatgcggatgacgaacaggtagtggccgctgtcgacacggccttgcgccgggtgctggaactcaaagccatgttcggtctcttgcccgaagacggtgccgataccgccgcaattgccatgccgagcgccgacgccatcgcgcaggccactgcggatgggcgtgagcaggccaagcgcatggcccgcgaggcgataacgctgatcaatgatggccagtctgccgccacgctcgacgatatccgcagcgtcatagctgatgctcaagccggccctgtgattgtcgccggcccgttcgccgacgatttcggctgcttcctgggcgattacaccgcccctctgcccgccgatgaacagtcaagcgtctaccggcaattggtggcacgtctcggggaggaccgggttctcttggccgccaagccgagcgatgcgccggccgatcaatgggcgcgtgcgtcgaccgtggtattcgtatgcggcagcaccagcgaacgcagctatgacagtgaattcgacgacaatggcgcggcgaaggccgtaaccgaatacggtgccacctgcggcgaaggcgtggacttgtctgacatccgcctgccctggcgtcaggatgacatgctaggcgaagtcgcggcattgaccaccgctccaattgtttcggtggcggtgtgcggtcgcgcgcatgtactgaccgatgtgctggaacgctccgccgtgacgatctgggccggatatgccggccaatatgggccgcaggccgtagccgacgtattggttgacggagccgacatgtctggccgccttcctgtgaccttacccgcatatcccgcagccattcccgttcgatacaatgaccgccaaagtgccgcgcatgtctacaaggatgcggcggaaccgatattgcgcggcttcggctatggatccggttcgctggcggcggtgacgttcagcgagatgcacgccgatacgcaatcgcatccaggtgaagtgctggtgcaggtgacggcacatgctgacgatcacggggccgcgggtgccgtgaatctgttcgcgcatgtcagcggcggccgccgcatcccacgtttggcaatgcttgtcgattcggtatacatggacttgaacgcgggagagcgtcgcgatatcgcgttccacgtgccgtgtgatcgtctgcgggatgtcggtgacgggcaagttcaggtgacctgcacgctggatggagattcgacgcatacggtcacggcgacgctgccgggggaatattaggggggcatgtatgaatgtggggtgcgaagcactggaaccgcatcacacccccggatggagcctgaaaccgcaaggcatccatcctcgcaacctgcaagtctgcgggttgtcacccgatagaggaaacaacaaaggagattatatatgtgttgctcacaaggtagtgaagggcgctcgtccatcggacgcagactcgccgccgtcgcggcgggcgtagtcgccacagcactgatgctcggatgttcgctggccatgggaacggttgcgaacgcccaggaggggggattcccccgttgcggcgtcgcaggagggtaacggcaacaagcatttcatggtgtattaccgcgcatggcgtgacgtgaccatgaaaggcgtgaacaccgatttaccggatgacaattggatctccatgtacgacattccatacggcatcgatgtcgtcaatgtgttcagctacgttcccagtggccaggaagcggcggcccggccgttctatgacaagctcaagagcgattacgcgccgtatctgcatgcccgaggcgtcaaactcgtacgaggtttggattacagcggtgttatggtcgacggtttcaagacgtggattgctcagcagggcaaaaacgtcgatagcgcgaccgaatcggattatgacgcgtacgccgatcatgtcatcgaaacgtacatgacctcggttggcctcgacggtcttgacatcgatatggaaactttcccggatgccgcgcaggtggcgatttccgatcaggtcatcacagccctcgccaagcgcatcgggccgaagtcggataacccggaaggcacgatgttcctttacgacaccaatggcagctacactgctccgtttaagaacgtttctgattgcttcgactatgttgcctaccagcagtacggttccgattcgaaccggacggccaaggccgctgccacctacgaacagtttatcgactcgaccaagttcgttcccggcctgaccttccccgaagagggtgacatgaataaccggtggaacgacgcgaccgaaccatacctggacagtcatttctatgatgtggcctcatactcgtacgaccacaatctcggaggcatgttcgtctacgcgctcgaccgcgacggacgcacctattccgacgatgatttggcacacatcaaaccgtcgaatctgatttggacgaagacagccatcgcacaaagccaaggcatgagtctggaaaacgccaagcaggctgccaaccacttccttgaccgtatgtcctataccaaggatgttccagccgaaacgcgccaaaccgtggcagtggccaccaacctgtatgaggtgaacaaggcggtgctcggcgcggattggaacgacggatacagcaacacatatgatccgacgctcgaactttccctgacctccatcgacaccacggcacttaccggtgccatagccaaggcggatgcattgctagctgacggcgcaaccgataccgatgtgcggacaacgctgaccacggccagaaacgcggcggtcactggcctgaccagcaagctgtataccggagctgacgttgtctcctggacggcatcgctcaacaccgcaatcgcagatgcaacgggcggcaagcccaagccgcaacagccaggcacaggcgaaacggacaaacctagttccggtgacgcaacacacaacaagccacagtctgcaactggacgtctggcaagcaccggttccgatggcaccgtcgtgctatcggtcgccgtgattatgacgctcgccggtatcagcgtattcgcagtccgccgccgcggataacaccggttcgaatgaaccgaaaaacagtatttgggatacggcgcgatatgcgaagcgccgtatcccatggcccacatcggtagggacgaagtagtacgcagacggttgatctccggcgtaagccggaagaagtcaaaggagattatagatgagattgtcactaggcgatcccgctgggtgtacttctgcccgggctcaacacaggaaatggctgtgcagcggtctggccgcggtattgtcgatgaccacgctggcggcgttggccgcaccggccagcgccaccggcacaatgccatgggggtgttcctaggtttttgtcaactccttggggagttgacgtgtcgggattccggttggctgtcgtgggcgcgcttcgccctgccggtggcgtccggcgtcctttcccgtgtggcccggttcaggctacgaggactggttcctggtagaggacgccgtttttgagcatgctgtagattacgtcgcagcgtcggcgcgcgaggcagatgacagcggcgttatggtgcttgccctgttcgcgtttgcgcttgtagtaggcgatggacggcgggtgtttggcggacgcgacgaacaaggactgccacagcgcgttcctgaggcgtttgttgccccgtctggagggtctctcgcccttgatgctggtgccggactggccggtggccggatcgatgccgactccgacccgctgcaggccgacttcgactacggtaaggactacgaggcggtaccacgcttcaagtacaccaaggtcggtggttacgaaggcggcgattcgctggtgctgagcggcaagctctccaacgacaacaccattcgcctgtacaagaccgacctggatgtcgctgccggctccaagattgacctgacctacaacaagctcaacagcgatgattccaagttgcagcttggcctcatccttgccgacgaccccgagaccgtggtgccggtggacgtgacggacggttcggcaggcaacggctggaagaccgcgagcgtggacctgtcccagtacgcgggtaagaagatcgccacgctgggtctgatcgtcaaggccggagccgattgacaactaccaggtgaatatcggcaagctcaccgttacggacggcgcggcccacacgcccgccgccccgacgaacttccaggtggaacgcgcctatgcgaactccgacgagctgaccgtcaagtggaatctcgccgactactccaccatcaagaactacttgctctacctggacaataccttcctcggcggccgctacgacgacaccctgtatgtcaagcacctgcccgccaagaccggcacgctcaagcgctacgccgtgggcgcggacggctcgcgttcgctcgccaccgaagcgccgctgaacgaagcggcggccgtctccgacgtgaaagtcgaaccaggcaaggacggcaacgtcaaggtctcttggaccaatccgcaggtatccggcgagaaaaccgtgaccgtcaaatccgacaccggttcgtggcgttacgccgcgaagccgtattcccagaccgtcaaggtcgccgccgacaagagcaaagtgacgattgccaatgcgccggttgacagctcccgctatgtggtgaacgtcgataatgcaggtggcactaccgctacggcaacaggtgcatttgccgatgccgccattgagccgtatccggcttgctcggtgatctggaatggcgataatgtgacgttggcccgtcctgagactcaagactggcgctacctgtacatgaccgagaagtggatcggcgagaatggcaagcagcagcaggagaaccagctgggtgctagctacacctactcgcagaacactccgccaatcactggtattatccgtggtcgtaccacacctgcctcatacaccaggtccatcccccgccagtcatgaactgcgggtgcaggtcgaggattacagcggcaacaagaccgatccggtgaagattccgaccgccgacgaactggccaagtgcacggtcgccgaccccacccagccggatgccaagaagtccacgctgaccgcggtcgacggttcggccgtggccgacggcaaggccatccgcacggtgcaggcaacggtcaaggattcgttcggcaatccgctggccaatgccgaggtggcgtttgaactgcccgaaggcgtctcggccattggcggaaacaccaccgtcaagaccgatgccgccggcgtggcttcgctgaacgtcgtgtccacgaaggtcggcaagtacacggtgaaggccgtgctgaacggcaatgccatcggcaagggcgtcaccgtcgaattcaccaaggtcgcggtgacgccgaacaagcccggcgaccagaacaagcctggcgataccaagccgaacaagcccagccagaacgacaacaagaacaatgacaagaatggcgcttcgttgagtgccacgggttcgtcggtcattgcgattgtggcggccatggtggtgctgcttgccacgggtgcggtggtacttcgcgctcgtagcaagacggagtagttcgtcgcaatacgggtgttgatactcgtgccataagcgggatttaggggttgcccaatgggtgcccccctaaatcccgtttgttttgtcgcaggacatatgccgagaccagtgactaaaatgctttagttatttgactaaaattattgatatcataagagttagcgcacggttgatgcatatggcccaatgcgggggtgccgtcaaccgtatcgcaatagtcgcaatgcggtcgtaaaaaggagtgttcatgagatctgctcgcgaggcatcgtcatcgtctgacggc

SEQ ID NO: 2752 - DNA, 17464 bp, Unknown
  R36_18m  MAG No. k141_13810
aaagccattgggcttccgctggagggagctggctcgcgaagcgagacagagggtggtccaggtccgtggcctagggctacgcccaagctaattgaaatattcgtgcatcatacagcgtacagttaaaccatgttccctctgctcgaaaccctggtcgccgtatacgaggtgggccagttcacgctggctgccgacgaactgaaggtgtcgcagtcgacggtgtcgtcgcgtatcgcccaattggagcagatggtcggcgcgccgctgttcgtgcgcaatgcgaaaagcgacgtgacgcccacacaggccgggcggatgctgtaccagaccgccatcggcatcgacggattatggcgggatacgcgtgagcagatcgcccgcgtgcaggaggcgcgtgagccgctggccgtttcgttctcgcacacgaccgcggcgattctgctgccgaaggcgttgccggtgatggctcggaacatggacagtttcgacttcgccgtacacgtgatgaactcggatgcgattctcgaacgggtcagcatgaaggccgtgcagctcggcgtggtggaaaagccgatcgtgaacgattcggtggaccgcgtcaccctgtgcgaggaccggctggtgctggcgggggagcccgacggcgtgtggatggtgcgcgagcacggttccggcgtgcggtattacacggatttgtatttcaagaccgctcaggttgtgcctgcacgcacgatggaagtgtccagtaatgcggcgattgtggcggcgctgtccgccgggttcgggcagtcgttgatttcggaagccgccgtgccggcgggcgtgccggtgcagcgggagcttggcgatgagtttgtgcggcggttctatgcgctggtgccgagatccggtctgacgcacgatcagcgggagttggcggagacgattattgctgcgctgcgcgggtagtcagatagtcgactgaggggaggttgcgaacgttgtttctctccctccgtccgcctgcggcggccacctctctcatcagagggagatcaattaggtatcgacaaaatcgatgatatgtattggttgcaatgatttgaccgatgtaaatgcttgagcttcaatagacaccgtgagagagttctgtacaaaatggtggaagcgcattgccaccgttgacatgctgttcattggtgttctgactctgctggcctcgctgttcgcctcctggctcaagcagttccccggattcagcctgttcggcgcgcttatcatcgcgctgctcatcggtatgatcatccagttcccgatccgcagtgcctacgtcggttccaatgatggccgcaaggcaggcgtcaaggacgccgctggcctgatttccaacaagctgctgcgcctcggcatcatcctgctcggtttcaagctcaacctcgccgtgctgttcacgcagggcatcaagtgtctgccgatcgcagctgtggtcgtcacgctgaccatcatcgtgtgctatgccatcgcccgcaagctcggtgtcgacccgatgctcgccatcctgaccgccggtggcaccggcatctgcggtgcggccgccgtcatgggcctagccggttccatcaaggtgcctgaggacaagcaggacgagaaggacaacgacgtgaccatggccgtggccatcgtagccattatgggtactgtgttcgcgttgctggagatcgcgctcggcccgctggccggcatgaccaaggaccagctgggcatcaccgccggtgcttccctgcacgaaatcgcccacgcggtcgccgccggcgacgctttcggcgcggtggacatcgccaccatcatgaagctttcccgcgtgctcatgctcgtgttcgcggccatcatcatcgctatctggtgggagaagaagcactccgaggtggagaacaccggcaagaagactgtggccttcccgtggttcatgctcggcttcatcggcgcttcgatcatcggcaccttcgtgccgctcatcgcctccatcaccccgcagctcgtggactttgcgtacatcgtgctcggcatggccatggccgcgctcggcatcaacgtgaacttcaaggccatcgcttccaagggcaagaagccgatgctcgccagcttcctgacatcgattctgctcatgtgcttcgccgcaggtgttgcgatgctgttcttctgataagcgctccaaatacaaataggcgaaggcgaacgacagtgagcaattggaatgcgtcacctaaaaatcacgtacttgcacaacggataaccccagccgaactggcaggccatcgcaatgaacttcaccacatacgggctcaggtccgtcgcgcccggcatccagccgatcagcagtgtgctgaacgtgaagttccagatccacagcagcacgaaaagcatcacggaacgggtgaagttgcttgacgatttgaacgtcacgttgcggttcatcacgaagttgtaggtcgccgaacacaccacggcgataccgttggagatctgcgagggcacgccgatcaagtgcaggatggcgaacgtcgcatactccacaatggtctgcgtggcggaaacacccatatacttgcccaacacggcgagtccattttgcttcggggttgccgtgcccacggtattttccgcagtgttcgttgtggccgaggcattcgtgacgtccgcgccctgattgtgcttcacatccgctccattgttcgccatgcccatatacctcccggatgtacctgtgacgttcgacctcgcgatgataccgctgaccgcgtcgggaatcgtcgtggcggtcagacgagaaaaccgcaggccgcagcaacgaccggcacacccagcgacagcaccagataggccgttgccgtggggtagcggcgtttgcggaagagcgtcaccatttcgttgatcgcggtcgagaacgtggagaatccgccgaggaaaccggtggccagcaccagccgccacggttcatcaagtgtcccgcccagtgccagcgccgcaaccagaccggtcaggaatccggcgatgagattgatggtgaatgtggacagcgggaatgcgcgttgccaatacgttttgatggtcgcgtcaagcagatagcggcaggaggcgcctacgccgccgcacaggcagaccaagattggtaggaatacggtcatcacgccttacctcccttgctggtcgtagcggcattcgtatcagcggacgcttcggcggatgcgttcgaggagccggccagatgcgttcctgcccacacgccggcagacgcacaaaccagacccagcgcgaacgtcaccagtagataggcaatgccggccgccacctgaccgtcgcgaatcgcggtgaagccttccaatgccaacgtcgacatcgtagacaaaccgccgcatacgcccatgccgagcccacggctggtgagctccttggcacgcgtgtcgaaccgggaagagccggccaaataggcggtcagacccgcatagcagaagcaggccagcatgttggccacaaacgtgccggtatggaagctgccggctgcgggaatctgcgcgaacgcatagcgaatcgcggtgccgatggcaccgccgcagaagacgaccaacacaatatcaagatggatatcggggagtttgtgcgccggaggagtggccgtgcgcgtgcccggccgggcatctgcggatggggattgcgagcccataatagcctttcctgaaaccgctgaatcctactgaagacacaacgattccatgcaatgtcaaatcgtgtgtaggaactatcagcagtgtgcggttcgaaacaagttcaggcgggtcccatcgccggttctccagattactcatggcgacgaatcgaacagtgagcgtatctcggatattggcctatcgcagtgaattgctcggttgttgccatacctcatgggtatggcgaaacatggtttatggctattggttaatgcaaggcgattattgtctaatagaacacgaggataacgggccttaagcgctcgatgccggaaaacaaggagttatgaacgtatgtctgaaaccatgaaagctgcgattttcgtggagcctggcaagatggccgtggaagaagtgccgaaggcgatgcttgaacaggatgatgacatcgtgatccgcgtggtgcgcacgtgcgtgtgtggctctgatttgtggttcttccgtgggctgagcggacaggccgcgcacagtcaggtgggtcacgagtccatcggtgtggtcgaagaggttggcgcggcggtcgaatccgttaagccaggtgatttcgtggtcgtgccattcccgtacagctgcggcaagtgcccggtatgcaaggccggcttcgaatccgtatgccctcacggcggctacttctccgcctgtcaggccgaatacctgcgcgtaccggaggcggacggcaccgtggccaaggtgcccggttcgccggaagactacgatgacgcgacgctcgcttcgctgctgaccgtttccgatgtgatgtccaccggttatcacgcggcggtttctgccgaggtcaagcccggtgacaccgccgtggtcatgggcgatggcgcagttggcctgtgcggtgtgattgccgccaagatgcgcggtgccacgcgcgttattgccatgagccgtcacgaggatcgcgcggcgctcgcccgcgaattcggtgcgactgatatcgtgcccgagcgcagccaagaagctattgacaaggtgctaggaatgaccggtggctatggtgcggacgcagctctcgaatgcgtgggctccaagcagtccttcgacacggcgattggcctgattcgccgcggtggcgtgattggtcgtgtgggcctgccgcacgacgtggagatcagcgccgaaggcacgttctacggcaacatcggcatcaagggcggcccggctcccgtgcgccactatgaccttgatgagggtctgctggacgcggtgctcaagggcgagatcaaccccggccgcgtgttcaccgccgagtacgacctcgaccatatccaggacgcctacgaggcgatggaccagcgcaaggtcatcaaggcgctgatccggttctagggtcaggtgcgcagagaacggttctcactaagaaccgtgtgagccattcgcacaaaaccgcacaatcgaacaggccgccggtgtgatgggggagagattgggggggtgagccggttcggcttgcgtccttataccgttgttttcgtgtagaatcggctacctctatacctctgttttcgtgtagaatagcatatgcctatactgttgttttcgtgtaatgaggtgattgctcatgttgaagcgcaagatgctggataagctgatcgcatggaaacaaaaagcgggtgggcgtgaggctcttctcatcgaaggcgctcgccgtgtgggcaaaagcaccattgtcgaggaattcggccgcactcagtacaagtcatatattctcatcgatttcacacgtttgccgcgcgacgttcgcgacatcttcgaaaaccagcgtgatgactttgacacatttttcatgctgttgtctgcgtattaccgcaagcgactgtacgagcgtgaatcgttgattattttcgacgaggtgcagcggtatccggcggcgagggagctcatcaaatatctggttgcggatggccggtatgactatgtggaaactggttcgctgatctccatcaagaggaatgtggcgaatatcgtcatcccctccgaggaacggaaaatggacatggggccgctcgattttgaggagttctgctgggccatgggggaggagctgcttgctgaaacgattcgcaaatcgttcgagcgtctggtcccgttgcccgatgcgctgcacaaacgagcgatgaggctgtggcgcgaatatctgctggtgggcggtatgccgcaggcggttgccgattatgtcgagcagcgcgattttggcgaggtggatttgatcaagcgtggcatcctgcagctgtacagtgatgatatcggcaagttcgccaatggcgatgccggccgcgtgcggggcattttcgctcagattccagggcagctgtccaagcatgagaaacgattcactctggcatcggtcgataagggggctcgatctcgtgaatacgattcggcgttcttctggttggaagacgcccgcttggtgaacctgtgccgtaattcgactgaccctttggtggggctgggattgtacgaagataacgattcattcaaatgctatatggcggataccggtttgctggtgtcgcaggcgtttgccgatcgagagacaacgccggatgatgtgtaccgggatattctgttcgataaactctcgctcaacgaagggatgctggtggagaatgcggtggctcagcaattccgggcgaatgggcgcaaactgtatttcttctcgcgcttggatagggcggatgcctcgaaaaccatggaaatagacttcctcatcgttcgggaatacgataatgccgcgatgaagcctcgcatcagcccgattgaagtgaaatccacgaaacgatacggcgtatcttcgctcgacaaattccgcaaaaggtatgcccaacgattgggcaaggaatacgttctgcatccccgccaactcgaagtggatggagaacgcatcaagctgccgttgtatatggcccactgtctgtgacgcgagaagatggatccgatcgccagcgcgtcgtcgatgcccgtatccaaatcaagaatcagtttcctgcgcatattcgcgcctttccctttgcggtattccggtgagtcacagcccgcgtttgacgagcccgtcgaggatggcgtcggaggactccccaagcctcaggcctatgacgtcgacgcggcgcagcagatctcgggttttcagggtgtccatgctcatttcgccggtgtagacggctgcaagccccgattcgtaggcgcgccgcacgcgggcggattccttgctggcctcgaggcagtatcggcgcatgtcggcgccttccgcggtcacggcgagttccagatcgtgcagggcgacgttcacgtgggtcaacgcgacattggcgtgttcgccggcatgtcctttccaaagatggatctcgcgtatgaaatcgcgggtgttgtcgagcacgtcgtcgatggatcgggagaaacggaacaaatcctcacggtccaacggcgtggtccaggccttggccaacgcgtgaacgaccttggaacggacctcgtccccctcgtgctcgatatcgttgacgctctttctggattcatcgacgctcagctgcccctcgacggcgtccaacgcgatggacactcctttgcgggttgtcgtcacctgttcccggagcagccccatgacgggatcctctgcgagcgcgttcttgacgctgaaccacggcattgtggcaccttctttcgttcgttgtcgcggcgaaggcagcggcctctgcgtttccggaccagcccagaacgggcgccgtttcaggctggtccggaaacgcagaggagccgctgaggggaaatcgcggagaaccgccggaatcaggcgatgacccggcgatactcgtcgagtttctcgggccagtcggtctggatgacgtcggcgccgagggcgaggagggcgccccagcctgcctgggggccttcgaggatggaacgggtgtcgtccatgcccttgaggccgcagtatccgttgcccaggtcgagggcgttgacgaacgtgtacaggccgagttcgttgatcctgttgaagatcgcggggtcggcgagcggggtgtcctcggtggtggcgacgagttccacgccgacggtgttgatctgctcgtcgtcgacgaacagatcgagttcgtctgggttctggatcatgcccatgaacatgtatttgacgtcgtggtcgtggagggcctgctggaagcctccggtgacggggcatttgaggatgagcttgctttccaggtggaactggtcgagccagtcgaggaatccgctgccccagtagcgccaggagcggtcgatgttgatgaggatgtcgggcgcgttggacaggatgtgcgcgacccgttcgacgttgccgtagtaggctccggggtattcggtgtagcgcagttcgtcgagttcggcggcagtcttggacaggatgtcgtcggtgatgcgtagacgggccatttcagtgccgtcgtggaacgcgaagtattcgccgtcggtggagcggattacgtcgatctcggcgatgtctgcgttgacttgcttggtggcgaggacgctgttgagcgtgttctcgcgaatgtcgccgcgcggggtgccgcggtgggcggcgatgacgaacggcgagcgggcgcatgcctggttgagattggcgttgatctgcgcgtattgttcgcgtccgaatcgaatgggggtggctgcggtgttcatgtcggctcctttgctgctgccgggaggctatgggtgatacgggccttcccgccccgggagagaagaccggggcgggaaggccgattgggttgcgggtatcgcgggtgtttacttgcctgcggccttgttgtaggtggcgatgtccttagcggactgggtctgggcctcctgcatggcggtcttgaggtccttggagccgctgacgacctcgttgaaggaggccatcacgtccttgcggatggacgggtaggcgccggtgcgggcacccagggacacgctggtggacgggttggcctcgagctgctcgtagaagaccttgacgttcgggtcggccagggcctccttgccttcggtctcgtcggcggccttggtgttggcgaacaggttgccggaggccttggcgaacacggcctgggcgtgcggggccatcatatacttgccgaattcccaggtggccttctgctcggcctcggagtgctcggcggccacgatccacagggagttgccgccgatcggggtgccggccttcttgttcgaggcgtcatgcgggaactgggcgacggtcacgttcgaggtggagtcgccgggcagcagggacgtgtaggaggcggaggaggtcaggaccaggccgagcttgtcggaggtgaacgcggtcatcatggagctagagtcggtgccggggttcagggcggtgccgtccttgaacatgtcaacgatcttctggaacatgtcgagctgagtcttggaggtcatgttcacaccggtgacgtccttgccgccgcggccgttgtccggggtggcgatgagctcgccgtggctggcggagagcatctccagaatccacgagtcgaccatgttcatcgagaagccgtacgcgccggtcttctcgtggatggtgttggcccagtccacgacctcgtcgaacgtggtcggcgggttggacacgtccaggccggcctcctgggcgagcttgttgttgatgtaggtcacgggctggctgatggcgaacggcagggacagcaggccgttgtcgtcgctgtagtacttgagggccacgggctgcaggtcggcggtgtcgaaatcggagtcgcccttggcgagcttgtagaccggggtggtcatcttgctgtcgatcatgtagccggtggacgtgtcgttcatctgcaggatcgacggggtagacttggcctggacggcggcggagaacttctgctgcacgtcagaataggagccctggtaggaggcctcgaccttgattttgcccttgtgggcgtcgttgaactcggagacgagctggttgatggcgtccacggccggaccggagttcgagtaccagaacgtgacggtctgctcgccgcccttggcgtcggcgttggtgtccgacgtggatccgcatgcggacagggcgagcatgggcaggaccgcgacggcgaccgccttcagcagggttgacttcctcatgataggtttcctttctcgttgcgccggacggccttcgacggccgccggccggaaaaaatggttttgttggtttttcttgtgtcgtacggatggggatcggcccacgatccgcagccgtcgcgtggacggccgcggccaggggttacttgatgctgcccgcgacgctcatgccgcgcagggacttgttgaacatgagcgtgaggatcatggccgggatgaccgcgatggccgctccggcgaggaccacgccgatgttggagccgtcagtgccgctcagctgggtgatgccgacctggatggtgcggtgctcgggcttgttggtcacgagcaggggccagaagtagccgttccaggcggcgaccatggcgttgatggtcgcggcgatgatggtgggcttgacgatgggcaggagcacgtcgaccatgaacctcaggtggccggcgccgtcgatcagggaggcctcgcgcagctccttggggaaggagcggaacgcctggcggaacaggaacacggtgaagccctgcacgaggaacggcaggaagatcgccggaatcgtgtccatgaggccccagttggcgatgttcagatagttcgacaggagcgtggtctcgccggggaccatcatgctcatgaggaacaccatcatccacatgcccgggcgcctcaggttgcagaacacgatcgcgtaggccgcgaggaacgcggtgacaatctggcccgcggtctggcagacggtcacaacgatgctgttgcccagctgctgggtcaggggcatctgggacatggcgcgcatgaaattgcccagggtgaagcccttgaacaggccgttggcgtcgaagaagaacgcgccgacgtagatgtacagaaccggcagcatgaccagcacggtcacgatcagggccagcacggcccacaggccctggctcacgggggaggtcttgcggatcatcagtagttcaccttgccttccaggaagcggaactgcagcaatgtcaggacgaacacgaacaggaacagcacgatgcccagtgcggacgcgatgccgaaattcgcgctgcccgcgttgaacgcggtggtgtagatgttgtaggtgatggtcgtggtcgcctggcctggtccgcccttggtcaggatgttgatctgggcgaacgcctgcagggcctcgatgcatgtggtcacggcgatgtagaacagcgtcggtgtgatcagcggcagcacgatggaccactggatgcgggcttcgttcgcgccgtcgatgcgcgcggcctccaggatctcctggtccacaccgtcgatcgcggcgcacaacaggatcagcgcgaatccgagaccggtccagatggtcaccaaggtgaccgtgaagaacgcccacttcgcgtcggtgaggaacccgaccggccggatgcccagtttctcgatgatcgaattgatcacgccgctcgaaccgaacaacgccaggaagcccagcgatgcggccgccaccgagacgctgacgatcgaggtcgtggccacacgcagtatcttgatgcccatgatgtgcctcgtcagcagaatcgccagcagcacgcccaaggcgatgcgccccgccacgaccagcacggcgtagaggaacgtctggataagcaccttgacaaacgccgggtccgtgaagaccgtcctgtagttctccagcccgatgaagcctgagggcgaaccgaagatgtccgtgccctgcatgctcatcatcaccacgcgcaccagcgggccgaacacgaacacgaccagcaatgccaatgccggaaccagcatgaccgcaccggtcaggcgattcttcgcaacgagaacgttcgccgtgcgtccgccgtgcgtcttggcgccgtgcggggattgcgacaaatgggttgatgacgccatctcgcgcttcctttctttctccggctccggcattgccttgccgagagccatgggtaatacccttttacgtcttttggttgtgagccgcagccgttccgatgacggacgcggcgtatcgagttgctgatttgctgctatctatatccgttgttgtatgggggggtcactccatcttcggagcgctcccagtgattcatagtatatcctttcgacataagaaagtctaatcgacgatatacagccatttcaggctaaagatgaacgttcgctgaattcagtgctaatatttataaactcaataattacagtattgggagcgttctcagcaaggagggtgagatatgtgggttattcccatgttggcattggtgttctgcctgcttggaggaaggaacgacgggtctcccctggtggccatcaacctcaaggccgcgcgccgcgtcacggcggcccccttcctgatgctggcgacggcggtggccttgctgccggccgccaacagccgagtcggaggaaccatcgtcgccatggtctcctccgaaggatccggcggacaaagtccgctcctgctggcgacggtgctcgtcgccgcatcggccaccctgctggcgctcaacggaggcggcgtgcccacctcgatcacgctcgccctggtcggagcatcctccggagccggcttcgccggcggacatccccaatggcatctggtgctgcgcgtcctcgggatagcgatactttcgcctctggtggcgttcgccgtctcccgcaccatctacctgctgttccaatccagaaccccgcagtcctcgaccaccatggtcttcctcggattcctgctcacctgcatcgcctatggcagcaatgacgggcagaagatgatcgtcctgttcggcaccgccatgggagtcgatttgggaactgccacgcacagcgccgccatcaccgcaatcgtcgccgcgacgttcctggccggcgtgctcaccggcatgcccaagggagcagccgcattgcagcgcggcaccatcgtgccggattcccggcagatctgggtcaccctgtgggcggcctccgccgccgtgctcgtcagctcggcgctgggaagcccggtcagcatgacccagtccatatcgggcgcgctcatcggcacctgccagacgaacgactggcgcaaggtccgctggggcgaggcgcgcaggatcctcatcgcatgggcggcaaccctgcccatggcctggatcctgggctatgccgcagccaacgggctcgatctgctgccactgtgatgcatcctcgggcgacgggtgctatcgctccgtcgccaccacgcgcgggtgcatgggattgcggcgcgggatgcggcttccgttccgcctattgcccgtctatcgcccgtctttccaacgtggcagcgccacggtgcgcccgtggatgaattccccctttactggcagcgcctccacggcgtggtccccgccatccagacgctcgagcaccagatccacagcgcgggaaccgatctcctccaaaggctgccgatatgtggtgaatccaaggtacggcgacgcgagcgggccaaacccgtcatagccggtgacggacacatcctgcggcacggaaacgtcgcgccggcgcaactcgtccatcacattgagcatgaccacgtcggacgggcacatatacgcggtgatcctgggatggcacagtacctcgtccaccagcgttccaaccgcttcggcccctttcatatccatcaccttcacgcggatgccgagctgcccgagcagctcgatcatggccatgccgcggccgtactggctgaccgagtattccctgggcaccagaaacaccgccacctcccggtgcccgaagtcgtggacgtattgcgcgagcctgcggccgccgtcctcctcatcgcaaaacaccgaggacacggtgcacgtcgtgtcctcgtgcccggccatcacgaacgggatccggtcgatgaacggcatgaaatcctccaccgcaagcatggcggagcatacgatcagcccctcgacgcgcagggcgatcaaatcgcgcagcgcctggcgcgcatcatccgcggacagttcctccacgccgctgatggacaccatctgatagccgcgctcacgcgcccgcttctgcatggcgccctgaaggaacccatagaaaggcagcttcgcgttcctgaccaccactcccagcgttttcgtgcgcttcgaggcgagcccgctggccatggcgctcggcacgtatccaagcttcttcgccgcggcgagcacacggtccaccttctcctgacgcacgcccccttcgccgcgcatcacgcgggaaaccatggacttggagacgccggcctccgcagcgacatcgaaaatcgtcggctgcctgctctctgcggcctccatgctgccctcctcatcgtcacaatatgtaacaccgcaagcgacggggcctcagcccaaatccgcaacgctgcccgttgccccgccatctcgacacaatggccttttcttagagattaccgcacttcacgccggagcatcggcgcggtttcgttggacggtcacggttcgagatctccgtctgtggcgagaaattccataatgtgtgaatcgccgggcttgcgtcgagcgggtagagcagtccgtagtgcatgatgaccggttcgggccagtccacggccacgttgacgagctgcgggtgaatgccggcccacatcggtttggagatgagcaggtcgccggattcggcgcagtcgttgaacgtgtcgaggtcgtaatggtcgatgtcgatcagatcgatggccggatattgttccagcaggtcccgggccgtgtcgttggcgccgcgatggcgtttgaggatgcggatgcgtgtgccttcgaggtctttcaatgtgagccgtgcgcgtctcgccaatgcgtgattgcgcggcaccgccacgcacagcggctcggaatcgagggcgagggtgttgccggtgtcgtcccaatagccggtgtcgaaggccgtggatatcagatcgacgtcttcgccgagatgggtgacgatgtcgttgatcgcttcggagtcatcgggcatcgacaccagttccaggcggatgtcggtgtgtttgccggcgtcgcgctgccataggtcgaggatgcggcggccggggtgcaggatggaaacgccaaggcggacggtggcgatgccgtcggtgctgcgctgttgcgcacgacgtagaatctcctcgcattggcgcacgatcatctgcgcgtcctcgacgaactccttgccggctttggtgagttgcactccactgcgcgatcggtcgaacagcgtcagaccgtattctttttcgaacgtattgatctgtttggccaccgccggtgtggaaatatgcaggcgatggccggccttggcgaagctgccggtctacgcggcggcgcgatcggcatggccgtattcggtgtggtcgccaccttcacaccctcgcttgacggctccctgcgtgccgtgttcgtcgcggccgaagtcggtgcggaatggcgcgttcaaccggaacgtggggtcaacaggatggctcaccagttcctcgaaaagctcatgggtgcgttccggcgtgtgatacccggcgttgagctccgccttgatcggcgtattgcccgaaccagttcagcagcagattgtgtacgggcgtgcgcaccgggaacagcagcggcacatccttgagattctgcggggtcaacgattcgcgttccgccaacgggtggtttccgggaaccatcgctgaccagtgctttgtaatgccggtgcgcaggaactcgtattgacttggtctgcgcacactcgcgcagcatccggccttcctcggtgagcgtgatggtgtgactgccgcgttcgaacagcgtgacgcccaattcctcttccaactgtttgagctgacgggagagcgtcggctgggaaatacgcagcaactgcgcggcccacgtgatattgccttcctcggcaaccgccagaaaatatcgcaggacgcgcagttccatcctcggggctccttcggtgtggacggacttctattgccattatgcccgccgtccgtgaactcattatgccaaacgcggatagtctcggtaatgacgcggcgaacagcatgcgagaggcggtgctcaatagcgaaagcctctcggctgccgtcgttggtcgtgatgatactggagaccatgaagctcgtgcggcggcggcgggggagggcgaggtcgagaaagaggcaacggcgtgacgcttgataataggtcagacagtagggtggcggcggagcagtgccgagcatgagcaacgatcagcggccgcagacgatcgaagtgcgcggggcgcgcgtgcataacctgaagaacatcgacatcgacattccgctgggcgaactggtgggcgtggccggcgtctccggttcgggaaagagctcgctggcgcttggcgtgctgtatgcggaaggttcgcggcgttacctggaagcgctgtccacgtacacgcgccgtcgcctgacccaggccagccgcgcccaagtggacgaagtgctgcatgtgccggccgcgctggccctgcaccagcggcccaccgtgcctggcatccgctcgacgttcggcacgatgaccgaactgctcaacagtctgcggctcctgttctcccgcgtcgcctcgcacgtgtgcccgcattgcggggcgcgcaacgaaccgacgctgaacgtggcggccggactgcccattacttgcgtcagctgtggcaaggaattccacgcgcccggcgccgaatcgctcgccttcaactcggccggcgcctgcccgacctgctccggaaccggcattgtgcgcgaagtgaaccgtgcggccctggtgccggatgagtcgaaaagtatcgacgacggtgcggtgctgccatggggttcgctcatgtgggacctcatgaagcaggtgtgcggcgcgatgggcgtgcgcaccaatgtgccgttcagcgagctcacgcccgaagagcgtgacattgtattcaacgggccagccgtcaaaaagcatattctttacaagccgaagaaaggcgacgatttcgccgaactcgacttcacctacttcaacgccgtatacacggtggagaacgcgctcgccaaagccaaggacgagaaaggcctgaagcgcgtggcccggttcctcaaggaaggcccatgcaccgactgcggaggtacccgactgagcgccgttgcccgggctccgcacgtgcgcgggctgaaccttgccgaagccagcgcgatgaccttggatgcggcggtggattgggtgcgcggagtgccggaatccctgcctgccgacatgcggacgatggccaccaacatctgcgaatcattcctggacgtggcccgccgactgttggatctgggcctcggctatctggcgcttgaccgcgccggtgccacgctttcgaccggtgaacgccagcgtgtgcagctcgcccgtgccgtgcgcaaccgcaccaccggcgtgctgtatgtgctcgacgagccgtccattggcctgcatccctcgaacgtggatgggctgctcggcgtgatgcatgacttggtggcggacggcaattccgtggtggtcgtggaccatgacgtgcgcgtgctcaaggccgccgaccatcttatcgaaatgggaccggttgccggcgccgaa

SEQ ID NO: 2753 - DNA, 4029 bp, Unknown
  R36_18m  MAG No. k141_13836
gcgtgaggtggtgcgcggcctgctggtgctgcgcctgagcaccctgtgcaccggacgcaccggtgtgcgcccggaaaccgcgcaggtctacgccgatatgctgaacgccggcatcaccccggtggtctacgaatacggttcgctcggatgctccggtgatttggcgccgctcgccgcctgcgctttggtggcgatgggcgaaggcgaggcccgcaacgctgacggccgcaagatcggcggcggcgaagcgctgcgtgcggccggcatcacgcccgtcgatttgaaagagaaggaaggcttggcgctggtcaacggcaccgacggcatgctcggcatgttgtgtatggccatcaccgatctgcgcctgctactcaagacggcggacatcgccgccgcgatgagcgtggaaggcatgctcggcaacgaccgcgtgttcgccgccgacttgcaggcgctgcgtccgcatcgcggccaaggcgattccgccgcgaacatcgtccgcatgctcaagggctccggtctgatcgaggccggccgcccgggctccaccgtgcgtgtgcaggacgcctactcgctacgctgcaccccgcaggtgcacggcgccgcccgcgacaccgtggaatacgcggcctccgtggcgggcgtggaactcgcctccgccatcgacaacccgtgcgtcacgctggacggccgtgtggagtccaacggcaacttccatggcgcgccgctggcctatgtgctcgatttcctggcgattccgactgccgacgtagcctctatctccgagcgtcgtaccgaccgcttccttgacgtggcgcgcaaccgcggcctgccggcgttcctggctggtgacccgggcgtggactccggtttcatgatcgcccagtacaccgccgccggcatcgtctccgaaatgaagcgcaacgccgtgcccgcctcggtcgattcgattccgagctccgccatgcaggaagatcacgtgtcgatgggctgggccgccgcccgcaagctgcgccggtcgattccggcctttgcgcgcgtgctggccgtggaactgctgtgctcctgccgctccttcgacttccgcaagccgtaccgtccgggtgcggcgggcgccgccgtataccgcgtggtgcgccagtacgccaacgaaatcggccccgacgtacgcgatacctggaccaccccgcaaatcgaaggcgtagccaacgccatcctctccggcgaaatcctatccgccgccgaagctgccgtcggcctcctgaaatagatgtgagctccctcatcagagggggctactgttcaccctccccaccaaaatccaaaacttgagtcacctgcactcaagttttgggaatagaatgggttccaggtcggttgaccatatcagacaacgacaagttgcggtctgcggtggcgcttgcggggctttcgaagcccgcgagccgctccgcgcggaacgcatgacatggaggaatacgatatggaacagaagttcaccaccatggcccaggaggccgtcggcgacgcgattcagagtgcgtccgccgcaggaaacgcgcaggtcgagaccctgcacgtcatggatgcgttgctgcgtcaggaaaacggcgtggtgcgctccctcatcgaggccgcgggcggagacccacaggccatcggcgccgccgtgcgtaacgctttggtcgcactgccgagcgcatccggctccagcacttcgcagccgcaggccagccgccagctgaccgccgccatcgcccaggctgagaaggaaatgcagcagatgggcgacgaatacgtctccaccgagcacctgcttatcggcatcgcggccagcaagccgaaccagtcggccgaaatcctggagaagaacggcgtcaccgcagcctccctgcgcaaggccgtacccggcgtgcgtggcggcgcgaaggtcaccagcccggacgcggaaggctcgtacaaggccctggagaagtactccaccgacctgacggccgccgccaaggaaggcaagctcgatccggtgatcggccgtgatcaggaaatccgccgcgtgattcagatcctctcccgtcgtaccaagaacaacccggtgctgatcggcgagcccggcgtcggcaagaccgccgtcgtggaaggcctggcccagcgtatcgtggcgggcgacgtgcccaccaccctgcaaggcaagaagctcatctcccttgacctaggctccatggtggccggctcgaagtaccgtggcgagttcgaggagcgcctgaagagcgtcctcaacgaaatcaagaacgcggacggccagatcatcaccttcatcgacgagattcacaccatcgtcggcgcgggtgcggccgaaggctcgatggacgccggcaatatgctgaagcctatgctggcccgtggcgagctgcgcctgatcggcgcgaccacgctggacgagtaccgcgagaacatcgaaaaggatccggcattggaacgccgtttccaacaggtgttcgtgggcgagccgagcgtggaagacaccatcgccatcctgcgtggcctgaagcagcgttacgaggcgcaccacaaggtgacaatcggcgatgacgcgctggttgccgccgcgaccctctcgaaccgttatattccgggccgtcagctgccggacaaggccatcgacctggtcgatgaggcggctgcccacctgcgtatggagctcgactcctcgcctgaggagatcgatgaactgcagcgcaaggtgacccgtcttgaaatggaggaaatgcagctcaagaaggctgaggatcctgcatccaaggagcgtctgggcaagctgcaagccgaactcgcggacacccgtgagaagctcagcggtctcaaggcgcgttgggatgcggaacaggccggccacaacaaggtcggcgacctgcgtgccaagctcgacgacctgcgcgtgcaggcggacaagttcacccgtgagggaaatctggctgaggcctcgaagattctgtacggagagattccggctattcagaaggaactcgccgccgcggaaagcgcggatgccgaatctgccgatgccggcgcggccaacccggccgatgagccgatggtcccggaccgtgtggacgccgactcggtggccgagatcgtctccgactggaccggcattcccgttggccgcctgatgcagggcgagaacgagaagctgctgcatatggaggactacctgggcaagcgtgtgatcggccagaaggaagccatcgccgccgtgtccgacgcggtgcgccgttcgcgtgccggcatctccgacccgaaccgtccgaccggatcgttcctgttcctcggtcccaccggtgtgggcaagaccgaactggccaaggcgctcgccgacttcctgttcgacgacgagaaggccatggtccgcatcgacatgtccgaatacatggagaaggcttcagtctcgcgcctgatcggtgcggctccgggctacgtgggctacgagcagggcggccagctgaccgaggccgtgcgccgccgcccgtattccgtggtgctgttcgacgaggtcgagaaggccaatccggagatcttcgacgtgctgctgcaggtgctcgacgatggccgcctgaccgatggccagggcaggaccgtggacttcaagaacacgatcctgatcatgacctccaacctcggctcgcagttcctcgtgaacgaggacatggacgccgacgccaagaagaaggccgtgatggacgccgtccacatgaacttcaagccggagttcctgaaccgtctggacgacatcgtcatgttccacccgctcacgcgtgaggagcttggcggcatcgtggatatccaggtggctggcgtggcccagcgtctgaccgatcgccgcatcacgctggacgtcaccgactcggctcgcgaatggctggccaacaccggttacgacccggcttatggcgctcgtccgctgcgccgcctggtacagaccgaagtgggcgaccagctggcccgcatgctgctggccggcaaggtccacga

SEQ ID NO: 2754 - DNA, 25839 bp, Unknown
  R36_18m  MAG No. k141_13882
gccgctttgtattgccgcgaatcaccgatataacgggagcacgccgcgatgaacgatctcttcgacagtggcctcgtcggtgaggttctcccccagtttgttcggtttgcctttgccatgccagtcagatccgccggtgaccagtagctggtgccggcggcagatggtgagcagccgttctcgttgctccggtgaattgcctcggtgccatacctccagcccgtccaatccctcgctgatcaacgcttcgatctggtcatcggacagcagtctgcggttacggctcacatcaccggcatgggcgatcagaatcacaccacctgcccctttgacggcggccaccacttcatgagaggtcggcgagggcgtgggaatatagtatttggatgaggcgctgaccgcattcgcaaacgcttccgaacgagtccgatatacgccggcactcaccaaagcatcagcgatgtgaggccgcccaatggtggttttgtcaccctccttgacttgggcgagcacggattgccaggtaatcggataatcacgagacaacaattcgaccatgcgctgcgtgcgttgcaaccgtgcggctcgagtatcggcgaacaagtccgtgatgtgctgattcgtgggatcatactggtagccgagcatgtgtacggagacgttctcatccgtggcggtgatttcggtgccgcggagcaacggtaaaccgaccctatgagccgcggcttcggcctccggccagccggcggtggtgtcatgatcggaaatggccacgcccttgagtcccaatgccttggattgttcggccaatgtggccggcgtttccgtgccatccgagaagacggtatggcaatggatgtcccacccgacggcgggcggctccaaaggcatcacatatccagtcataccttccatcgtaacctcatctcagcattcccacgcaaggcgcagacaggtcgtcaccttctgccaacggccaagaccagacattcggcactcagctgacaaccgcagaggctaatctggagcgcagcgctatcgaaagggacatgatgactcgtaacaccgcaaccgacacatcatccagtaccacgaacaccacgccgcttggcttggcggaggcgcgaccgttgattggatggcgccacagtgccacttggacatatctcatcatgctgatcgcctcggcagtggcattgggggcctcgctcattctgtccgccgagactttgcagttggctaggcatccggagtccacgctcggctgcgatctgaactcggtggtgtcctgttcggcggtggcccagtcctggcaggcggaaatcgtgaagttcggcgggctgagctatccgaacgcgttcttcggcatcgccgccgaatcggtgttcattaccatcgcggtgatcggtttggctcgtgtgaaggtgccgcgttggttcgcgacctgcacgtggctgggcggactggccgctttggcctactcgtactggctgagcacacagtcgctgttcgtgattcacgcgctgtgcccgtggtgcctgaccctgatgttctccaccaccatccagttcatggcgttgagccatgcgaccgtggccgtgcagggattgccgtcacgtaaggctgtggcggctgatgatggcgacagcgaggccgatgtcgcggcggtgccggccggactcaataagtattaccgcctcaacatcgacctcatggtcgacatactgtggatcgtggcgatcgtggtactcatcatcgtcaccgaaggcgcggccctgttcgctgcctgattcctttacaacaaatcgatatcggcgaccagcgtggctgctccggtcagtttcacgtcgctgtcggtgacgtccacgcgcagggtaccgccacgtacggtgatgtcccagtggctgatgccggtcttggcccgcagcacaatgcctgtggcgcacaggccggtgccgcaggacagggtttcgccgcagccacgttcgttgacgcgcatcgtggcttcacccacgccggtgttctgatcgatgtcgtcgacccgcacgaattccacattctggtcggattcgatggtcgggctcaccacgggcttgatgaccagatccagcgcctcgaccaccggcagggacgcgaaggcatcctcgatcaccgcgaccacgtgcgggttgcccatatccacgaacgtgccgcgcgccgagccctcagcgccggggatggtgacctcgtaggcgtcggtttcgccgatcttccactcccccatttcgacctggaacacgttggctccgtacggcctcatattgccgcgtggcgtcagaatcttgacgccggcacgggtgccgaggcggaacggctcggtggagtcggccacaccctcgcgctgagcgaacaaggtgatggcgcgcgtaccgttgccgcacatctccgccaacgatccatccgcgttacgatagtccatgaaccatttcgcgcccccggccagtacgtccgaaagctgatcatcgcttaaatcagacacgaaatcaggccgtgtcaggcgaatcaggccgtcaccgccaatgccgaagtgacggtcgcacaggaatcggacctcatcggcggtgggctcgaatttgccggacttgtcgaggtacaccacgaaatcattgccggttgcgtgtgtcttggttactcgttgcggaagactcatggctttcagagtactctagggagcgaaacaacaccgcaaaacaatcggctttgtgatcggtcgcggcaacatacggttgcaggcatggctatagggaggattcaggcatgagctcttcggctccaatcggcgtattcgattcgggtcttggcggtatttccgtggctcgccaaatcgccaaggatatgccggccgagcatgtgctgtattttggcgattcggccaacgccccgtacggcgtcaagacgcctgagcaggtgagggccctgagtttcgatattgtcgaacggttcgtgcgtcaaggtgtcaaggccgtggtcatcgcatgcaacaccgccacttccgccgcggtgaacgatttgcgcgaacactacgatattccgatcatcggcatggagccggccctgaaagtggcgtgcgaccgtggtgacgtgccttccgacccgcatcatattccccagagggtgattgtggcggccactcccctgactttgcgtgagcggaagttcgccaagctgatggatcgattcgattccaacaacacgattttcaaggagccttgccccgacttggtggagattgtggaatccgggcggctcggcgaccatgacctggtgatgcgcacgctgcatggctacttcgaccagtacgacatggagcacatcgactcggtggtgctgggctgcacgcatttcgtgttttaccgcgactacttccgcgagctgctgcccgaacgggctgctgtcatcgacggcaatgagggcaccgtgcgccatctgggcgttgtgctggagtccctgggcaaactggcacccgaagacgcgaccggcggcgtggaactcgccaattccgatctgtccgaacgtgttacacggctttcacgcgacctgctgaatgcgtgatcggatgcatgatgatgaataggaggctgatatggcactgaagaccgcgatgattgatgtgggcggcgggttccgcgcgattttcggctgcggcgttatggaccgcatgctggaggacggcatcgacgtggacatgtgctatggcgtgtccgccggggcggccaatatgacctcgttcatcgcccgccaacatggacgcaaccacaccttctacaccaaatacgccttccgcaaggagtatgcgagcgcggagagctatttcaagaaccgcaacttcgccaatctcgactatatctatggcacgctgagcaaccatgacggtgagaatccgttggatttcgaggcctttgaggccaatccgaccggattcaccgtggtggcctgcaatgccgaggacggctcgaccaagtatttcgacaaatcgcgcgtgcgttttgatgatttcgacatcatcaaggcttcgtccgccgtaccggtggcctgcgagccgtatgtagtggatggtgtgccgtatttcgatggcggcatcgccgatccgatcccggtacagaaggcgctggatgacggctatgatcgcgtgatcctgattctgtcccgcttgcgtgacgaagtacgcaagcagcagaaggatctggctccggcccgcatcctcgaacgctcccaccccgccgcagccgagaggctgcgcatacgctacaagacctacaacgacgaactcgaactcgccaagcattacgaagcggaaggcaaagtgctgatcctcgcacccgaagatttgtacggcctcaacaccctgaagaagaacttcgagggcctggaaatgatgtaccgcaagggatacgcggcggccgaggccattccggcgttccttcaggcatagcacaagcccaaaaaacaacgattctgccatagcccattacacaatggcgcaatgacgtcagaccccgtccggcgatggcacaatcgttgtttttccgtgtcataagctcatcaaacgcggtgaagcccctcactgggaggggcttcactgatacatacgccattatgcggtctagcggccacaagcaccgctatttgccggcggcggtcgcggcgtcgttcgtctcggtcgcggtgagcatggccttggtgacctgttcgtacaggtcctggtaaccgccgggcgtggaggcgggcagcaccacggtcttggtgttcttcgattcggacaacgaacgcatcacgtcaagatactggttgaacagcaccacgttgttcacatcgttgatgtccatgcccacggcctgcaggctcttgatctggtcgacgataccgttggcgatctcacggcggtagttggcctggccttcaccctgcagtcgggtcttctcggcttcggcggcggcctgggtctcgatctggatgcgttgggcctcggcgcgctggcgggtggcttccttctcgcgctgggcggcgttgatggagtccatcgcgttcttgacctgcgggctcgggtcgatggcggtgatcagcgtcttgaccacggtgaaaccgaaccggctcatctcggcgcccacggtcttctgcacgtcgaacgccacatcgtccttgcgggcgaaggcatcgtccaaggtcagagcgggaatggcggagcgcaacgcatcctccatgtagctcctgagctgaccggccggatcgcgcagctcgtagtaggcggtggccacgtcgttcgggttcacgcggaactgggtggaggccacgacggtcacgaacacgttgtcaagagtcttggtttccagctgcacgttgagctggttgacgcgcatgttggtcttcatggcgatgcggtcgacgaacgggatacggatgtgaatgccggcgaactgaaccttcaggaacttgccgaagcgttcgatgatgtacgcctgctgctgcggaacgatgaacaatgcggcgcccagcagcacgatgataatgacgaggatgaccagaaaggtgatcatcgctcccccaaaaaatacggacatgactttcctttcactatgcgtcgggaccaccttcggttccggctggtgactcccatcgtatcagccgacggacaaatcgcccgggaattgtacgcattggtgtacagccagcgaccggcaacgtactcggcgacaatctattgccgcgcggcgactaccgctgctcgcccagccgcaggagcgcacgttgcgccacggtggccagcaagtccgcacccgcggcgatggcatcgagcttggcgtagaacgtaggtccgtgcatcggccggtcgccgttgccgacgccgagatgggcgaatgcgcccggtgccttgcctagatagtaggagaagtcctcgccgccgagcgagggctgcgacggctcgaccttaaggcccagctcagtggcggttgacgcgaacagcgccgaccaatccgcgtcattgatgaccgagggcgatccgtactcccattcgaagtccgtggtgacatcgtacgcggatgcgatgccttccacgattgcgcgcagccggtcgtgaatcatgatgcggtcttcggggaatgctgtgcgcacagtgccttcgaggaaagccgttgccggaatcacgttccaggtgctgcccgcttccacgtgggtgacggtgacgacgcggggatgcaccgggtccacgtcctgcccggcaatcgactggatgccttcgatgagtgcggcggccacgcgaatcgggttggccccgccgttgggatgagcggcatggctgcctcgcccatgcacggtgatgcggtatttgtcgaccgcgccgctgtccggcccggcggagatgaacgcggtgccgggctcgccctggttggtgtcatgcgtgccgaaaaacgcctcgacatcgtccagggctcccgtgttgattacggtgaccgcgccggtgggcacctccttggtggcggccacctcctcggccggctggaagatcaccttgacctcgccggcgaagtccgccttgcgctcgttcagcagtagtgcagcgcctagcgcgacggtcaggttgtagtcatgcccgcagccgtgcagatagcccttgttcagcgactcgtacggcacgccggtctgttccaggatgggcagcgcatcgatgtccccacgcaccgccaccacatggccgacactcgcggactcgccctcgccccggataatggcgatgagcccggtcttcagcccgctgtccagaatcctgatgccatgttcatccaagatctccttgatgtgcgccgtggtttcggtctcctgatacgccggctcgggatgctgatggaaccacgtgtagtacgtttccagctgacgctgcagttcagtgttcgtcatattgttttcccccatctttgatgttcagcatggatgccctgcacccataccaccacgttccggcacaggccacgcccccacccacatacgaaaaatctataccacccgccaattcaggcgatcgtgcggtatttggggtggcttgtgggaatcgaatccaacagactcttggtgtactcatcctggggatggtcgaatacgtcatgcaccgaaccggattccacaatccgcccattatgcacgaccagaatcgacgagcagatatgctccaccacacttaggtcatgggagatgaacaggaacgatacatcacgagtatgttgcagctcgctgaacaggttgatgatctctgcctggatggatacgtccaaggcggacaccggttcgtcagccaccacaaactccggctgcaaggccatggcacgggcaatgacgatgcgctgtcgctgaccgcccgaaaactcgtgcgggtaccgattgaggcaggaggagtccatgccgcacagttccagcgtttccaccaccttatcggtgacgtcacgtttcgtggccagcttgtgatgcagcaacgcctctccgatggccgagccgatcttcagccttgggttaagcgcactgtatgggtcttggaacacgtactgcatgcgggtgcgcattcgggccagtttggcattgctgagcgagaagatatcctcgccgccgaacagcacctcaccatcggttttggcattgagacgcagcaccgtctgtccgataggggttttgccgctgcctgactcccccaccaggccgaccgtttcgccgcgatacacgtcgaagctgacatcgtccacggcctttttcacattgttgccacgcgagccgaaaccacgcacccgttcgtagtatttcttcagatggcttacgtgaagaataggctggccctgatgctccttagtctggcatgaatcgtcagtgccgggccgggagcgttcacccacctcggcaatcgaatcgtcttccacggtggcggccaaggtgctccagtcctgtggctgggtgatttcaccgtcatccacttcccgcatgacctcatgcaaagtgggcaaccgcttaagtttttgcccgatgatgggtcgggtcaacaacaaggccttggtatatggatgcttgggatggtcgaagatgttctccaccgtgttgcgttccacgatatgaccgtcatacatgaccagtacgtcatccgcgatttcggccaccacgcccaaatcgtgggtaatgaacagcaccgacaatccgatttcgttcttgagtcggaccaacagacgcagaatctgagcctgcacggtaacgtccaatgccgtggtcggttcatcggcgataagcaggcggggctcgcagcacaaggcgatggcaatcatcgctcgttgcagcatgccaccgctcaactcatgcgggtaggccgtcatgatgagttcggggttcggcagttcgacacgtttgagccatgcaatcgcctgtgtctcggcttccggacggggaacatcggcatgggccagaatggtttcaacaagctggtcgccaacggtgaacaccgggtcaagggaatgcatcggttcttggaagatgagcccgatatcggcacctcgcacctcgcgcatctgcttgacatccaaggtcagcagatcacgcccttcgaacagcacttcgccggattcgatgcggccgggccgatcgatcagattgatcaaagacatggccgtggcgcttttcccggaaccggattcgccgatcaaacagcacacgcgtcctcggcgaacgtcaaagctgatgtcatccacggctttgcgtacggagccgtcatccggataaaagtatgttttcaagtggcgcacaccaagtacgatgtcatcggaatcatcgactttgtcctctttatgtgctgttttgttcgatactatgatgctcataaatgttccctcgtgttacctgcaccgtggtgcatgaccgcatgattcggattattcgatcacatgtcacgaatactgtttggggtcgaaagcgtcgcgcaacctgtcgccaatggtattgatggcgatgaccgtggcgaacaccgcgataccaggcgagatccatagccaaggatgcatctggaaatcgatgaggttgttggccgccgaaatcatgttgccccaggaaggcgtcggctgcatgacaccgagaccaaggaagctcaatgcggattcgttcatgatgccgttggcggtggccagcgtggcttcaacgataagaatcggatacgtgttcggcagtatgtgtcggaacaatttggagcccaggcccagaccgagcacatctgtggcccgcacatacatccgctcacggatggaaagcacctgtcctcgaatcatacgagcaatgctcggccatccgacaaagctcagcatgatgaccacgaaatacaccttggcgtcattgggcactttgaaggcgctgagcagggccgcgatgatgaacataagcggcatgctcggaatggacagcacgatatcagcaatgcgcatgataatgccgtccatccagccgccgaagtagctggatatgacacccaataccgcgccgaacaccactgagacaatcatcgaaatcagaccgatggcaatggagattcggccggcgtacatcacacgggtgaatacgtctcgaccataattgtcggtgccaagcagatgagccagactcggcccctgcttgatgttcatcacgtcgtaatcctcgaacccgtagtgagagagcggaggaccgacatagctgatcagcacgataatcgccaagatggtcaatgcgatgatcgcggaccggttgtgcaggaacgaacgcatcgcgtcacgccacagcgagccaccggtgcaagtcgtatcccgagcgagtttttcatcccgttcggcattggttttgcgggatgcgaatggcagtcgaacgctcacttggcactcccctttgctcgcgtgatacgtacacgagaatcggccatcgtgtacaaaacgtcggcgatgaaattgcccacaaccgtcagaatggccagcagcatggtaatggacatcagcaacgcatagtcacgggtggtcaccgattcgaattggatgcgtccgatacccggccagctgaacacctgctcggtgatgatcgcgcccgagaacagggccggcaaacggaatcccagcagggtaatcgccggcagcatcgcgtttttcaacgcgtgcttgtagatgacctgtgattcgggcaatccttttgctctggcagtacgaatgaagtccatactcagggtatccagcatgctggtgcggaagtaacgggtcaacgggccgaagttcacgcatacgatcaccagcatcggcaggatggcatggtgcagtacatcgaaccaatactgtgctcccgtgtagttggatccggtggtgatcagtccgccgaccggcatgatgccgagattgatggagagagtcttgataagcaccaggcccacgaagaacgatggcagcgacatcaccgcaaacacgacgaaagtgattatgcggtcaaacagcgaatacttgtggcgggcggaatagatgctcaccgcgatggccaaggcccacgcgatgatgaatgccccgaacgacacgaggaacgagttccagatataggtgccgatgaccttggataccggctggttgtattgcatggagaaaccccagtcaccatgcagcagttgacttacccacaagaagtaacgttccagaaccggcttgttgaggccataggcctcacgcaattggtcgagtcgcacctgggtgagtttggtgtctccggagaagaaatcacctggcatcatcgcgaacagcgcgaagaccagtatggatacgccgatgagggtgggtatcatcagcagaaaacgttggagcgtgtaacgtagcatggattaatgagccttatgcctagtgggggtttggatggaaggcaggatgtcactctgcacggcgagacgcctcgtgacacagacctattgggtccatgccgcgaggcgtcatctcgtgtggaatgccgtcactggttcttgatggacagctttgccagctgaatcgccgagtcaccggttccgcggaagaacttgtcaccattctgaatacgatcgttccaggcattgaagcccttgatgtatccaatgagcagatacggcggatcgttgctgagttcctgatagatcttctgataaatcggctcacggctggcgcggtcggacttggcgatgctttccttgaccagcttacgaaccgtggcattgtcgtagccgttatcattgacctgcgggtcagtggtaccgaacggcttgaccgcttcatacggatcgttgatgaccgaggtacggaaggtaatcaaatcgtagtcaccggacttcaaccgcgtggtctccgtgttctgatcggtgaccgtggcctgcaggtcgacgccgatcttcttccactgctccttgccgatgctgatgatcgggtcggtctggtccttggtcacgtagaccaggctgagcttcttgccgtccttctcacgaatgccgtcggggcccttcttccaaccatccttgtccagaagctcgttggccttgtcgggattgcattcgtaggtgttcacgcccttggtggagtatgcccagttgctcggcggagcgtatacattggccacttcgccgtagcccttgtaccaagcggcgacaatctgcttgcgatcgaggccgtagtacagcgcctgacacacttccttggttaggtatggcttcttggtgttgaactcggaataggagtagtacggattggtacggatgttcacatccgaccaaccgaagtccttgagctgggacagcacatcggaatccggaataaacacgtcggtatcggtatcgccattctggtaggactggagcgccgtgtcatcggtgacgaccttgaagattaggtgttcgatctttggcttgctgccataatagttcggatccgccttgtaccgcacttcctggccgggcacgtacttgtcgagctcgtaggggccggcacccagtggcttgtcgtagaactgctgcaggtaatcgagcttgccgcgccggtagtccttgccgtagtacttcttggaccgcacgtagctgccgatggtggtcagtgccacagggttgactttttcggtggtgacggaaacggtcttgtcatccacgaccttgatgccggaaatcgaatcggccttgccggattggtaatccgcaacgcccttgatgccgatgtcggtaaagtcggcgaggccaaagttgtaggccgggtcattttcaagggtcagcgtgaaagccacatcatcggcggtcactggagttccatcagagaacttcgcgctgtcgcgaagatggtaggtgtaggtgaggttgtctttagacacttcccacgatttggccagatcgcccgcggggttgccgtccttgtcatagacgaccaatgcggcgaaaatcggctgattaatgttctcatcccatgcgttgcggtagaagtacggcaggaacacgccacctgggttcttgatggtggcaacgaacgtgtcggtacgcttgttggcgttggccgggctcttggacgggtccgtagcctttatcgtctcgttcttgatggcctgcacgttacccgaagattgagtggcactgttgttcttggaattgccggccgcaccgcatcctgcgagcgcggtggcggcgacgagtgccaccgccaatgctttaatgccgcgggcaataagctgcggcttggttgatattgctatgtttcccctcttgttgcgtgaacgcaatcatgtctcaccggaactgatcattgcggaatcacaccgattcgtccgatgactgattgccagtcaagatgacgcggaagtctgatgtcgcgcatccgttcctctcgcgttccgtttcccgaccttaacgcaaaatgattgcagtctgaccggcgttgttatatcaatcatttatacgaagctatggcttcacgtttttcagtcgttttgtggggtccaagtccgaagaacagcatccccgcgttgtcaagccgccacggactggcaggtcggcagcgattgcggggcccagtgtcgccaaccggccaaggtttggcaggacagcgacgctcacgacacgtcagcgtagtcaagaggccagtccatggcgactcggcgacgctaagacgcctttcagcgtcgttatccggccaaacgctggcaaggtagcgccgctaagcggtttgagcgccgccgtcttgccagcttttggccggttggcgacgctaagcatccatgagcgtcgccaaccggccaaggtttggcggaatggcgacggccgaatggtaggcatggccgttttgcttctgtaatctgtattcgttcggaacatatacgaaaagagccaatggcttatgtcaccgacccttagatatgaatggcggaaacctcagaaagagggctgaggcgaaactacttcagttcgcccaatgcctcaagcttgttcttgatgtcgagcgcagaaggctcgacctggaaggcgccgtccgagtacaggacgacggggatgtgcttctggccgctgatggcgaccgcgcgatccgccgcgccttcctcggtttcgatgtcgtgccagttgaacgcggcaccgagatcgttcagcgcggccttggcacggtggcagtcgccacaccagctggctccgtacacgtcaatggccatgtttgctcctttgatcgtaattgctcgttatggttcgttgtcgtcgcgaacttcgtcgtgagtgatgatacccgtcagaagtgcgcgttgagtttcttctcgcagtactgctgcagccaggtgagcaccgtgctgaacagcaggtagatcaggcccacctcgatgtacagcgccagcggctcgtagtagacggccaccacgcgctgggcggccatgaacatctccaccacggtgatgttggcggccagcgacgtgtccttgaccagtccgatgaacgtattgaacagtgcggggaaggccgaacggaacgcctgcggcagcacaatgcgccgcatgatcgtcacgtacggcatgttgaccgcgtatccggcctcaagctggcccttcggcacggccagaatcgcgccgcgcaacgtttccgaggcgtacgcacccacgttgagtgagaacgcgatcacggcggacggcagcgcgggaatcgtgatgccgatggagggcagaccgaagaagatcacgaacagctgcaccagcagaggcgtgcctcggaacacccacacgtacacccaggcgatctgcgccgcgaccggcactttggccacgcggatcagcgcgacgatgattgccagcagcaggccgagggcgaatgagatcagggtgagcgggatggtcacggtaagtcccggaataaggagcttgccgaaggaatccaccactatcgaccatacccgtgcgtccattgccttgtcctttgcctgtgtgatgcggttattgcgttgttacggtacctgatacggcggccgtcactcctgggagaagtcctcgccgaagtatttctcggaaatcttggtcagggtgccgtccttttgcagcttggcgatggcgtcgttcacggccttgaccaggtcgtcgctgcccttgcggaacggcagctgagcggccggcgtcttctcggacttggcggcgatcttgatgttcgcgtccggcttctgcttgaggtagtcgagcacggcgagaccgtcgttgagggtcacgtcggcacggccggactgcagggcctcgacggcttggccgaagtcgttgacctgcacgatttcggcgcccttctcctgggcggtcttgttccagttgctggtgccggtttcggcggccttcaggcccttgacgttatcgaaggaggagacgttcttcgggttgtccttggtggtcacgaccacgccgtacgagtaggtgtacggttcggtgaagtcgtacttggccttgcgctcgtcggtggcgctgatctggtcggcgaccgtgtcgtacttcttggcatccacgccggcgagcagtgagtcgaagctgccttcggcgaactcggccttgacgccgatctccttggcgatggcggtggccacttccacgtcgtagccggtcagctcgttggtcttggaatcgtggtagctgaacggcgcgtaggtgccttcggtggcgaacacgatcttgccggcggacttgacctgctcaagtgcgctggtcgaggtcttgccggaatcggacgagtcggactctccggcggacgacgaaccacacgcggccagcgagaacagcacggcgacgccggacagcagggccacggccttgcggaacactccatgggtattggacatgatgacgaacccctctcttggttggtctctcattggttgatctattagagaaaatcttgaatgctgtgctgacggcgatggcaatgccgttgggcacgcctgccgcctcatcggaccgtcaggcggccgccggaatcatcagcacgttgttggtggacgacaggaactccgccgtgcgttgctgcgtggggtgctcgaagatctgcttgggatctccctgctcgaccacgtgcccgccttcgatgaacaccacgctgctcgacgcctcgtaggcgaagcgcatctcgtgggtgaccatgagcatggtcatgccgtcctggcccagctgcttgatgacctcaagcacgccggtgaccatttccgggtccagggcggaggtcggctcgtcgagcaccagcagctccgggttgagcgccacggcgcgggcgatgcccacgcgctgctgctggccgccggacagcgtgctcgggtaccggtcggcgaagtccgccagcccgacccggtcaagctgttcgagggcgatcttgcgcgcctgttccggcttgacgccgcgcgagtagatcagtccctcggccacgttctgcagggcgtttttgttgaggaacaggttgtagttctggaacacgaacccgatcttcgaacgcaccttgcggatgtcggcggtgttggtggtggtcaggtccaccggaccgtcgccgaagtcgacggtgccggaatcggcctgctcatggaagtccagaatgcgcagcagcgtggacttgccggagccggacggcccgatcaccgtgaccacgttctgacgcgggatgtcgaggtcgagcccgtccagcaccttggtgccgttgaagctcttgctcaccgatctgatctggatcatccgggctttcctcctgtctgcggtccgcgttgtggtctcgccgattgcattgccacccgccaaccctagtgcaaggccacaggtggcaggtcggcgtggttatatgcgttgcctataaagcgctatatgcgcagcatgtatataaggtacgccatgcggcacgccgcatggtacagattcagcttgtagcacgctatcggttttcgcgattgccacgccccaaccgcgccggttgcgccgtgctaggttcgggaaaggcgcggccgaaccgtcgcgccgatcatcgtcaacgactggtcatggggattcgcgatacatcaggagagggtcatgtccgattacgttcgggtcgccgcacaggaactgcaggactttgcgaccgcagtgttcgaacgtcggggtttcgcccatgatgacgccgcgttcatcgccttaacgctgctcgatgcggaccggcacggcatcgcctcccatggcatgcagcgcatggccatgtacgatcacaagctacgccacggcatgatcgatccgtccgcgcgcgccaccgtggtcagcgatgccaaagcctgcgcggtgctggacgggcacagcggcatgggccagctcatctcccgcgacgcgatgcgtctcgcaatcgccaaggcccgcgaacatggcatcggactggtgaccgtgcgcgattccaatcatttcggcaccgccggcctgtatgcgcgactggcggccgaccaggggctgatcggcgtggccagcaccaacagcaatccgctcaccgtgcccacgcacgccggccacccggctttgggcagcaatcccatcgccttcgccgtgggacgcggcgacgaccagttcgtctacgacgcggccaccagcactgtctcgctcggcaagatcgaggtgctcgtcaaactcggcgaatccatcgagggcgattgggccgtggacggctccggccgcgtcaaccatgactccgccgacgtgatggacaacattcgcgccacgccgcgtatcggcggattgacgccgctcggcggttccggcgagctcaacgccggatacaagggctacggcctggccacggtggtggagattctcaccggcgtgctgtccggcggcctgctgtccctggacatgaaaggccagcatatctgccactgcttcgccgccatcgatctggaggcgttcggcggcgcggccacggtcggcgagcgcgtcgcctcgctgtccgctcgcctgcgcgccatggactcggtggacggccacgacgtgctggtgccgggagacacggaccggcttgccgcagcgcgcaaccgcgcttccctgcccatcgacagggcgacgttcgatcagcttgcggttattggcaagcgcgtcggggtcacgccgccggcggccctgccgaagacttccggcctcgaatccgaaaccgccgcccgccaataggcgacaaccaatcgcacacatcacacgtacaaggaccacccagccaacaccggagatacgcaatgagccaaacacctgacgcataccatcagcctgtggaatcgccgcaaccgaaacctcaccatttcgagccggccgatgcggtgattccgcaactgggcaacctcaccgcgtccgtcatccgctcgttcgacggcgaggtgtcgtcgattcccgacatcctcaagctcacgctcggcgaaccggatttcgcgacccccgacttcatcaaacaggccgcggtcgaaagcctggcccgcaatcgcacgcattacgcgccgaacgcgggcacccccggactgcggcaggcgatctccgactatctggcccgcagacgcgacctgcattacccggccgaggacatcgtcgtgaccgagggcgcgagcgaggcgatcagcagcgcgctgaccgccctgctgcatccgggcgcgaccctgctgtacgccacgcccgggttcggcctgtaccgaagcatggccgccctgaccgacaccgaggcaatcgaaatcgacaccacggacaccgatttcgtactgaccccggacgcactggagcgtgcgctgcgttcggtcgaaggccgggatgcggtgctggtgatcaactcgccgaacaatcccaccggcgtgaccctgaccgccgaccagttgcgcgcgttggccgaagtcgtcgaacgccatgacgtgacggtgctgagcgacgaggtgtatgcggagatcagctacgaggcgcgcccggcgccgtccatcgcgctgttcgcgcccgaacgcaccatcgtggtggacagcacgtcgaagaactacgcgatgaccggctggcgcctcggcttcttcgccgccccgcacgccctgagtgcgcagctgctcaaagtacatcagattcacgtgtccacggccgccatgttcaccatggacgccgcgcaagtggcctacgaacgcggcgacgaatccatcgaccgcatggtggccgaataccagaaccgtcgcgactatctggtggacgcgctcaccgggctcggctacacgatggcccgaccgtccggcgcgttctacgcgtacgtcgaggtgccgcccatcttcgatggcagcagctacgactatgcgcggcttctggcccggcgcgcgaaagtcgccggcattccgggcgaggcgttcgtcagcggaccgtcccggtacgtacggttcagttacgcggcctcactggacgcgctgcacgaggcggtgaaccggatccgacggttccgggaacaataggacttatcgggctccgacgccacgcgcccgcctgtgttctggttcaagcgctcccccgccactgatcttttcgacgtattccaatcccatcaatcttcagaaaggccaccatcatgacctccatcgccttctaccacaccatcgacgaggagcggccgttcgccgaggcgtgggccgccgaacacggcgtccacgtcgaatgcttcccgttcgagctgcatgaggacacactgcacaccgtcaagggtttcgacggcatctcctacaagcagcgcagcgcgccgagcccgaaccccgacttctaccgtcgcctcagcgagtacggcatccggcagatctccctgcgttcggccggctacgacaccatcgacctggccgccgcccatcgcaacaacatccgtatcaccaacgtgccgtcctactcgccgcccgcggtcgccgagctcacgctcagccacatcatgcgcctgatccggcacgtgccgcagttcgacgagcgcgcctcccacaacgatttctccgtgcacgggctcatctcgcgggagatcagcgaactgacgatcggcatcatcggcgtgggccgcatcggctcgaccgtggcacgcatcttccatgcgctcggcgcgcgcgtgctcggcaacgacatcaacgagaaccacgaactcgacccgctgctcacctgggtgagcaaggacgagctgatcgcgcaatccgacgtggtgacgatgcacacgtatctcgacgccaccacccgccatctcatcgacgcacaccgtctctcacagatgaagccgaccgcctatctggtcaacaattcgcgcggcggcgtggtcgatacgcccgcgctcatcgacgccctgaacaaccatgtgatcgccggcgccgcgctcgacgtgcttgaaggcgaggccaagctgttcggcaacgaactgccctccgaccagccaatcgacaaccagtactacaacgcactccacgccttgccgaacgtggtgatcacgccgcatatcgcgttcttcaccgacgtggcggtcaaaaacatggcccagcagtccctggacgacgcgctggccatcatcaccggcggcaccagcccgcacgaaatcaccccgtacgacaatctgtaaagtctgtaaaggaaggacggcataaccccatggccaagccaatcaccgattcccaaatccgcatccgccgcatgctccccgaggattacgaggaggcgtatgccctgtgggagcgcacgcccggcatgcatctgcagtcgctcaacaacacgtacggcggcatcgcgctgctgctgtccaagaacccggacagctgcttcgtggccgtggacggcgcaggcaaggtcgtggccacggcgctcggcgccacggacggccgcaaaggctacctctaccatgtggcggtcgacgagcagtggcgcggcaagggcatcggcaccacgctcatcaaccgcatctacgacgtgttcaaggccatcggcatcgtcaagatcggcatcctcgtggtggcggacaacatcgaaggccaggaattctggaagaagcagggctggaacacgcgccccgacgtcatctacttcgaccacaacctgtgatgtgcggcacggcgttgcttatgccttgtaacaggccataagcaacgccgataaagacaccgccgagtcccctcttgttcccctgtaggcttcacgagtgttgcccgggtagacaaggaagggacattgccgaatgacgaacagcatcatcgaaatatccaatctcaataagacatacgccaccccggacggcccgtacaccgctttgcaggatgtcagcctgaccattcccgagggttccatcttcggcatcatcggtttgagcggtgcgggcaagtccacgctggtccggtgcctcaacgggctcgaatccaccaccgagggcacactcaccgtgctgggcaagtcgattcccgacctcaagcccggcgagctgcgtgaactgcgtaagtcaatcggcatggtgttccagcagtacaacctcatgccctcgcgcacggtggagaacaacgtggcactgccgctgaagaggtcctcgctgaaccgggagcagaagaaggcgcgcgtcaccgagctgttgcagctggtagggctggaaagccacgccaaatcctatccatcacaactgtccggcggccagcagcagcgcgtggccatcgcccgcgcgctggccaatcacccgcagatcctgctgttggacgaagcgacgagcgcgctcgacccggacaccaccaaaaccattctcgaactggtcgaacggctcaaccggcagctgcatctgaccatcatcgtggtcacgcacgagatgaacgtggtcaagcagatctgcaccgaagtggcggtcatcgacaagggcacgattgtggagcagggcgattcgttcaccgtgttctccgacccgaaggccgacctgacccggcgcttcgtgagcaattccaccggcctgagccgcatctacgaactcatcgattccgattcgccgattctcgaaaccgggccggacgagcggttgatccacatgcagtacgtggacaagaccgtgtccgagggcctggtgtcgatcatctcgacgcggttcggactgacggtcaacatcctgttcgcctcgctcgacatcgtcgacggctacccgctgggcagcatcgtcgccaaatacaagggctccgacgcgcagatcgaccaggcgcttgaattcctcaagggcaagggcatccgcaccacggtcatcgaaccgggtgcggcgaaggccgacatcgatgccgtcgagaccacgacggtcgaaaacaccgacaaggagaacgcacgatgaccatcctggacaagctcttcccgcacgtgatggagaaccccgacgtgttcgtcgaatcgctgatcgacacgttacgcatgttcttcacggcggtgccgttctggttcgtgctcggcctgttcttcggcatactgctcacggtcacgaagaagggtggcctgctgcagaaccggccggtcttcgagttcttcgacaagctcatcaacctgtgccgttcgattccgttcgtcatcatgatcgcgttgctgttcccgctgacccgactgatcgccggcacggccatcggcgtggaaggcgcgatcttcccgctgatcgtgggcatcaccccgttcttctcacgccaggtggaatccgtgttcaacgggctcaaccccacgttgatcgaatcggcccaagccatgggattcggcccgctctcgatcatctggcacgtctacctgcgtgaaagcatctccggactggcacgcgtgaccaccatcacctgcatcagcttcaactcggagatcgccgtcatcggcgccatcggcgcgggcggcctcggcgactacgcgaaccggtacggcttcgagcgcaaccagctcgacgtcactgtggcggccgtgatcgcactgctgattttcatcaccatcatccaaaccatcggaaccattatcgggaggaagaatgaacactgagacgaacatctggaccggccggtcgcgagtcggcaaacgcatccgcgcgggcctggccatcgtgtccgcgctcggcgtgctgttcacggcggcggcctgcggctcggcttcggcgtccgacggcgtcaccacgctgaaggtggcgctgaccacctcgaccgacgacccgctgtgggaccaggtgaacaagaacctggaagcggagaacgccaaggtgcgcgtcaagaccgtggccatgaagagcgccgtgctgggcaaccaggcgctgtccgccggcgacgtggatctgagcgcgcagcagcattacgcgttcctgaacggcgagatcaaggagaagggctacaagttcacggtgatcggcgaggcgtacatcagcccgctgaacatctactccaacaaaatcaagaagatctccgaactgaagaagggcgacaaggtcctcatcccgaacgacgtcaccaacggcggccgtgcgatcatcgtgctgcaggaggccggcgtgctcaaggttgacccgtccaagaacgacccggccaagggcatctaccccgcccaggaagacatcaccagcaatccgaagaacatcgagctggtgcccaccgaccgcaacatgatcatgagctcgctcgatgacgcggcggccggcatcgccaacgcgaacgccgtggtcgattacggcaagagccccaagaaggacgcaatcttcaagatcgacccggaccccaccaaggacgtcaacaagccgtggatcaacgtgatcgtggcccgcaccggagataaggacaaggatatctacaaggaggtcatcaaggcctaccaccagaagaacgtccgacagatcatggagaacgagtccaagggcaccgagattccaacctggtgatcgttggtgttggcgggccggcatggattgattatgagtctgtgtgtggtcttggccggccgatgattcgctgctgataggggatgcggcctcgcttcatatgagatatgaggcgaggctgcatccccttatttgcgtgccggaagtactcttgccgctgtgaatttggccatgcggggccggcaagtggaagcggccgatatcggtcaggaaaacaaacactggaaccaattggaaaaccggcggggaagctcgtataccgtaaggcatgagtactcctgattattacgacgcctatggcccccgcagcccagcgtgacgacgacgatatgccgctgctcaacgtcatgtttacggcgcagctcgtcctgctgttcatgccactgcccgccacgttcaccaacatctggggcattctctccaccctgctcatgttcccgctgttccaacagctcatggatctcgccaccggcaacgtcgacgcggaagaaagcggcaagcagctccacttccagtgagtggtgcgccggcgtatcctatgggtgttggcacaacccgcgacggcacccgtgcaataccgcccgttgcaatatcactcgtggcaacactgcctgtgacggtgtcacatagtcgtatctcatcgggcctctgcctcaatcaccatatggcggacgcattcctcccacatatcggagaaatgcgggatgccgcgcgattttcggccgatttggggctgtcgtcccgcagccgtgcgggacgacacgcacgtcaaacgatacacacagccggcatcccgcaccccatttcgctggaccattggaattccgccattttcataatctcgcgacgacaccatactgcgcaccatttcaccatcaaacgattgacacaacaacggtggcaaccacgccatcggcaccaggacacacagcgagctcgaacctatcacgattcgagcgaaaccttcgttgttaaagaaaaaacgctcaagttcctcctccaacacagagaaacctgagcgcagcaatcaagcacccaacacccgccactacttcgaggcaacgatggccacgtagttgccttgagtgtagcccttgatggggtcttcgacctgatcgttttggtagggcggattggcgagcacggtctggaagaactggagatcgcggtagccgatgcggatcagcaggtcggcgtaccagggaatcggatgccagttcggtttgtaggcgtgcgtgtcgagattgaagaacgaggtaccgaccagcaggtcgtcgatgtcctcgcgtgcaatgtcgtagcgctgcgcgagcttcaggatgatgccaagcgtgctttccgccggcacatcggtgaggatcagtcggccgttgtcggcaaggacttcgcggttgtgggcgaaggtcgactcgatttcgtcatcgggaatgaagccgaagctcgctccgttgtagacgatggtgtcgtacggcgctcccgcgtagtcgcagtcctgcgcggtgctttccaccacattcaaccctttctcgcgggccgtggcgcctaggcttgcggacggttcgacagcctcggccacctcgatgccgtatcgttcgcgcagcagggtctcgaagatgcccgagccgatgccgatggacaggatcttgcccggttcgcgggtggtcagcgcccggtgcagcagtcgcagacgcgactcgtagatattcggtcgcgcgcgccaggtgttgtcgagaatctggccgttgtccttgtaccggtcgaaaaatggttctcccatgggtgttcctttcccatcactcgtcgtggcagcagccggagccgccggccgtcttggcaccggcgccggcgccggaaccagaatcggccggattgcccgcggtcgattgatccgtggactgcccggtcgtgccggtcgaatctcccgactcccccgccgtcgtgtccttcagctgaccatccgactgttcggtcttttcggccgacgccgcctgatgatggtgcgcggcattatcatcgctcaccttgctgctggttccggactgttgcggcgcggaggtgcccgccgcgctgccgcaggcggacaggcccaccgtcagcaggatcgcacagaacgatccgatagccaccttgccccaacgagttgtctgtaatgtagtcgatgtagtcataccctttccttgttcatccgttaacgagctcaagacacgctacttacgcgccaccaaagccacgtaacttccctcctgatagccttcggccaccggctcgcgggcgtcgttctggtagatcaggtgccggcgcagcgcctgccaggtggagaatcgttcgaagcctccgtcctcaagcagcgcgcgatagtcgtcggtagtgcgccagtattccttgtgcggggtttcagccccgtaccagctggcccgctgcacttccgctatatacgattcgccgggtatgacgaacgacgcctgcaccgcaattcccaa

SEQ ID NO: 2755 - DNA, 17921 bp, Unknown
  R36_18m  MAG No. k141_13973
ccggagcgggcgccggagcgggggtcaccggagtggacggcgtaccgccctggttaccggtatccaccctgttggcggcgtcctgctgctccttctggaactgacgattgtaggaatcgacctgggaagcgatcagtacggtctgggccgcctgcttggcggattgggaatccagactgtcgatcatggaagacagttcgtcacgccttgcttcgccttcctggcgcagcttatccaaagcgtcacgttcgctttgcgcggtttcggcggcggtctgtgcggaagcggccttctcatcggcctgggtcttgagcacagcgatctgcttttcgatggccgccaagcgctcgccacgattcttcgacgtgctcagtgaggtcgcggcggaggaagccgcattcgcctcgttgcgggacaacgcgtcccgggactgcatggagttgacgaagtcctgtgtgctggtggcacccgtcaccacgctcatcacgtcggaagcattcgagccgtgcatctcgtcacgggccagctgggccacggcggcgtgcgcgtcatcgtagtccttgccggtctgcttgatccgctcctcaagcgtctccttgtctttctgcgcggcggaaagacgtttggatgcggcgtcggcctcgtcctgagcggtggcggcatcctcgttggcctgtgtgaccttggcctgcgcggcgacaatcttgttgttggtcagatcgtccagctcaagtaccttattcgccaggtcctggctggcaccggccagctgctgcttgagttcggcctcgcgctgtaccgacgcggcgtgctggttctgcgcattgatcaggtcggaataggtgtctgcctgggcaggctgtgccgagctgaacgccagacctcccacacaggctgcggcggccaccagtgccgccagtgcgggcttgatcacacgtacgttcgtcatatgtgaatagtcctttcgctcacttaagccaataccataacatgcgaacctgagaggcttgcacacgatgtcatcacatttctcgcgggtaagccggtcgcgttacgccctcaaataacgccgcaacgagatggttgaagcgatgatggacagcagtatcgcgcccacaaccaggaacggcgatatcaccagtaccgtgagctgattcacataaggaatccatgtaacggatttcgccagccagccggtgacgaacacgttgacgatagccgaaagcatcaggcacgagagcaccgagccgatcagcgaggcgatggtgccctccagaatgaacggcagacgaatcgtccagttcgaggcacccacgtacctcatgatttcggtttcggttcgtctggatgcggcggacatacgaatggtggttccggtcagcaggatggcgaccaccaccatcacgccggcgagcacagccgtaaccgccgtggctcggttgagcacggcgaacaccgggtcgaagatctggcgctgatcggtaacgtcttccacaccctccttgccggagagcacttcggagaccacctgatatttggtggggtccttgagcttgagccagagggagtcctgcatatcgtccgcggtcagcgtacggccttggaattcaccgttcgggtactgcttggtgaaggtgttgtcgtagaaatcctgcttgctgacatagtcgatgttggagaccacgtcgttgagttcatcgcgaatggttttctgcagtgccgtgatctcattggctgagggcgatttgccggaagcacagttcgcggactggctggtgccgtcggggcatagccataccacgacctcgaccttgtcgtaccagtcgcccttggctttggtgatctgcgcctgagtaagcaccgaagcgccgatgaacaggaatgagatgaaggtgaccagcgtcagcgacagcagcatcgacaggttacgggtgaggttggcccacgtttcggacagaatgaatcgtgctcgcatgatgatcccccttactccttagcgccctcagcgggttgatcgtcggatgtttggtctgcggcggactgctcgtcagcaggctgctcgtcggcggactgctcgttggccggcggtgcgggcggttccggcggtgcgggcggctccggcggggccggcggctcggcgacggatgacacggacgtatcggcaaccgcggcggtcgcggcggactcgtccttgaacgggtcgaacgcctgggtgctttccagggcggcggcctgctcatccaacggaatgcccttgccccaggtcagcgtgtcttccagcggcgcaaacgtctcgccatagcggccggtgcggccggaatgcacggaattggccaaacgggcgatgccttcagacggctcgtcactgccctcgatggccttggtcgccgccgccagcacatgatgggcggtgtcggacttggcttcgacttcggcatccgggaagaacagggcggaatcgtaggagccatgagcctcgtcacgcacgatcttgccgttgtgcagttcgaccacgcgcttgcgcatcgagttgacgatctcttcgttatgcgtggccatgacgatggtggtgccggtgcggttgatggcgtccagcacttccatgatgcccagcgaagtggtcgggtcgaggttgccggtgggctcgtcggccagcagaatctgcgggtgattcacgtaggcgcgggcgatggccacacgctgctgctcgccaccggagagctcatgcggatagttcttttccttgccggtgagtcccacggtattcagcaccttgggcaccaacgatttgatggtggaccgccgcgtgccgatcacctcaagggcgaacgccacgttctcccatacggttttgttattgagcagcttgtaatcctggaacacgaagcccagcgaacggcggtactgcggcacttgacggttggtgatgcgccgcagatcgttgccggccacgcgaatctcgccgctggtggcctcctcctcgcgcaacagcaggctcaagagcgtggtcttgccggagccggacgcacccacaaggaacacgaaatcaccgcgttcgatatcgaggttgatgtcgtcaagcgccggtcgggtgcctttgggatagatcttggacacattgtccagtgagatcagtgccataatgctgtttactcctcggtttcggcggcgcggcgctgttcatggcgccagcggatgccggcctcgatgaacgcgttgatgtcgccgtcgaacacggcctgggtctggctggtttcgtagccggtgcgcagatccttgaccatctggtaggggtgcagcacgtaggagcgcatctgatcgccccagctggccttgatgtcgccggcgagctccttcttcttcttggcctcctcctcgtggcgcagcacgagcagtcgggactggagcacggccatggcggaggcacggttctgaatctgcgaacgctcatcctgcatggtcaccacgatgccggtgggaaggtgggtgatgcgcacggccgagtacgtggtgttcacgccctggccgccggggccggaggagcagtaggtgtccacgcggatgtccgtatccggaatgtcgatgtgatcggtggcctcgaccagcggcaccacttccacggcggcgaagctggtctggcggcggccctggttgtcgaacggggagatacgtaccagacggtgggtgccgccctccacggacagacggccgtaagcgtagggggcgtccacctggaaggtggcggacttgatgccggcctcttcggcgtaggaggtgtccatgaccttggccttgaagccgttacgctcgcagtagcgcaggtacatgcgcaacagcatctgtgcgaaatcggccgcgtcgacgccgccggcaccggagcggatggtcaccacggcggaacgttcgtcgtattcgccatcgagcagggtctgaatctccatctggtcgagatccttctgaatctcgccgatttcgctttgtgcctcgtccagagagtcctggtcgccctcctcgtggccgagttcaacgagcgtttccacatcgtcgatgcgctgggaggcggagttcagacgcttcagctgcgattccgcggcggacagccggctggtgatcttctgggcgttttccggatcatcccacaggcccggggccgcggcctgcgtttcgagatccttgatatcggccttgagccggtcgacgtccagcgccttggcgatggattcgtatttggcgcgggcttcgccgatcgcctgggtaaagtcaaattctgccatcgtggtttaccttactgttgattctttgagattctttgggaagtcacgtccttgttgacagccttcgcacattcctctggcgttggcgggcattgccgcgccacacacgcatccgcctgcaatccatgctgccagaaggttccgggcctgccttgccgatagccggccgggcgacctcacaaatccctcgcatcagacgtgttcaactgcgggcacgaatatgcgaaggcaacgtcaaagccccgcgtaaatcgccgggatgatcagggagccgagcatggccacagctatgacgacacacaccacacgcacgatggtgcggcggcggttctcacgctgctgtcggccgtcctgatagttactcacgagaccaatagtgtactcaccgcttacgaccgcaggacttgccgccgacgccagccctgccggcgggcccccacggccctttcctttgcgctttcagcgccgccagatggtgtttcatggccaccagcatgatgtgcgaatcctcaaggcccaagtggcgttcgttgtgggcggaatcaagcgcgccctgacgtttggcgtaggcgtcgagcgtgttgtctccgtaaggatgctcgttggtgggtaccgcgccggggtcccactgccggctcatcggcagggtatcgatgatggtgatgcgcccggcacggtagctttccgcgtatccggcgacgttcagcatgaaccagctatgttcgaaggtggcgttatgcgccacgtacggctgctgggtaagccgcgcgagcaggccggcctgggcttggggccattcgtcgaagagtcggtacccggcctcgctgctgcggccgcgtacatcgatgccggtgagtttggcgatgagggcgttgccgagcgccgcgttttccggcggcacgccaaaagcgagacgggactggccgtaggcgtcgccggcggcgtaatagccctgctcataggcgtatgtctcaggttcgccggccgggcgcggactggccatgttcatgaactcgaagccgacgtcgatgatgtagtcacgcgccggatcgatgccggtggtttcgatgtcgatgcccatcaccgcgtccacgtcgcggccgggcagataggcgtcgcgccagtcgggcttgggatggtggccggtagcgttgccagacgaggcggcaccacccggcgaagtcgcgccggagagattggcgcgggccatcgccgcatcgcccgcacgcttctggaagcgctgggccttacgtcgttcggcgcgtgcgtcaagaatcaccgccgtacggtcttggatatcgtccaaggcgactgttgtggggaacttgacatcgctgttttcggcagcagtgtttccggcagatgcgtcaccggtttcaccgctcagattcagcatgccttggtcatcgttcgatgggcggctgccggagtacggcctgagcacggcaacggtagtcctcccccgccgttcgcgactgaccacccataggtgttgctgttcgcccagatgcaacagcgtgttgatgttgtcgttgagccgacgattggcgtaggcgagcgcgcgaggcagacgataggagccgatgaatcgatcgtaatcggtcatgaatgtgctgttgcattgggcgatgattgattccagatgctcgcgtgtggcgtaatcgaccttcaatgcgtcgtggatagcttgtggcgtcagttccggttggtccaacccgagctgaggctgtgctgcggtttcgccatattgctcaccatctgcagcaagcgccagcaatacgctgatgccatgcatcaggtccagcgaacgcacccagtcccagtcaatggtggtgccgtcggcgtctttgggcatggacgccgcccattggggaatgtctcccttggcggcgtccagccatgtgcggtcgatcatagtgcgaagccgagttcttcggcggcctcggtgggtaccgggtcgtcgcaccaataatcctcgaggttttcggtggtggtcagcgaacggatttcggcgcgatcgatatacagttcgccgctcaaatgatcggtctcgtgctggaagatgcgtgcgggccagccgtgcaacggctcgctgtggtgcttgccgtcttcatcatcccattcggcggtgatgtcgagccaacgcttgcgcacggcctggtatccgtcgaagctcaggcagccttcgtagaacgaggcggttttgtcgctggtgggtttgtagctcggattgatgatcacgtggaaggggaattccgcgatttcgcgcggatcatcctcgtcgtcgcgcacgtggtcttcgaccacggcgagcgcgagccccaagccgatctgggtggcggcgagccccacgccgggcgcctccagcatggtggtgtgcatcgtatcgatgagtttggcgagcgtacgcttggaaagctggccatggtaggccaccgtccgttggcgcaacaccggttcgccagcctgcacgatgggcaggagcttctccttgccgccggttttgatgagttgttcgacatcacggttgagttcgaggtcgactttggcgttctttccaaacattgtttttttccttagggaagggtgctacagcgcgagttcttcggcgacgatcttggcgaggcgggtgcagacttcgtcggcgtaggcctgggtggcggcttcggccatcacgcgtacgagcggttcggtgccggaggggcgcagcaacacacggccggtgtctcccagcagttcctcctcgcgggccacggcatcctggatgcgcttgttggtggcggcggctttcttgtccacgttcggcacgttgatgagggtctgcggcagctgcgggaagtcggcggcgagctccttcaggctcttgccggacttgacgacctcgttgcacagggtcagtgcggtcagggtgccgtcgccggtggtggcgaattcgcggttgatcacgtggccggactgctcgccgccaagcgagtaatcgcccttgagcatttcctcaagcacgtaacgatcgcccacggcggtttccacggtcttgatgcccatgtctttcagggcgagcttcagaccgaggttgctcatcacggtgaccacgagggtgtcgtggttgagcttgccttcgcgctgcttggcacgggccagaatgcccatgatctggtcgccgttgatcatgttgccgtcttcgtccacggcgaggcaacggtcggcgtcgccgtcgaaggccacgcccatcacggcatcggtggccttgaccatggcctgcagctgctcggggtgggtggaaccggcgttcttgttgatgttgtagccgtccggcgaggcgttgatcacgattacatccgcaccggcacggcgcagggcttcgggagccaccacggaagtggcgccgttggcgcagtcggccacgatcttcagtcccttgagcggcttgggctgggttttgtcatcgttcagcggagcgatggtggccaccagatgatcgatgtacaggttggtggcggtggtctggtcgtggctcacgcggcccacgccggcaccggtcgggcggtcccagtcctggccgagcacggcctcgatgtcgtcttccttctggtcgggcagcttgaagccgccgcgtgcgaagaacttgatgccgttgtcgggcatcgggttgtgggaggcggagatcacggcacccatttcgacgttgagcacggaggtcaggtaggccacgccaggagtggggatgatgccggcatcgatcacgtcgaagccgccggcggccatgcccgcggacagggcggaagccagaaaatcaccggacacacgggtgtcacggcccacgagcgcgcggcggcgtccctcaggctgatcgtcttgggtgccggcgtcgccgagcacacgcacggcggcatcgcccaaatccaacgccagacgtgcggtcaaatccctattggccagtcctcgaacaccatcggttccaaacatcttcggcatatgaagttccactccttgtatcgcgttacccgcaccatcgtagtcgttgtgctccaccctaggacccgactcggcaaaaaacgccacggaatctgctctaggaccagacaatggcattcccgagccacaccgaaccctacccaatcggacgaatcagcgaatcaggcgcgtcggccttgaatcactccacgggtgcagtgtatgccagctgtgccacgaacagcccatcatctctcgtgacgatttgcgcacggccgggaacggcacgcttcggcttgaccttgccgataagctgcccctcgttgggatcgccggacagcaaaataccggtcatgcccaaatcctggaacgattgcagcagaggatcatacatggctcggctggcaccaccggtacgccgggtaatcacgacgtgcaggcccaaatccgacgcttgcgccaaatatggtgccaacggcttcagcggattgccgcgactggtggcgaccaaatcgtagtcgtcgacgagtacgtacacttccgatccggtccaccatgaacggttgcgcagctgttccggggtcaagtccggccccggcatgcgggtcttgaggtaatccgcgaggtcgaggaactgttccgtggcagtgtcgtcattggtgatgtacgccccgagatgcgagtccggtatctgtgcgagattggctcggcggtaatcgaccatgaagatcttcgccttaccatccgggtagcctcgcacaatctcgtgcacgagaagtcgcaacagtgaggatttgccggatttggcgtcaccgaatgcgtagaagtgcggctctttctgcagatcgagcacgaccggtgccagcgcgttctcattaataccgaggacgacccttcctctggtcagcaattcggcggccttcggttgcttcataaccgcggaaatcatcggttcgtaaggaagcttcgtgggtagcaagcgcagctttggaccgggcttgcccttccacgcggcatgcaccttgttgacaagatcggcaatgccatccgacacggtggctgcctcgtgattgctgtcaatacgcggcaaaacggcaagcgtatgcagtttcgccgggctgagtccacggcctggcgcgcccttaggcacggtcgtcgcgatcctgcggtcgatttgggaatcgccgggatcgccgagacgcagttcgagcttggtgccgatgaggtcgccgatgttggctcggatttccatccaacggttggcgctaagaattacgtgaacgccgaaagtcaggcctcgcgccacgatttgctgcacctttggttccagctcatcgtaatcgccgcggaacacaccccatccgtcaatcaccaggaacacatcgccgtaaccatcatccacttggccggctgccctgcgcctgcgataagtatccatgccgtcgatgcgctgttctttgaagaaccgctcgcgagcgtcgataatgccggaaacctcggcgagcgtacggcgtactttctcttcctcattgcccgcggcaacaccgctgacatggtcgagtccttccagcgtggtgaacgtaccaccgccgcagtcgatgacgaagaactgcacctccaatggcgtgtgagacaacgacaacgaggtgacgatggatcgcagcatcatgctcttaccgctgagcgggccgccgacgaccgcaacatggccgccagcgccggacaggtcaagcgccatgacgtcgcgcttctgttcacgcggcttgtcttccaacgcacaaggtgccatcagcgcgccgcgcttacgccacgatggcgaaatcaggccatattgcgcagtgacggtgaggtccggcatgaactcgtccaaggtgttcggcacgaccagaggcggcagccacaccacgtgcgccggcctgcccttgcctcgcatctggtcgacggcgtactggaacgtcgtggtgtctccatccaagcccttgggtacgccggacacgtacgcagcacggaatctggtgatggttccggccggtgttttgaggtaaccgatacccggcaggcttggcagttcgtatgcgtcggggatacccagcactgcgcgggattcggacgcggagaacgttttgaggccaacacgatacgacaaatgttcgtcaaggccgcgcaacttgccctgttcgagtctctgagaagcgatgagcaggtgtacgccgagcgaacgtccaacagcaccgatacgcacgaaggactgtacgatgtcgggttttgccttaaggagttcggagaactcgtcgaccactaccagcagcgacggcagtggatcgaggtccgtgcgcccgccgttgacgcgcgcatcctcgtattcggtgatgttcgccagattaccggcgtcgcgcagcagttcctgacgccggttgatttcgccgtccagcgcatcttccatacgatccacgagggaggcctcgtctccaaggttggtgatgatggacgagatgtgcggcatgccgcccatgcccgcgaatgtggcaccacccttgaagtcgatgagcacgaagttgagctggtcgggcgaatggctgagcgccaaagacagcaccaatgtgcgcaacacctcggatttgcccgagcccgtggcgccgacgagcacaccgtgcgggcccatgccgtgctggcccatttccttgatgtcgagatatgcggtgctggtgtcgtcgtgcagtccgataggcacacgaagacgttccttgcccgtacggtaggcccacagtttggcaaggtcaatatgacgaatatcgtcaatacccagcaatgccggcaattcgttggatttcttgtgcccggcagacgaagcggcctgtgcggattccgcatcctccacttcgtccggggcgctggcgagccgctgagcgatggcgagggcttctcgcaccgtaagcgcatccggcttgatgtcgaatggcttgatggtcgtggagaacagctccacggtgccttcctcatgggtttcgagcacattgaggccctcttcaaccgttgtctgagagaacagcacacgcagtacattgtcttcttcaaggtcgccccattcgtcgggcaggtcgatcacggtgacgccgtcaagaccatccgaagcgaatagctgagtttccttggcgagttgctcccggtcaaacccgtcgttgaccaccagcacatgtggcacgatttcatagtcgctaccggtataccggttacggtcaagcgcctgcgatcccacgagcaggtcaaccgcgtgtatgttcgaggtgaccatataacgcccatgccccactgtggaggcaagtgcctccgccggttcttgggcgagttcgtcgttcaatcccgccgcttggggcagcaaccgcacccaatcccactggccgatgcgagcctcggaagccaatacgacgatacgcaggcaatccggggcatgccaggtagccgcttggcacaacaccgcgcgcgcaagcgcctccgtacgctcaagatcgcccagcagctccactcgtttgaactgccgcatgttgacaacgtatggcatattgcgcaacgattcgtgcgccagcatgaaccggtgagcggccgatgccgaaactgggtctagttgtgccaatggcggcagctcaggcgcttcgagcgtgatgcacagaggctcatcatgcacgccgaagcgcagttgcatgaagtccccatcggattggatacgctcccatcggcgtgcgggttcctgcgcgatggcggtaagcgattgcggtgccggagcattccacaacgccgcgttacgctgtttgcgcccggctgtgcgcactgttttacgcaagcccgacaagtaggtaaggtattcgcggcgtgacgaggtgaggttcgccatgcgctgggagcgttgacggaagccgttgaccaccacgaatcccagcgaggagaccatgaacatgccaccggtgagcatgccggtcaggccggaattggtcatgagcatcatcaccatggcgctggcggtacccagcaacggtaccagcgaggtcagcagcgtattgacgccgtcgctgggctcaagttcaggcggctgctggagcacgacccgcccttttggagccttaggcccttcaagcctgttctgttgggtttcggaagtcatgaacgccgccccctgcttttcgccatgatgatgctacagcccatatcgccgagtgagatacgcgcacctgattgaatggcatgtcgttgctgagcaacgagatcgatttcctcgccgtcttcattgacgacgcgggtgccattagtgctgttaaggtcggtaatccacatatgtccggcggtgatttccaaacgcacgtgattacgcgataccgtgccggtgcgatcgggaacagccaacaccatatcaccgttctgttgcggtgatgggttacgcccgagcaccacattggaaggaatgaccaacggctcgcgcgagccgtcttcgaagtaaatggtgatttgcttgggtggcacgggcggcactgtgccggggcgcgcaggcaaggcattgccaaccggattggcagccggggtgggcaacgcgacatgcttcgccctcttcgtggaaggctgcgacacgggaagcggcatgggtttcgccgcagatactgagggaacggagggcacggaaacggcagaagccctcggtgcggcgggaaccgcacgaacgttggggactggggaaacagccggcaccgatgacatcgacggcactgcaagtggtgccgcgggcgtctttgggatcactggagcgggtaccggtgccgaagcagatgcggatactacagatgctaaggccccggaggtagtcgactcgtgcatcgtggaggaggaaatcgtatggaaccgaagctcctgtgatggcatcgcagtcgtgacttgcttgtggatatccacctcggcgagtctggcgaccttatccgcccatccctgcttaagttcagatcgggagaacaacggcgaacatatcataatcaacaatccgatgacgaataccatcgaagagaccgtaagcaccagatatttgacgaaggctctactgagtcccgctggcagtattccattacggtggtcgttctggcattcaacacgcactgtacgcacaccaagtgctactttgcccggggtttcgccgcgcacggcctcccatacggcaagcacaagaaccatttccacggctatcatcacgcataccaccagattgtgagacagcaccatggccactacggtgcccagcgccacgcagcatacgtcgatcagtgaagcaacgcattgtttgccggccgaggccgcacgatatccggtaatggtacgttccttacgcgaaacgactgatgttgctgcggccgctaccatgacatactcctgagaaactcaagtgcgccacctgcgaggaacgaggctgccggtatcagcatcatggagatgaagcacaacgcatcgccgattcgcgatagcgccagagaatggaacccattgtgctgcaccaccatgctgaatcccaacaccagtcccaacgcggcgaacgtgaccatacaaatcaaggggatcattgcctccccttcgggaattgcctgagtggcgtgcccaacccagagcaggggaatcgcaataccggccgcgcgcatcacatatcgttcgaatggtcgcccggattgacgcggcttcagttcgaagaacagcatcagcagcatactcagcaccagaaagccgatacggtcatacaggctgtggtagtcggtccactgtgccaatgcggcatatcccaatacactcagcaccacgcatagcgtgaaccccgtggagtattgtgccaggaacgaatccatatcctgccgaacatccttgcgggtcagcactcgcgcttcctcgggaatgcttccgcgcaccgtccatcgccgggtcatgtaggtccgccattccaccagataacgatcgggcacatgcaccacgatgttcggcatcatctggataccgcagacgcttgcggcaaccaccatgccggcaagcaactgcactgacagatcaaacagtacggttgccgcgctggccaaggccaatggcaatgccacgaacgacaccgcgctcaccacaccacgcaccattggctcgcgcacgcatacggacatcaacgccatatccgccaccgcgatgcctgatgcgcagaacacggccacggttgccggattacccgactcaagcaatgtggagacggtagcgcccgcgcatatggaaaaacatgctccggctactaccaaccacaccgccatcacacggttatgccatacgatttggcggcggcaacggctattacataccaatgccgccacaatgaacacggcaacgagaacgaacgtcacccaccgagacgagcctgccatgcgcatggcaggagtcagacgcatgaacagcaacgaggtcatcgccgcaaacagtacggcgacaatcaacgccaccctgttgaggtcgcgtcgagttaccccctcgtgctcgctgtgcatatgtcgttccttctgccgcctcttctctcaagacgccattatatgggtttgcggcccggtgtgtgctcttccgtctaattacggccggcttgtgcctcgaaagcatgcagcttgcgcataccggcatcgagttcgctacgacctttggccgcctcgttgtcttcatcgtcggtgtccgtaacatagtcgcgcacatataccatgctagcttcgaggtagccacgcacttcacgggcctcgggcgatttgtcgatgccggcgtagatgtcgtcttcgcaggtcttgcccatatcgatgcgctgttgcagcacctgccaggcacggccgtactcacctttgcgccgcttctcctcgatgtccttgcttttttcggcgatggtagcgtcgacctttgccttctccttttcgaatcgggcacgttgctctttgatctggttggataaatcgtccatctgcttcatgaacgcttcaaattccggggatgccatggttgctccttttgctgttcttccgggtatgcgtatacgtccgaatagggattaacggccgccgaacgtaccgccgcctgaacctccgctggagcttcccccaactgcaacaactgaaccacccgtggaaccggatccactgccaaaggtcatcttcacgccttcggagacgttcaccaactgctgcatggtgccaatgcagttcgcgaatccgctaaatgcggtgtacaggttgttcaggcagttgacgatatccataccccactggatggcctgtgtgacttcggcggcagccgtcactgcgaccagcaccggacccgcaccggggatgatcagttcgccggcgataagcttcagcaaggatatgatttcgtcgatggtgtcgagaataaggtcgaatgcagcctctgcgttctgcgcgagcgcattcaatgcctgcgacatttcggtgcagggctggcaaccttgacctgccacctcacctacggcattgttgcgttcaacaaatttatcggcggaggcaccagaccatgacgtctcattcacattgctggacatatcttggatggctccttgtacgccggaaagcgaagccgacaatgcatcccacttggcggcagtgtcttggagctcgtcccagtcaccgaagaatggcttcttcacccactcatcaacaatgctcacgccaaagagatacttagagacgaagtccacaacggtcacggccatgcgcacacgggatattcctatgctgattttgccgcttaactcatgcgctgcttttcttaccgcattgttctttatgtctttagcaagctgatcggaggccgattggacactggcagatactcgtcctaaaggaaaagcatcaagatgcagcatattatcggcagcatccctcttataatcgatatgcttcaatatctctcttgggactgcaccggtattcgacagaccaactttctgcccaagcacgtcgataagttttccagcctgcttggtgtcggcgaactcacctacatgctggtaaaaccgtaaatcacgtttgatgtcgccgaggtcatccggcacatcgacagtaatgggaccgaactgaagatcgttgttgtagtcatcatcgttgctgtcagccattatgcgatgctccttacgttaccggtgttgatttcagtttgctcgggcaatgtcatgacatccctgtcggcgtagagcgcctgcagttcttccaccgagcgtccaagagggtcattgcgggagatttccgcccagacgctcgcctcggcctcctgctgcatcttctcgtaagcggccgccgagtctccgatgcgtacggaggcatcataatcgccgtcgttgtcgaagtcgatggcggcgtactgggaatcgccatcttcgaatacgctcacgcgggaatcatctccactgtccggagtgagggtgatgtcgtcacgaccgtcattgtcggcgtcaaccgtaaacgagttgcccttattcgcagtgttgttgtcgctacccgggggcaacggcacggtggacgagtcctgcttggacagggtgaccgatccatcgtcgtttatagaagcatgcgtaccgccctcggtgaggttcacggaatagtcgtcggtcgcatcgccatcggtgtccagaccaacggtattcgtggtgtccggtcgggtgactccaggaacatctggctgatgagttccagttccgggattggtgtttcccgttccgggagtagacgttccaggattccatggagttactggcacagtggtgttctgatcatcaccggaagcgtccacagaaccagtattctgccccgcattcacatcttgatcgtgacctggctgcgctgctgatggggtctgcggcgtcgccgacgattgaggagcctgttgcaccggctggtactggccggaatccgtgccggagccagctccaccgcccgagccagagccaccgccagaaccgcccgaaccggcaccgcctccgaaaccaccgcccccgccaccggtgcctccgggcattccaggatcaacagatgactcattgttgttcttgttctggttgtctcgaatttcttctagcagctggatgattttgttgagcagttccttattcgactgttccgtggctttggtgtctttggcggtgccttctactgcgctggaaatcgaattcagcatcgattcgatattgcccaaatagctgacggtggaatctttggcaatgccatagaacggcttaacaaaactcagcagaattccgaaattcggacttcctgaactgacaaattggcttttcgcgctggcgaattgagaggccgcctgattgaaggaatcagataccgtgcccaaatcatcagggtctacctgcataagcgatgcagccataacgcatcattgcctttccccctagttccttgtactcttcacaattggttaccccattgtgttctccattgtgccatatgtacagcgttcgtcaatgtttcctacagattcaatcggcgattcctaactgaattctggggaggcatgccatcataggcgtgttcgccgtaggtcaagccacctgaatacagccacatcccgtaatgcgcgccacgcggatcggacgacaaaggaaaacgaggatcacactgatccggccacctcaccgga

SEQ ID NO: 2756 - DNA, 6047 bp, Unknown
  R36_18m  MAG No. k141_14101
aaaacacaacatcggctgaaggccgattccgcttcctaccgcacaacggccataatcgctccggcctgttgcagctccataaccttggccgcggcctccggcggcattgcgaacgacaccagtcggtcgttgcttcccaatgcgccagtcgtatccggtttgtcgacattcatcaccgtggcgttctcggccagcgtgcaatcggcaccttcgcaaccgacggcggaaaccagtctcacctgatcgccggccaatacatcgtcgacgctactggccaagcggacttcaatcaccgtagtgccggtcggtgctacgggcgcatctctggccatatgcgtggaaatgggatcggctgcttcgatatcgatttgcgccaccttgcccaccacatcctcaatattgcacgcccaagatgggcctatcgcagataccggcatatcagccaactgaacgtcggcggccagaataatgtcaccccgtcgaatcgagcgagcggccaccaccatcggctcggtctccaccacggccaatacggcttcaagcccaaacaacactgcgagtcccacgcacaacgcagcagtgagtcggcgcaaggcatccgccatgcgccgtcgccgcaatgagccgcgcgcaggcggcttaataaacgaaaaggtcaccatgcaaccatggtgacctgaagtttttcgcaagcgcaagctgaatcgacctatgtggttctagcttgccaagttatccacaacgcttcaaacccgtgcaacagacagtgcccgtagtgccaatatccgcggcataccgccgtcgacaccgtcgtttacagaggaaaaacggggagccgaccttacttgccggatttgtcggtgcggtagaatccgtgacccttgaactcaatcggcacggcggaatacaccttgcgcacctgctcctgcgagcacttggggcacacggtaatcgggtcgtcattgaacgactgctgttcggtgaagtcatagccgcagttcttgcaacggtaatgataggtaggcaacggattcctccaacaaagtcatatttctcgcgcatggcgtgcaacaccatgccgtgcaaccgttcatatcctagtcgccgccctgacacattggcgttacggtcttactagccagcctgcttttgccactctggttccatcggccagtgtgcgtggctggttggtcagtctggcttgcgccgagtatcttggccggccggtcaactcagccggcccgattcgccaagccgccggtatccccccggcgtcagcactccgtcggccggcacatcatgtggttcggccggcaaatcggtgtccaacacctcccacggccagcacaccgcaatcagggggcacgcgggcttgcgtcgagccaaggcccggtcataccagccggctccacgccccagacgattgccttgcgggtccactgccaaagccggggcgatgaccagatcggccttctccaacgcttcgggcggtagaactgcgccagttggctcatcgggtctgtgatggacggtgctgggagagctgcagctaccggcattgttcgcgccacccactgcatccatcgagcgcaaggattccaatgaatccagcacactccagccaatttccaacccagatcccaatcgtggcaccaacacgtggcagccatgagccaacagccatcgcaacagtggccgggtttcgatttccgaacccatcgacacatatgccgccactgtggaaccatcctgaatcatgtgtgccgggaaccgtcgcaccagcaattcaccggccgctccacattcttccgctggaatgcgcttgcgccgagacagtatatggtggcgcagcgtcgctttatccatcttttctgttttctccgtgccgctggggtcgctgccgatattcatgccattgtccgcttcgctcataccgcacaatctagtgtttccaccgtaaaacgaaagtggccgaggcgaaggcgcaagcccttcatatggctacaataaaggccgtgtcagttttccagtcgattaaagaggcgttcaagctggaccaccagatccgtccgccgcgcctcacccatcccggtttcccgataatcctgcgccccctgaccatggacgatgaggacggctggaacgaagtgcgctggcgcaacaacgactggctggcgccttgggaatccggcgacccgatgcatggcggctccatcaccttcaatcaatgggtgcagcgacagcgccgtaatgagcagcatggcgtcggcgtgattttcgccatcgaataccagatgcgtatcgtcggccagatttcgttgggagccatcgcgtatggtgccatgcgcaccggtgtggtcggatattgggttgaccaacggtacgccggccacggatttgcgccgatggcactggccatgcttgccgattgggcactcggagacccattcgggcccgcgttgcatcggctggaaatcgccattcttccggataacgcgcgctctttggctgtagtgcgtaaggtcggagcccatcatgagggactgcgcgagcggtatatgtatgtcaatggccagtggcgcgaccacgtaacatttgcgctgttggctgaagatatggggcaagggttctctgccagactcgccgccaccggttccagataagcgtcgaccggaagaattccgctccgacacgcccggacggaaagccccagttcgtcggtacgtctcctatccttgactctatgggttatgagtcactgagcactgtcgtcgtgctggtgattgtggcgattattatcgttgtatggctgcccgtacgtacggccaacggcatgaaacgtgtggacgagcaccggcaggatcgttattcgccttccctgcatatcgttgatgcagagaacggcagacgattcggagacatcaagccgcataaggcgaaaggggcagcaatgccagcatcaacaccgtcagcgaggctgacacctgagcacatcgcccatgtgcgggaactgcgccgcgcggccatccgccgccggcagattctcgccgtatgcctgcttgccataaccgtgttggtgtttgccgtatcgttccccctgcatttcagcccgctgcttgctcttattccgttcgtgctgttactgctggtgctggtgctgggagccaatgcctcacgccaggcccggcaatgggagcgcaaggtggtccgctacgagcggactcatagcggtacgggctggtccaagaaaccgtctgccgagtccaaggacagcaagcgtgtgaacaaggccgaaccggttgcggccgtaactgcgcctgccaaggagctttccgagcatgttgaggatgctgccaccgaggtcatggaacagcggcagattcgccgcgcgttacgcgatgccgagattgagcaggccaaggccaaggcgttgcgtcagtccgccgccgcatatcaggccgcggcggagcacgccaaacagtctgagaagtctgatactgcacagtccgccgccgataagcctgccgccgaaccgtctgctatggtcgatgagtccgctgaccgtaagtccgctgccgaaaccagtgaatcttccgccgcgcccgatgcctccgctcgcacggataagtcgactaagtcggataagtccgtcgcccctcgagttgaaccatcgcttacggtgcgtgatgagcgtgatgagcgcgacgatgccgctgccgacgctacgtcggaactggccagcgtacgccctgcccgagcactggatgtcttcgatatggccacctcgcaggatctcatctccttcactttgggcggggaacataacgccgacaacgctccggaaagcttggagatcaagtcgacccgtcaggtgtccaaggcggaacctgtcgaacccgcagtggcggaaaagttgattgacgaggcccgagccgtcaaggccgcggacgatgccaaggccgccgatgcggacaaggctgtcagtgccggaaacgctgtagacactgagtcggagcagcgcgatgatgccgatacgaacgccgctacggacgccgatgacgaggctgcaaacgccgcccagcgagccgcattccacgaatccgaggagcgtgccgacgtcgaagcgccagcggcgaccaccgattcgttgggcgcaggcctggactccattcttgcccgccgcggcaactgagcgttgcgattcgccgattttctctcacagcgttagcactcgagttggcagagtgctaataatcgcgctacgatgtgtcctagcgcaaagggacaacgcaagtgatcgtcagcctcttgaggcgttctggcgcggcattatcgaactacaagtagatacgaggtgacccacagtgtcgattaagctcacaccgttggaagacaagatcatcgtcaagcaggccgaggcccagacccagaccgcttccggtctgtatattccggacaacgccaaggagaagccgcagcagggtgaagtcctggccgttggcccgggccgtcgtgacgacaagggcgagcgcatcccgatggatgtcaaggtcggcgacaaggtgttgtactccaagtacggcggcaccgaagtccactacgagggtgaggactacctcatcgtcggcgcgcgcgacattctcgccatcctcggctgattagtcgcctagcgaacttcatcaaccccgactgttcccacgaacagtcggggttttctcttgtcaggcggaaaggggctcccctcagagaggggagccgaaaaccgctcccgccaaacgcccagccatgcctgctatgcataaaggtgcatgcgcgcaacgtagttgagttcggcgttgcaccgcatctacactgggtaacggattggggtccctatggaagaggctcagtcggcgacttggccgagcggcttaagacattttgcacaagacgacagtagatcgacggtatgttgttttttccgtgtcgcaggttcgtggtgtcgtcgcgctgtgccaatggttgtctctctaccgacgctgagtgccgtggcatgaggccagcgtcggcagtgggccacgaaatggcgatgtgccgatgctgagccgcgttggcgtcgttatagggccagtttttggaccattgccgacggcaaatcggcgttttgtgtcggcgacggtccaaaaactggcggtctgccgacgataagtgccgtcatcgtcggcagaccgccaggtattgtccctgtgccgacgtaagaagccctgccatcgtcgtcaccgagccatcttgtgactcactgacggcggcagcagggcggaagaggccgaaatcatgcgcgcggtgcggtctcacacctcgaatccggcctccaccagcgcgtgatcgatgtcgcgcatcaaatcgtccgtatcctccagacctacggccagacggaagaagccgcggtggaactcaggcgggtacaggtactggcgctcgtcatcctcaccgaggaacacgatcatcgattagtcatggccgagcgagagggcagacgtaatcacattgagcttggaaacgaatcggttgtgcccgtcgtggtcggtgtcgaggccgaacgacagcacgccgccgaacccggagtccgggcgggccagctggctggccgccacctcgtggtgcgggtgcgattccagaccggggtacgccacgaaacgcaccacatccagcgattcgaggtgcttggcaatcgccaaggccgaggcgtcgtagggcagcgcgtaggtgttcgccagcgtgatggggcgacggatcgcgccggtttcggcgtcgaccccgttaccgaggtgaatggccagcgtgccgaatccgagcggctggtcgtcgaatgattgtccgtgatgtacaagatcagaagccatgcgcccagcatgccagcatgcgccgtgccgcgcaaacaggcgacatcgctcgaaaaccgcgccattgcaaggttctagagcaccatataagaaaaaatgattgggtgaagtgcggggtgcagccttggtcggggctgtttgcagggccgaagcgggccctgaaaa

SEQ ID NO: 2757 - DNA, 5250 bp, Unknown
  R36_18m  MAG No. k141_14273
ccccttgcccataccccctatcaaggcatcgctgcaccttccgcaccattccagccgggtgccgttccggcacccatgtctacggcacctgcggctcccgcagcgcctacggcatcgcaggccgcgccattggacccggaagcaacccggcagctccatatcaccattgcatacaaggcaagaaccatcgaactctccgttggccccacaccgattgtggccgatctgctacccgacatagcccgccgactgggcgtgcttgacccggcaatagtctatggcggttaccgtctgctcaacagcgagggcgagaccctctccccttcccaaacgcttgacgaacaacacgtggaagaaggcagcacccttactctcgaacccggggcgttgaacgaaacggacatcatgtatgacgatgtcgttgaagcggtgggcgcaagcgtgcagcgtgtgtacaaaccatggaccaacgaccacaccacgctgacctcccttatcatcagcgccggaatgcttgccatcagcgccggcttgctcgcggtattcccaccatccattgtcaatgcggcattgggattcggcttcgcattggtgctgattgcactctgctcggtattaagcggcaagaatatgattccgcaggcattggccatgggactcatctctagcgtgttcgccgcgatcggcggctaccagctcatctccacgctgttcccggggcatcctttccatgggttgcctctgctgggagctgcggcagggcttatcgtcgatggcggactgatggccgctgccgcatcacgaaccaggccgtactctctcatccccatcgtcatcggcgtgattgcggtgatacccagcggattggcattcatgttccccatcaatgagccccagatatggattttcaccgccacagccgttgcactcgccgccaacgcactgccctctatgtgcctatcgctggcacgtatcagcgtgaacagcccacacagcgaatctgatatcttcaaactgcctgaagacattgattatgaagacatcaaacagcggtatattttcggttccaccatgttgttcatcgggcgtatcgccgtcgcctccctgctgctcattgccacgccgctgctggtttcgctgagcacaccgttgggagcggccatctgcctgttggcattcatgggcatgctgctcgattcccgccaaatctatacgcttagggagatgatcgtcaccgtgggagccgccggaatcggcattatcgccaccggcctgctcgccagccaggctcaccccgaactgaacataccgcttattctcatcatgctggcgagcgctttggcgaccatcattctcacgaacgttacacgtcagcagtcattgtttgccaccagaatggcggacgccgccgagatgctgtgcctcgtgctgctgccgccacttgcctatctcgccatcaccatgtgagcgtggatggttgccagataaatccgatggggaatcgtcacaagaacttttcagggaaacggaaaacataggtcatggctgataaaaaggatctttccgaagcgcaaagctactcacgtaggagactggtcactgcatttaccagcggcattccttccggcgtggagctcacgccgaagaagaaccagacgccggtgattgtgggactgggattggtggtcatcaccatactcatcagcgtgttctacggcatcatgagcccgtctctgccctcggattggaaaaacaacaagctcatcgtggccaagaattccgcagcacgatatgtcagtgtcaacggcacgcttcacccggttatcaatgccatcagtgcgcgactgctcatcccctcctcggatttcgacgtattgaccgtggacgacgaccagttggcgggaattcccatcggttcgactcttggcattctgggagcccccgattcactccctgcacaaaaccagctgatatccggttcgctgaccagctgcatggacaatatgaagctcagcaacaccattagcaataccgccttagctactggtgccgatagtcgtacggccatcgtcgccactgtggacaacaccagttaccttgtttccggttccaagcgttacgaactgccatcggaatcttcaattcgagacagtttcctgcgtatgttcggagtaccacagaccagaaccatcaaggcaaccgcacagtggatcaacctgttcgaagccggaagcccaatcaaacccatcactgttcccggagcgggctcgttcgtcaacgttaatggcaccgaagtggcggtcggcggcatcgtcacccagcagggcgagacgaagtcaacaaaataccttgtgcaggagggcggcaagatcaccgcactagatgacttctcctacaacctgtacatcatcggcaaaccagaatccatcgcacgccccacagcgctgtctgcccacgacttccaaagcctagccaacgccacatcatcagttattccgacgaattggcccaccagtgcgttgcagcaggtgagcggcacgccgaccatatgcgccacattccccctgtctgcatcgggccacgaacgacttacttcacgcgtgcggcttgcggtcagatcctccgccgagtcaggggcggatactgcatcgggagtcgatgccagcgaaaaaagcactgtttccaccacgattactggtggcaccggggcgctgttgcgttcggcgatcggagataccgacaagggaacggtattcgccatcgattccaccggtaccgcatatccgattccccacgcaacacaagagatactgaaccgtttaggctacaccggtcaggatgttcgttccgtgccgcgttcatgggtagacatcttcccctcaggagtgcagctcaccaccgaagccgcaggcaatgcgcccaacccgcaagctgtgctcgaacagaccgggaagaactgattatgaatcgtatgccgtttcccgctatgccgcgtctgcgttcagtagcgcgcgccaccgtagccaaaactctgagcgccatgcttgcagttggtctggccacaagtatggcgggcatatgcgcggcggcgccacaagccgcatacgccgactcatctgactcttctgactcatcatcccaaacctcatcggggcaagcacaatgccaggcaggcatcgaaaattacgtcacacagcagccctggaccaataatctattcgagctcgatactctgcatcagcgtgccaccgggcaaaacgtgattgtcgccgtcatcgattccggcgtggacactgataatccgcatctgaacggtgccgtgataccgggcaccagcatggttaagggcgacccatccaacggaaccatcgatacctacaatcacggcaccgcggttgccggcatcatcgccgcgcgtccagtagacggttcatccgttcagggtattgcccctggtgccaccatcatgccgattcgcgtgttcgataccattcgggaggagaacggcagacaagtgggtgccccctccatggaaacaatcggggcggcggtcacttacgcggtcgatcacggggcgaaaatcatcaacatctccctgagcgacacccgcaatattcccgagatgcagcaggcagtgtcctatgccgaaacgcacggcagcctcatcatcgccagcgcaggcaatcgtcttacctcggccagcaccaaagacggcgaacgatacccagccgcctatcctgaagtcatcggcgtgacggcgttgaacactgacctacagcccaccaacgactccgtacatggagatcaagtcgatatcgcggctcctggtatgcagacggccggaacgattccgggaggagtggactgtgtgttcgccaccgatgcagcctcctcaagcttcgccacggcatacgtgagcggagaggccgcgctggtggcctcgatgtatcctaatgagtcgccggcacaatggcggcaacgtattcttgccaccgccaaccgtgccgacccagacaatcgcgaccagctgaccggctggggcatcatggaccctatgaacgctgtatctgtcaccctgtcaggcaatttgcgcggcccgcagttggatggcttatccaagcccttccaatccagctcctaccaagacaccatcgtgttgcaccccactcaagaccgcaatgcccggaccaaacagatcgtggccattgctgcaatctgcgtactgtgcttgtggagcatcgcatggattgttggtttgcgtgggaaaaggcaacggacttcggtataacgcgaaaactgatggattttgtcggttgactgatggctcatcgtcggttttccgacaacaggccatcagccaaccgacaaaatccatcagtcaaacgaattggcatctcccgacaccgacttattcggtttatatgaattacatgaaacgttggggtgcaccacgcatcgcgccggaaaccacttgctgcaccagcatgcgtgggtagatgttcaccgtccgcattgcggtaccggctgcggcgaaccgcacctgaagctggttgacgccgccatcctcgctgatgtacacgtatggggtctccccggtctcggcgcggacagcacacgtactgtacgcgccacgcacggattgagccggtcggcgaacttcagaacgcgccgttcccgcacgcccggagcaacggccgaaggctcattggccggtaatgattcgttcagcgcctgcgaccatcggccgcgcgtggccacgctggccacaggcgagacgaactgcaccgcgtccacggccacatggcgcaacgacagtatgggccccgagcacagcctgctcacatacgccgggaccccggtcttgttgaagatatcgagaatgagctgcacattaccgctcggcgcgaccgccatatccacccaccgcaccgtggacatggggccgtccgacattggcgttttctcaaacacggtaggcgtgccggtgccggccgccttgatagggaacagccaccgcccttgcaccatgaattcctttttcgagcatcgcggttcctttcttcaagttaagtgaaacggtcttacggattcagtcggcgattcctaaccgaattctggggaggcatgccatcataggcgtgttcgccgtaggtcaagccacctgaatacagccacatcccgtaatgcgcgccacgcggatcggacgacaaaggaaaacgaggatcacactgatccggccacctcaccgga

SEQ ID NO: 2758 - DNA, 7313 bp, Unknown
  R36_18m  MAG No. k141_14290
cggatcggcaagtggcgtggccgaccagaggccgttaccgaatacgccgtcagacgatgagacctgcgcatacggcagatagtgctcaatgccagcctcgttgagttttttgacgaaatcctcggtggtctcctgcaaagcgagcacttcgacgcgctgatcgcggactagttcgacgatggcttgtgggtcggcctgccccttgtatacattgaaggtcatgacgcgcgcgtaggcatcgctggtgttgggggaggccgcagccacggcgttctgcgcggcttgggggagcgggtcggtcgagtagaagaacggatattgccaatagccattgcatgcgattgcggcgatggcgattagtgcggcaaggatacgccgcgacacgatggccaacagtagggcaatcaggccaagcaacgtgaaccagggcgttgccgataccacaatcggcacaaatggcagttcctgtaaatcggcaggcagcgcgcgggcggcagtgccggcaagggcaagaagcgcgaacatcgtggcgagaaaaccaagcagacgatgccgtttgtgtggcttcacggcagacttggatactgggcgtgccgtggctttggcagagcgtggcttggcagcggcgcgagctcgtacgcttgcacctgtggtagtacttcgtgcctttgccatgctgccctttcctccggcttgtttactgttaccttgcttttcgtgcgatttgccactgtaccgtgtgcggcttgtctttcggtgtcttttcgccgtgcgcaagagcagttcgcaccaaaccagcacgaaaaccggccatgccttggtggcgggttctgccaggtagcttacacagactgccatgcgtcttatgtaggctgccacgcgaacatgatgcgactgggcgtgcggccgtgtacaatgaaacgtcgttgcccgagtagctcagtggatagagcaccgctctcctaaagcgggtgtcgtcggttcgaatccgatctcgggcacttggcttcggaaacatgacggtatctcagcctctattcatcggtgatgagccataggcattaggcatgtgtaaacgtataggttccaccatccatcatcccgtcatgtgaaactatgcaaagacatgtggggcttcacggttatcgtgagggtccatggctatcgaatacacggaagagaagcggtttactgtcgaacaggttgaggcgctgttcaagtcggttggttgggaatcggcgcagtggcccgaacggttgttcaaggcattgcagcattcggatacggtaatcagcgcatgggatggcggctatttggtcggcttggttcgcgtgctcgacgatacgggagggggcgaaagtggcggagtgtgctgatcgggggcaacgtacgtagtcattgacggttatcccgtagtaatgttcacgatacgaccccttgtccatacagtgaaaataacggctggcgtccgacgttgctgcgctatgactagagaccatgagtgaagacaaacagtatgacttctatgtggccggtccgttctttgatcctgaacaaacgtcaagtatggaacgtttggaaaagatattggaagaccatggcaaggtactgttcaagccgcggtttgtcagccagatcgaagaagtaggccctgaaggatgctttgcggacgatatccatggcattaatgctgctaaagccgtggtcgccaatcttatggacgaggacccgggcacgatgttcgaaatcggatatgcgcatgcgctgggaatcccggtgtacggctatttcgagaaccttacgccaatggatcgtgtcaatctgatgattgcgcaagcggtcgaactggtgttcgtcggtcctgatgatgtggcgaaatacttggaaaccggcgaacatacggaagtcgattacattcagttctaagcagctctaacaggttctcagcaaacaggggtggcggcgttctcgtacatagtcatgtacgggaacgccgcagtggtatagggatattccaacaagcggcataatggagtcgtgggaaaaccagtcggatacaagtgaagtgtctgaatttcgtaaggagtgccgttatgagtaaccacaatcccatgaatattgccaccgactttgccaaggccacgggaggaaccgctcgcaaagttgttgctttgaccgataaaggtccgttgaatggctttaagaaattcctgtcgcgcggatcgatgattgatatggcggtaggtgtggtgatgggctctgccgttaccgctgtggtcaattccatcgtcgacaatctcatcagtccattaatcggcatgattggcggcgtaccggatctttccggactgctgaccatcacgttcaacaactcgactgtttcatttggtgcgattcttaacgcgctgattagcttcctgcttgttggcgtggcggtgtatttctgtgtgattttgccgattaataagcttcgtgatctcactgctgcccaggatgaggctgacgctgaagaacaggggcctagcgttgaagagcagactctcgccacgctgcaggagattcgcgacgagctgaaaaaggccaatgactccgccgagtaatctgctgaatgtacggtgcgacagatttacctggtttgcccgaaataacggattgccggggccatttggtctggacaatccgttgtttcgcgcgtgttttgtagcatccgtggagttacatggggagtatgactgaaaacatcgctgataaggccataaacgatactcgtatcgtcaagcagttcaccaatcccgtcaaggagccgattgacagcgacatcaacctgttcgatttgctcgatgagcgagccaagcgcgatcccgatggcgccatgatcgaatataaaactgaggatggcacctggcagccgtacagcgcccaggtcttccgcgacatggtcatcgatctggccaaaggcctgattggtctgggcgtcaacaagggcgactccgtggccatcgtgtctcgcacgcgttgggagtggaccgctctggatatggcgatcatgtccatcggcgcactcaccgtgccggtatatgagaccaactccgccagccaggtcagctggattttcaacgattccaaggtcacgctcgccatcgccgaggatgacggtcagcgcgacaagattgaatccgtgcgcagcgaggtgcccaccctgcgcaacgtgttcgtcatcgaagcaggcggcctgaacgccatcaagacctatggcgaaagcgtcaccgatgccgaattctgggaatacaagagcgcctcccacggcgacgaccgcgccaccatcgtttacacgtccggctccaccggcaccccgaaaggcgtggagctcacccaccgcaacttcgcgttcctggtgcgctccggcctgcagtacatgcctcgtgccggcgcatggcccaaccgccgtctgctgctgttcctgcccctgagccatgtgttcgcccgattcctggaattcttcagttttggcggcaccatttctctggccctgagctccaatatgaagaccatggtcaaggacttcgagaccttcggccccacgctgctgcttgccgtgccgcgtgtgtacgaaaaggtctacaacgccgcttcccagcgtgccggcagcggttttgcgggcaagatgttcatgcgcgccgccgaaaacgcgcgtgaatggtccaaggccgagcagaagggcgagaagctgccgcttcccggtcgtattgctcacgctttctacgagcaggtggtgtacaagaagattcgtaccatctttggcccgaacgccgactttgccgtcaccggtggagccccgatggattccgagctctcccacttcttcaacggcatcggcatgccggtgctggaaggctacggcatgacggaaacctgtggtccggtgtgcgtgagcttgccggaagacaatcgcatcggcaccatcggcatgccgatgtgcggcatcaccgccggcatcgccgaggatggcgagctggtgatcaagggaccgctggtgtgcaaggggtaccacaacaaccctgaggtcaccacccagcagatcaccgatggctggctgcacaccggtgatttgggcgatatctccgaagacggattcatttccatcactggccgtaagaaggacctcatcatcaccgccggcggcaagaacgtgtcgccgggtctgcttgaggcttccgtgatgacctcgcccgtggtcaaccagtgcttggttattggcgataagaagccgttcgtggccgctctggtcacgctggatctggcggatgccaacaactggttggaatcccaaggcgccaaaccggaacccgatctggcctcgctggccaagaacgccatcgttcatgccgaggtagagcgtgcggtgaacgccgccaacgagggcgtttcccgcgccgagtcgattcgtaagttcgagattctgccagacgaattcaccgaggccaacggcatgctgaccccgagcctgaagacccgtcgcgcgcaaatcgttgagcactatcgcgagctcattgacgacgtgatctacgtgccgttgaagaagtagctatcaactccctctgatccaaaaaataagctctctctgacgagggagctgtcagccgcaggctgactgggagagaccgcggctagcccgcgaaacaacaaggccgggtgcgacttgcacccggcctcagcttattcagtccaaaatcgccgaaacataatcggcggcggcctgatccagctccgcatcgccgatggtggcggtgccctgcaccaggaacggctcagcatagttcatgccgatcttgtacgccacgacctcaaacgggctcagcagctcctccatggtgcggctgtactcgccatccttgcggtacttggcggcgtcggaaccagtggtgaccaccagcttgagctccttgcccttgagtgcgtggcctccaccgtaggcccagcctgcggtgatgacctcgtcttcccattccttgagcagcgcgggggaggagtaccagtagaacgggaactggaggattacgcggtcggcggcctccagtagctcgtgctccttgtcggcgttgacggagaagttcggatattcggcgtattcgtcgcgtacgatgatgtcgtcctcgccttgtgcggcgagttcggcaagcagacgggcgttcactcgcgagccgtccttcaggtgcggatggaatacaagaatcagcgttgacatgggatttcccttctataactgctaccaatgtggcctaatcaccactatcgtatgccgggaagcagaactcagtccagtccggattcaggtgtgagccgcgggatgccgcgccgggaggcaactcagtcgaggttggactgcgtgcctgcggtggcttcgttggcggcttgctcggcttgtgcctggtcgagcttggctcgtacgtcgttgagcaggccctgggcgcgcttggccaaggcctcgccgatttcccattgacgcatcgactggtcaagattgaggccgccggtttccagtgcctggacagcctgaatcagcttgtcgcgcgcctcctcatatggcatctgggcgatgagctcgcgttccttgtccgtcagggacgaggcgggggtgttcttgtcggtgggtgtggtgttctcggtcatcttgttctccttatatatacggtatatatgcgtgaatgcatatggtgcattacgcggttgcggttgcggatgtggcggtggcggtaatgacgccctttttcagggtgacggtgatgccatccccggtactgacccgcgaagcgtcatccagcacatggccatcggaggactgcaccaccgcatagcctcgattcaatgtggattgcgggctgagtgcggtcagtgaggcatgggcgcgttcgacggtgagctgggcatcgtccacgatgcgtcgcaggccgatgtcaagccgctgcagggaatcgtcgatcagccgctgatgcggttcgagcatggtatgcggttgggtcaggcttggccggttcgcatatccctcgataagtcgaatctcgttctccacgcgcgaacggacccgcagtcgcatacggtcgatggcaccttcgatgagctgcgactgctcacgcacatccggcaccacgcgcttggccgcatcggtaggggtggaggcgcgcagatcggcgaccagatccagcaatgtccagtcatcctcatgcccgatggaggagattaatggtgtagtgcaggcatacgccgcacgaaccacacgctcatccgagaaaccgatgagatcctcaaacgagccgccgccacgggccacgatgatcacatccacgctcgggtcggcatcgagttgtgcaatggcctgaaccacctcggccgggcattgctcgccctgaacatgcacatggaccaccttgaaggttacggaaggccaacgaaggttcacattggtgatcacatcgccttccgcgcgtgcctgaggtgcgcaaatcaggccaatagtcttcggaaactccgggagaggcagtttgtgatcggcatcgaacaggccctcgcccttaagctgcttgcgcaattcgtcgatcatggccttgaggctgccaccggctccgaccttgagaatcgtgtccccgcgcaacgacagcgaagtgcgcttcatccacaggttcggtttgccatgaatcaccacgcggtcgccctgaacgaactggctggccgcggccgcgaacctgccgaagccattgacttccatggcgatatcctcgaagtcgtcgcgcagcgtgatgtaggccgagccggcgcgacgggtattgatctgcgtgatctggccggtgacccacgcggacggccatcgttccacggcaccgtagaacttctggctcagcacacttaccggccacggattttgcgcgctggtttcagcggcgcgtgcaggcagctgatcgatagggcgaggctcattcggcagattgatggcgccccgatcgggcgcgaaagtgccttgacccggctcaaagccagacgaggccagtgaagcggcggtcggtggacggccggtagatgagtagcccattgcagtagtcatgcactccactataagtgcgttggttgatgacggtaaaaatttaccgtcgcctgaaaacggtgtgatgatgaatgcaagaaccgtacgaagcgatgtatcagccgatgatggagatggtctggtgcatcagaagaaaggagtcattatggcgaagaaacgggtgctatgaagaggagtgagatatgcgttgcgctgacgattgagagtcgttagtgag

SEQ ID NO: 2759 - DNA, 4451 bp, Unknown
  R36_18m  MAG No. k141_14474
aaccccattattcgcgtctcgcatctgacctatcgctatccttcggccaaacgggcggttatcgatgacctgtcgttcaccatcgcgcgcggtgaaaccgtggcactgatgggcgtgaacggttcgggcaagtcgacgctggtgcgcatgctgtgcgcgctggccgcgccgaccgccggcagcatcgaggtggccggcgttccggtggcctcgaccggcaaacgcggtcgcaacgcgcgtccgaagccggcgaatcgcaggcaattggcgcaattgcgccggcatgtgggttacgtgatgcagcatccggagcatcagctgttcgctgacacgggagccgaggatgtggcgtacggcccgcgcaaccaggggctcgccgaggccgaggtggccgaccgtgtgcgcgaatcactggacctgctgcatatcgggcatcttgccgaccgctcccctttcgacctgtccggcggacagcagcgattggtggccatcgccggcgtgctggcctgcaatcctgacgtgctcatcatggacgagccgaccgcgagcctggacgtccaggccaaggagcgcatccatgagctgttgcgcacgctcaaatcgcgcggcgtgaccgtgctcatcatcacccatgaccgagcggaggccaagcatatcgccgatcgcgtggtacgtatgccgattgccggcgcggctggtgctgagagcatctcggcaaccgagactgccttccccgccgagtccgtctcccctgacaaacccgcgcactcggtgatccaccgacttgacccgcgcgtgaagatggtgggtttcctggccgccatgttcacgatgttcgcggtgaacacgcccctccagcttgcgctgggcatcgccatcaccctggccgttatcgcggcggcacgcctgaacccgttacgggtgctcgaatccattcatccgattctgatcctgctggggctgatgggcgtggtcaatctgtttgtggtacgcaccggcacgccggtggtggcgctgggcccgctgagcatcaccgatcagggcgtgaccatagccgtgctgtacgcctgccgtttcgcgttggtgatcatcttgggcgcggtgttcctcaccaccaccacgccgaccgccatgaccgacgccttcgccaccctgatcagcccgctcaaccggctcggtattcatgcccaagaaatcgcgctggtcatgagtctggcattgcgattcattccaacgctgaccgacgagacccgtgccatcgtcgatgcccaatccgcgcgtggcggttccatcgaaaccggttcgctggcccagcgcatcaaggcgatgagcgcgattatcgtgccgattttcgccggcacgttgcgtcacgcggacaacctgagcctcgcacttgacgcccgctgctacgaggagagcatccgccgcacccactggcgtgccctgaccatcgccgcgcaagatctcgtgttcgccgtcgccgtcatcgcctacatcgccgccatcatcgcgctgtagggcggcaaacagcacagacagcaccggttgctatgctggtgtggttatacgaaagatgtaaggaaattcccatggcattgaccaagaagcaaatcaagcagctgcgcgcgatggcaaactcgctgaagcccctgttctatgtgggcaagaacgatttgaccgagtcggccgtcaatcaggccgatgaaaccattgagaagcacgagctcatcaagtgcgccgtgcaggacggttctggcctgaccgccaaggaagccgccgccgagcttgccgagcagctgaacgccgaagtggtgcagtccatcggcaatcgtttcgtgctgttccgtcgctcccggcgcgacgatgtggagcatatccgcttggtgcgcgagtagcgttcgctctgctcgatcccgtagcttgatatgagtaatggcggttggaatcagtccgattccaaccgccattattcatattcgcccagcgagcaccgtcactgatccaagatggacccgacgattcccgcaacaatggtcagaaccaaggaccccagtaccgaccaccagaaaccgtgtacgaagacgcccacgccgaacagactgaccgccagccagctggcgagtcgcatgaacagccaattgataatcaaggtgaccagcccgagagacagaatcgcaaacggcagtgcgatcagatgcacaatcggcttgattgacgcattaatcagcgccatgaataaagcgaacgcggcgatgccgagaatcggaggctcccccaccggggtcatgccgggagtcaccgcgaccatgacggcggcggcgatagtcataatcaaccagctggtcaggaaacttttcatggcccaatcgtagcgcggcaggttttactattaggcaaaacgtgagatgatgttgtgcagaaacggtaagaaggtactgccgttcccgattgagaagggatagacccacatgactgataatcaacaacaaccgtacggttcggacagtgttccgcagccggcacaacctgcacagccggcacagccgtcgtacggccaagatgccgcacggcagccgcagggctatggcgccccacagcccaccgcatacgctcaacccgccgccggaagctacggccagcagcagccgcaatacggccagcccgccggcgcatacgctcagtctcagtacgctcagccgcagtatggccagccgcagtatggccagcccgcacagcccgcagcgggctacggccagcagcccggctatggacaggcctaccagcagccgaatgcctacgcacagccgcaatacaccgccgctccgtatgccgccgccccggtgtggcaatcatccaagtccaagttggctgccggcctgttgggcatcttcctcggcggacttggtgtgcacaacttctatctcggcaacactggcaaggccgtggcccagctgctgctgacgcttgtcggctggattctgctcggacttggcccaatcgcagccgccatctggggctttgttgaaggcatcatcattctgtgcagcaagcccggctcgccgtggcataaagacgccaacggctacgaactatcagactgagactgacctcgggccacgttcattgggcctctgatcaaccacgcctctgcaggtatcatctcgatgccgcagtcgtagcgggatgcgacacgccggccgtgtacatgagttcatgtacacccgatacaggcgaatcagtatcgcacgagattcaacagttcctgctgtttggcatagcgggaaacgttggtcagggcgatgcggatgatgtgttcggaagtcttttccaaatgattgccgccggccacatgcggggtgatcaggcaatgcggctcatcccacaacggactttccgccggcaacggctcaggctcagtgacgtccaatccggcaccgtggagccgtccattgtgcaaggcgtcggccaaggcctcgggatcgatggcgtcgccacgcccggcattgatcacgatggctgtggatttcagacgacccagacgatccgcattcagcagatgatgggtctgcggcgagcgcggcaccgccatcgccaccacgtccgccaatggcagcagtgcttccagccgctcgaagccatacatcttttcaatgcccttggccggcacgtccgcatgacggcgcacgccgaaggtacgcatacctacggattgggcaagctgagcgaaatgcgacccgatgtcgccgacgccgataatcagcgcgatgccaccttccgggctcaataccgggccttcatcctgccactgatgatcacgctgattggaggcataccggttgaggttcttcatcaatgcccacatggtggcgaacatgtgttccgacacgctttggccatacgcgccgctcgcattggtgaccatggtgccgcgaggcagcacacccgagcggatgtacgcatccacaccggcgctgaaggtctgcaaccattcaagacgggtgtattgagcggcctgcgagaccgggaagttgccgatgactgcggtagcttgggagcgaagctcctcgggaacagcggccgaccagaccatgtcgccgcggtgcgcttcgtcgcccacgaattcctgcggcacatcgcgggccgccttggcgaaagcgcgccgttctccttcgttgagtggcaggcagttgacaatcagcttatgcgtgttctcaatacccatggttcaccaaactaggcggcagggcagatattatcgcggtttcctcatgctgaaccaatgccgaactgctaccggaccaatgccgaatccgccccatcaaaccccaccaaaccaagggacagcccattgcgcatcgaccgtagcgtccgccccgaaccgtacactcacaggtggttttgtgattccatagcgtgcagccaaggcagtacgattgccggtttatccgcac

SEQ ID NO: 2760 - DNA, 5571 bp, Unknown
  R36_18m  MAG No. k141_14515
ccggagaactcgatggcgccggcctcgtgcacgttcggatggccggaggcgaccgcgaccacgcctgcatacgccggggtgatggtgtcgatgacgacctggttggtctgcgtgccgccgacgaggaaccacacatccgcgtccggctggccgcaggcctcgcggatcttggccttggcctgatcgctcagttcgtcggacccgtagcccgaatacagatggttgttggcttcagccacggcttcaagcactgcgggatgggcggcgcgggagtaatcgttctcaaaagacagcatgacggacctttggtccttatgttcggtgaattggatatgccctgagtgtacaacgcggtggttccctatttggcctataacccaggagcggggaattcagggagaaaaaacaaaacccttccgcgaacggaagggttttactggggtggccaacgcggctcgaacgcgcgaccttctgaaccacaatcagatgctctaccaactgagctatggccaccatagtgtcgtattcagcaagctgaattcgcacaacaggtgaatactatacacaactttgcggatgtgtgctcatcggtgtgtcgcgatggaatcaagcggttggtttcattcttggggccaggctgtgggctgtctcaaatggtgggatgtggacgagtgggtcttgtgtggcgattgatgaaaagtcagggcacacaacggcgtgatggtgcggctggggattgcagagatgattacgtgagcgttcacaatgtgagcattatgtttcatatcaaccgcgacccgcctagtttcatgcgatgttacctacaccgaacaagggaagagaaacaccatggaaaaggttaaagcctttgcagattggctgaccaagtggtttacggtcatcgtcatcgtctgggccgtcttcaactacttcgtgccggccgccagcttgtggggcaaggcgtacaccggctacatgctgggcatcgtgctgttcggcatgggcctgaccctgacgctggacgacttcaagcgcatcctgacccagccgctgatggtcatcgtcggcaccgtagctcacttcatcatcatgccgctcatcgccgtggccctgtgcgcgatcttccacctgtccggcccgctggccgtgggcgtgattctcgtcggctgctgcccgtccggcacctcctccaacgtgatgagctacctgtcccgtggtgacgtggccctcgatgtctccatcggcatcctctccaccctgtgcgccccgttcatgattccgctgctgatgcagctgctggcctcccagtatgtgagcgtgccggtcgaatccctgttcctcaatgccgtcaaggtggtgcttttcccgatcgccctcggcgtgatctgccacatggtcttcggcaagaagatcgagaaggtcaccgtggccctgccgatcgtgtctcaggtggccatcctgctgatcatcggcgtggtcgtcgccgccaacggtccgaagctgttcgtggccagctccctgatggccatcccggtggtcatcctgcataatctgtgcggctactcgctgggcttcggcttctcgaagctgatgtacaggatctacccgaagggcttccgctacgcgcagcagaaggccatcacgttcgaggtcggcatgcaggactccgccctgggcgccacgctggccctgacctccttcgcgtccaacccgctcgccgccgtgccgtccaccttcttctccgtgtggcacaacatctccggctccatcctgtccagctggtggcgcaaccatgacgaccggcacgagattcattgggattctgacaacggcgagaagggctccgccaagagcaccgtttccgtggcccacccgttcgacgccgacaaggccgccaaggtcgctgcctgaaatcctgagatggtgagaaaggccgggtaaggcacgactccagtcagtcggtcatccacttttcctaccccgcataacatagccgctcccgcttactcccgattgatgtatcgggcgtttcgcgagggcggttttgctataattagtaatgcagaaagcggcaaggtgatacggcaaagaggccgggtcgctagaggttcccatcggatatggaagagcacgaggatgtgctggaaacagataacacagaagcggcatgtggtgaaaagaaacataatgtaacctccttggcggtgcccccgtgtgacatagtctccgcgggggcacctgctgtgtggcgttcgcttttttgcgacgcattcccgggaatattgcgttgggagggcgtgtgtgcgtgtgttgtgcgacgcattcccgggattgttgcgccagaaggagaggaaaagtacagggcgcggattgtcccaagctagtgagtcgaggcccggcgcgtcgttgtccggcggaatcgtagtatagatattcgtgtgtgccagcagcacgccttatgtaacaggcgagcatgctgggatatccttcaaaccgctgatcgcacgtagtaatgcgccgacgggaggggcgaaggccatcgggccggtggactgggctatcttttccgattcgtcgggtgtcgccaacaggcggatgccaagcgagtgtgctgaaaagtgtgggcgcagtgcggcggtcacacaaaagcaagagaaaccactgaatcggagaattcaagttgcctactattgaacagctcgtccgtaagggacgtcaggcaaagccgaagaagtccaagactttggccctgaagggcagcccgctgcgtcgcggcgtgtgcacccgtgtctacaccaccaccccgaagaagccgaactcggctctgcgtaaggtcgctcgtgtgcgcctgtcctcgggcatcgaagtcaccgcctacattccgggcgagggccacaacctgcaggagcactccatcgtgctcgtgcgcggcggccgtgtgaaggatctcccgggtgtgcgttaccacatcgtgcgtggcgcgctcgatacccagggtgtcaaggaccgtaagcagggtcgttccctgtatggagcaaagaaggcgaagtaagagatatgtcacgtaagggaccttccaagaagcacgtcgtgctgcccgatccgatctacggttccaccgtggtggcgcagctcatcaacaagattctgcttgacggcaagaagtcgatcgccgaagacatcgtctactccgcgctcgatatggtcaaggagaagtccgaccaggagccggtggctgtgctcaagcgcgccctggacaacatccgtccgtccctcgaggttcgctcccgccgtgtcggtggcgccacctaccaggtgccggtcgaggtcaagccgaaccgcgccaacaccctgtcgctgcgctggctgaccgatttctcccgcgcccgtcgtgagaagaccatggctgagcgtctcgccaacgagatcctggatgcctccaacggcctcggtgcttctgtcaagcgccgcgaggatactcataagatggcagaggctaacaaggccttcgctcattaccgctggtaatcactcgccctgagtaaaactaaggaaaaagatggctgaagagatttcggacctccacgacgtccgcaatatcggcatcatggcccacatcgatgccggcaagaccaccactaccgagcgtattctgttctacaccggtaagaactacaagatcggcgagacccacgacggcgcctccaccatggacttcatggcgcaggagcaggaacgtggtatcaccatccagtccgctgctaccacctgcttctggagccgtcagtcccacgacaccaaggacaagttccagatcaacatcatcgatacccctggccacgtggacttcacggccgaggtggagcgctccctgcgtgtgctcgatggtgccgttgccgtgttcgacggcaaggaaggcgtggagccgcagtccgagaccgtgtggcgtcaggctgacaagtacggcgttccgcgtatctgcttcatcaacaagatggacaagctgggcgcgaacttctactactccgtcgacaccatcaaggagaagctgggcgccgctccgatcgtgatgcagctgccgatcggcgccgagaacgacttcaccggcgtcgtcgacctggtcgagatgcaggcctacgtgtggaacggcaccgaggagctcggcgccaagtacgacaccaccgagatcccggacgatctcaaggacaaggcccaggagtaccacgagaagctcgtggaagccgccgccgaagccgacgacgaactcatgaacaagttcttcgaggacggcgacctgtccaaggaagacatccgcgccggcgtgcgcaagctcaccatcgccaaggaagccttcccggtcttctgtggttccgccttcaaggacaagggcgttcagccgatgctggacggtgtcgtcgactacctgccgtcccccgaggacgtgccggccatcaagggctacaagcccggcgacgagtccgttgagatcgaccgtcacccggtcaagaccgatccgttcgcggccctggtcttcaagatctccacccacccgttctacggcaagctcgtgttcgtgcgcgtctactccggctctgttgtgccgggcgactccgtgctcgactccacccgcgagaagaaggaacgcatcggcaagatcttccagatgcacgccgataaggaaaacccgatggaccgcgccgacgccggcaacatctacaccttcgtgggcctgaagaacgtcaccaccggcgacaccctgtgctccatcaacgacccgatcaccctcgactccatgaccttcccggatccggtgatccaggtggccgtcgagccgaagaccaaggccgatcaggagaagatgggcatcgccctgtccaagctggccgaagaggatccgaccttccaggtcacgaccgacgaagagtccggccagaccctgatctccggcatgggcgagctccagctcgacatcatcgtcgaccgtatgcgccgcgagttcaaggtcgagtgcaaccagggcaagccgcaggtcgcctaccgcgagaccatccgcaaggccgtcatggaccagggctacacccacaagaagcagaccggtggttccggccagttcgcaaaggtcctgatgaacttcgagccgctcgacaccaccgagggcaagaccttcgagttcgagaacaaggtcaccggcggccacatctccgccgaattcatcggccccatcgaggccggtgtcaaggaggccatggagtccggtgttctcgccggcttcccggtcgtgggcgtcaaggccaccgtcaccgacggccagatgcacccggtcgattcctccgaaatggccttcaagctcgcaggttccatgtgcttcaaggaagctgccccgaaggccaagccggtcattctcgaaccgatcatgaaggtcgaagtccgtacgccggaagagtacatgggcgaagtcatcggcgatctgaaccagcgccgtggcaacatccagtccatgaccgacggcgtcggcgtcaaggtcatcgacgccaaggtcccgctgtccgagatgttcggctacatcggcga

SEQ ID NO: 2761 - DNA, 6381 bp, Unknown
  R36_18m  MAG No. k141_14640
caacgcgcagtcgttcggcaccaccgatccgcagttcggtctggacaacggcttctacgtgttcgtgctgccgggcctgaagctcgtgctcgccgccgtggccatgctgctgggcgtgggccttgtgttttccgtggtcacgcatgtgctgatgggcggtatccgcattaccatgccggttaacggacgcggcctgttctccattaccaagcgttgccgtcgccagcttggcatctggctgatgctcaacatgttcgcttgggcagtgcgccagatgattggcgtcttcgaccagctcaccgtgcagggttcacgcatcaccggtgcctcctacaccgccgtacatgccaacatccccgtcaccttcatcatggtcgtgctgaccgccatcctcggcgtggtgctgggcatctggctcatgcgctcccacacgctcgaaggccaggcgtccatcggcgtgcgcgcttccgccgcgctcaaggcctggcgtgtgccggtgacctccattgccgtcgtggtcgtggtgggtcttgtactcaccgtggcatggccggtgctgttgcaacgcttccgcgtcaacccgaacgcacaggagatggaatccacctacatccagcgcaacatcgacgccacccgcgccgcctacggtcttgacaagctcaagaccgagcaatacaaggtgaccgacaagggtgagcagggcgctctggccaaggaggccgacaccaccgcgcagatccgtctgctcgacccgcaggtcgtcagccccacgttcaaacagttgcagcagtccaagcagtactacaccttcgccgacaccctggcggtcgacaagtacgagattgacggcgtctcccaggacaccgtgattgccgcccgcgagctcgatctggccggcaatgacaaccgcaactgggtcaatgaccacaccgtgtacacccacggttacggcgtggtggccgcctacggcaacaaggtgaccgccgacggccagcccgaattcttcgaatccggcatccccacccagggcaagctcaccgaatccgaaaagtacgagcctcgcatctacttctcgccgaacaccaccgaatactcgattgtcggtgcccctgaaggcacgcaggcttgggagttcgactacccgaccggttcggaaggtgctctgaccacgttcaagggcgacggcggcccttcggtcggcaacctgttctccaggattctctacgcgatccgcttcggctccgatcagattctcttctccgaccgtgtgaccagcgaatcgcagattctctacgatcgttcccccaaggagcgcgtggccaaggtggcaccgtacctgacgcttgacggccgcgtgtatccggccgtggtcgatggccgcgtcaagtggatcgtcgacggctacaccacctccgacgcctacccgtactcgcaaataaccgacctcggctccgccaccaaggattccaccaccgtctcttccgcaacggtctcgtccctgggctctcagaaggccaactacatccgcaactcggtcaaggccaccgtggacgcctacgacggttccgtggacctgtacgtgtgggatcaatccgatccggtgatcaaggcatgggagaagatcttccctggccagtaccaccagctctccgatatctccggcgacctgatgagccacatgcgctacccggaaagcctgttcaaggtacagcgcgagctgctctccaagtaccacgtgacctctgccagccagtactactcaggcgaagacttctggcagacgccggtcgatccgaccgaatcccagtcccagcaggaccaggacatcctgcagccgccgtactacctgaccttgcagaccggtggcaccgaggaaccggtgttctcgctgacctccacctacattccggctggccagtccacccgtgagatcctgaccggcttcctgtcggtcgactcggatgccggcaatgagaagggcaagataggctcgaactacggcaccatccgattgcaggagctgcccaaggattcgaacgtaccgggccccggccaggcgcagaacaacttcaacgccaacgccgatgtatccaaggaactgaacctgctgcaatccggcgacacgcaagtggtgcgcggcaacctgctcaccctgccgctcggtggcggactggtgtacgtgcagcccgtgtacgtcaagtcttcgggcgtgacctcattcccgttgctcaagaagacgctggtcgcattcggtgatcaggttggattcgcggatacgttggatgaggccttggatcaggtgttcggtggcaattccggtgcggccgcgggcgatgccgagaacgtgtccggtgaccaatctggttccgataccaatggtggccagtccggcaccacggacggcaagtcggattccggctcgtcttccgaccgcagccccgaactccagcaggcgttgaacgatgccgcccaagccatgaaggacagccagtccgccatgaagaacggcgactggaccgcctacggcaaggcgcagcaggagcttgaagacgccctcaacaaggccatcgagctcgacaagtaacttggcttccctcagggtgaggggagctatcgccgaaggcgactgaagggagtcggttacctcaactgacatagcccgtccttatcataaggacgggctatttgcgtattcaaaggaacttcatgccatacaccttccatccggccgtcgaatccgacatccaagccatcaccgacatctacaacgctgcggtggtggcgggtggggccaccgccgacctcaccccgcgcaccctcgaccaacgccgcgcctgggtcgaatcccatacgccgccctacggcgtttttgttgtggaatcggaagacggttcaatcatcggcttcggtgcgctctccgtgttctacgatcgtgccgggtatgacggcgtcaccgatttggcctattacatcgatccggcatggcaaggcaggggagtgggcacgttcatgcttgacaggctgctcaccgaggcgcgggcccgccacatgcgcaaggcctgtggcatcattttcgccgataacgtcggctccattgccctcatgcgccgcttcggcttcacccaattcggcctcatgcccgccgctgccaccgactccaccggcaccatgcgggacatgtcctactggtatttggacctgtaggcccgaggcggtttacccttgctctccatggattccggtgtcctataacactaaaaagttgtatcggatcagctcttttcctcgaacgccatatatcggacgcgcttatcccagataacggcaaactacgggacggcacgcgattttcgtccgttttgacgtggtatcccgcaatcacgtgggatgccacacacgtcaaacgatgcacatagctcgcgtcccgcaactcttcctgcgaaatcattggaattctgccattcttatgattcggtgcaaataacgtgcgataacgcttgcgggatgccacgccaagaacgcccaaaatccgctgccgtcccgcaatatgtcatccgattgcagggaagcgtcatctgtctgagctgtttcccttgcttggcgtcgtaaacgacaagttgttgattgccgctgcatgtttctcctatttgagaaccgaatgctacatactgagattttttccaaccggagttgatgttaaagtgacgccaagctgggacacgctgttcgtgtgcggcatcctgtgcaacgtgctcgtctgcctggccgtgcgcatcggattcgccgcgcgctccgtatccgacaaggtgctgggcatcctgctgccgatcgccggattcgtggcgatgggcttcgaacactgcgtggccaacatgttcttcctgccgatgggcctggtcgccaaaacgtttggtttcggcgccgacgcggcgggcgtcgcggcgctcgacgtgtcgggcatcctctataacctgtccgcagccacgctcggcaatatcctcggcggccctgttcgtggcgctggcctactggtacctcaacggcaaacagcgcgaaaaggtcgctggcggcaccgcctaatagacgcgattcactcgtccccatctcttgtaatactggtattacaaggaggtgcgatatgactatggccatggtgacggcgcgcgtcaatgccgaacggaagcgcgacgcggagaaagtgcttaagcgtaatgggcgcacctattcggacctgattcgtgatctgaccgactaccttgcggatacgggggaactgccggaattcgagcgtctgacgctctccctgattcaggagcgggagcgtaggaaaaagcaggagttgattcaacgtttcgccgaccggaatttgccggaggcggaaggcgatctttcggatgaggagattctcgcgcaggcacgtatggaacgatttgggggacgggatgaaactgctgtttgacacgaatattctgctcgatttgtgcaatgacaaacgagcgcctttccataaacaatgtgttgatttgctcatggaagccgttgcacagccaaacattgagatcatggcgccggtatcgtcattgaatgacgtgtattgcgtgttgcgcaagcattatggcgaggagcgggcggcgcgagacgatatcggtggactgatggaattgttcgacatccgtccacttatggaacgccatgcgtgtatgtcgtaccggtccgatgagcccgacttcgaggacgggctcatccgtgccgttgccgaggacaatgacgccgacgtcatcgtgactcgtgacgtcgaagcgtttcaccattcatcggtccgatcgatggatgccgagcaatgccgtgccctgctgcttgccgattccaaggcttgacggcggcgttgagtacaatcttgacggttgaatccggccgggcatgggccagtgcgcgaggcgaacgcgcgcatgacgtacggaacgtacagaacgtgcatacgggaatataggaagacggacgaggagtggattatggcatcggatttctggctgattgcgggactgggcaaccccggcaaaaaatatgaggacacgcggcacaacatgggcttcatgaccgccgacgtgctcgccgaacgttggacggtgaacttcgccgaccacaaaggtctggccatgctcggtaaaagcgtgatgaacctggacggccgcaccgtcaagttctttctggccaagccgctgacttatatgaatgattccggcaatgcggtggcttccattagcgcctattaccagatcgagcccgaccatatcgtggtgattcacgatgacatggacttggaattcggtcgtatcaaggtcaaggcaggcggctccgcagggggccacaacggcatcaagtcgattgaccgttccctcggcacgccgaaatacgcgcgtgtgcgcatgggcgtcggtcactccaagcgcggtgcgaacgcgcatgacaacacggtgaactgggtgctgggcggattcggtccggaccagcgcaagcagctgcccgaattcctggctgacggcgccgacgccgccgaggacatcatcttccgcggtcttgccaagacccaggagaagttcaatggccggtgaggcgacgcacccggacctgatcaacggctcactggtaggcatcctgtctgagctggaacaggacaagaccttccttagactcgccactggtgacatcgaggtttcggacgacatcgacaattccgttctggccggtgtttccgaaggcttgcgcccggctttggccgccgccatcgggcagggtgtgaccggcaaacccggcaagccggtcgtgctggtcgtggcctccggccgcgaagccgaagagaccgtgggctcgctgcgctcctggtatgacggcgacccggacgacatcgcccagctcgaagcctgggaaaccctgccgcacgagcgtctgagcccgcgcgcggacaccgtggccagccgcatggccgtgttccgcagactcaagcatccgagcgataccgatccgatgttcggcccgattcgcattctcgtcatgccgatccgctcgctcatccagccggtcgtccaaggactgggcgacgtcgagccgctcgtgttcaccgtgggggaggacctgcccctcgacgaagccgccaaacgtctgatcgaaaacgcctacacgcgcgtggacctggtcatggaccgtggcgagttcgcggtgcgcggaggcatcctcgacgtgttcccgcccaccgcaccgcacccggtgcgtatcgaattcttcggcgacgaaattgacaccatcaaggaattccacgcctccgaccagcgtacctacggcgacggcctcaagaccatctgggccaccgcatgccgtgaactg

SEQ ID NO: 2762 - DNA, 9134 bp, Unknown
  R36_18m  MAG No. k141_14776
aatctcctcttcttgttcaggcgacagtattgccgtgggcgccggtcacatcgagcgcggcggcctgatcgtcggtcaggtagccgaaccacttgccggcggtggccatgtccttgtcgcctcggccggagatgttcacgatcatcacggccttgtcatagcccttggctttcagatcggcggcggccttgtacgcgccggccacggcgtgcgagctttcgatggcggggatgatgccctcggtctggctcaggtcgcggaaggcgttcatggcctcctcgtcggtggcccagctgtagttcacgcggccgatgtccttgagccatgcgtgctcggggcccacggaagcgtagtcgaggcctgcggagatcgagtaggtgtcgagcgtctggccttcgtcggtttccagcaggtagctcttggcgccctggaacatgccgagctggccggtgccgggggcgaagcggatggcgtgcttgccggattcggggccgttgccgccggcttcgtagccgtagaggttcacgcgctcgtcgtccaggaaggcgttcatcacgccgatggcgttggatccgccgcccacgcaggcgcagatcgcgtccggatggtcgatgccgtaccagtcctggagctgctgcttggcttcctcgccgatgatcttctggaagtcgcgcaccatggccgggaacgggtgtggacccgcgacggtgccgagcaggtagtgcgtgtccttgacgttggtgacccagtcgcgcagggcttcgttgatggcgtccttcaggatcttgtcgccgagggtcacctcgaccacttcggcgccgagcatacgcatgcgggccacgttgagggcctgacggcgggcgtcgatctggcccatgtagatgcggcacttgaggccgagcatggcgcacacggtggcggtggccacgccgtgctggccggcgccggtctccgcgatcacgcgggtcttgcccatccgcttgacgagcagggcctggccgagcgcgttgttgatcttgtgcgcgccggtgtggttcaagtcctcgcgcttgaggaagatacgggcgtcgagaccggtcttctccttgaccagtgcggcgaagcgcggggcttcggtcagcggactcggacggcccacgtaacgctgctggagcgccatgaattccttgtggaattcggggtcggccttggcttgcgtgtacacgcgctccagctcgtcgagggcggtgatgagggcctcgggcacatagcggccgccgaactgtccccagtacggtccctgatgttcgctgagcggggtggtttcggatgctttcacttgtgctcctgcctttactagtcgttccactgcaagttcatgatcatcagcggtggccacgccttcaccgaccagtaccgcgtccgctcccgcgcgggcgtagtcttcgacctcgaccgcgccgaatacgccggattccgccaccttgatgacgtcatcgggcagatcggccgcgagttcgttgtatttgttcacgtccaccttgaggttcttcaggttgcgcgcattgatgccgatcaccttggcaccggccttgcgggcgcgtttgatctcctcgcgggtgtgcgtctccaccagcacggtcatgccgagctcgtgcgccaggtcgagcagatgcttgagctgggcgtcgtccaatgcggcgacgatgagcagcaccaggtcggcgccgtgggcgcgggcctcgaagatctggtagtcggtgacgatgaagtccttgcgcagcaccggaatgtgcacggcggcgcggaccttgtcgaaatcgtcaaggccgccgaggaatctgcggccttcggtgagcacggagatggcgcttgcgccgcccctctcgtactcgcgggccagcgcggccgggtccgggatgtcggagaggtggcccttggacggagacgcgcgcttgatttcggcgatcacggggatgccgtcggcgcgcttaagccatcgtgtcgcgtcaatcggagccggggccgccagcgcggccttcttcacgtcctcaagcgatacggtgagctcacgggcgcgctgatcctccagcgctcccgccaccagttcgtccaaaaccgacatggtcctccctttgttggtgttcggtcatgcgccactctaggtcacgccccgtcccgattgccgaacccgtcctacattctgggctattcctcgttggttcgtatcgctacggaaccagagcggccaacaaaaaggaaaatcgccatgaatatcggtcatacggcctgggattgattccattgatggcatagactgggcgcatgtgcaggagattcgcgcttgatttggattgggatgccgtggcctcacagttcgcggtagacgaggatgacgtgcgcgttgacactctgccacagccttcctacaacatcgtacccatgcagaacattggcgtggtggcacagggcaaggatggccgccgtcatctgaccggtgcctattggtcgctggtgccgcgatggagcgccaacaaagtgctgagctaccccacatataatgcgcgtgtggagtctgcgcatgtcaagccggcgttcgccgaatccacaaaatccatgcgagccatcatccccgcttccggctactacgaatggaaaggtcgcaggccgttctattttcacgcaccacatgatgaactattgtctttggccggcctgtactcatggtggaggccgtctcccgcatcgccatggcagctgaccgcaaccatcatcacctgccctgccgcggacgagttcgtcaaggtgcatgatcgcatgcccctgctggttcctcggaatatggttgcctcatggctggaccgctccgttgacggagccgcactgttagattccatgcgggaagcgggtaccatgctttcccggcatctgcaatttcacgaagtcgcgccactgaacagcgacggcaaacgtcttattcagccattggattccgccgaacccatgcgtctgttttgagctcttgcagctggaaccggctatgcagctgtatatgaagacgggtcaatcaacgccccgctgatagctaacctcgtatggccatcagtcaaaaacaggtctcttctgctcgacattggtcgactacgactacttttgcaccaatccgcgcaacaactcgatctcgtcgcgatgcgtggcgggcgtctgctccttggtttcgagaatcatcgggagcttggccatgatcgggtcgttgaccagtcgcgtgaagaacgggatgccgagctggccctccccgatgttggcgtgacgatccttatgcgagtcgaggccaaactgcgaatcgttcacgtgaatcgccttgacctcggccaagccgatcgcctcatccaactggcgcatcacaccgtcgtagtcgtgcaccaaatcgtagccggcatccaacacatggcaggtgtcgaacgtgacgccgacgttcgccttattctccacgccatccatgatcgtggcgagctcatcgaaattgcggccacattccgtgcctttgccggccatggtctccagaagcaccatgacgccggccgcgcgctcgaacacctgattcagtccctcgctgatcagccggcagccggtctcggagccttggcccacatgcgcgccgggatgaatattgatatacacctcctgtccggcctcgcggatggcggtcagcagctcgatgtcctcggccaacgcctcgatcgcgaatgtgcgcttggcctcatccttgccggctagattgtagacgtacggcgcatggacgaccaacggcccatagccctcagccttcagacgcgcaccgaacgccgccgcgccggccgggtcgagcgccttcgaacgcttgccgtacggggaacgcgggaagaacgcgaacgcggtaccgccctcctcatgggaacgttccagcagcgcattccatccgccggccgtcgacagatgcgatccgatatacagttccatcattccaaactcctcgtgttccactcgctgttcgtgttaccgctatcatatggtaggcggcatcgagcgccgcccgcacaaccgacacgagacacaactgttcacccgaccaaaggagacccgagcatggcggcagccggcacacccaaggacgataccggccttgaacggaagatggagtcgcgtcacctgacgatgatctccctgggcggcgtgatcggcaccggtctgttcgtcagctccggctacgcgattcatcaggcgggaccgttgggcgcgatcctcgcttacgcggccggctccctgctcgtctactgcgtgatggtgtcgttgggcgagctgtccgtggctatgccgtacgccggcagcttccacatgtatgcgaagcggttcatcggccccggcaccgcgttcaccatcgccatcctgtattggctgaactgggcggtggcgctcgcctccgaattcacggccgcagggctgttgatgcagcgatggttcccgcattcgccgtcctgggtgtggtcggccgtgttcattgtggtggtgttcgcgctcaacatcatgtccgtgcggctgtacggcgaggcggaattctggttcgcgtcaatcaaggtgttcgccatcatcgcgttcattgtgatcggcctgctggcgatcttcggcgccataccgattgccggtcatgattccgcgccgttgctgggcaacttcgtggccgacggctggttcccgagcggcatcgcgccgattttctcgactctgctgaccgtggtgttcgcgttctccggcaccgaagtggtgggcgtggcggccggcgaaaccaaggatccctcgcgtgcgattcccaaggccgtgcacaccacggtgctgcgcctggcgattttcttcatcggctcgattctggtgatggcggccttgatcccctggcatcaggccggcgtggatacgagcccgttcgtgctggtgttccagtcaatcggtatgccgttcgccggcgacatcatgaacttcgtggtgttgacggctgtgctttccgccgcgaactccggcctgtacgtgtgttcgcgcatggtgtggtcgctggccaaggagcggctgattcccgaacgttttgctaggacgaatttccgtggtgtgccggtgtgggccgtgctgttcagcatggcgggctcactgctggcgttgctgtcttccgtgatcgccgcctcgaccgtgtatctggtgttggtcgccgtgtcaggtttggcgacgctggtggtgtggttctccgtatgcgtgtgccatatccgtttccggcgcgaatgggcgcgggatgggcacagcgccgatgagctcggctatcgtgcgcccggtttcccggtgctgccgtggctggccatcgtgatgtgcatcggcgcgctggtgctcgtggtgctcgatgatacgcagcgttcgaccctgtattgcatgatcccgttcgtcgcctgctgctacgcggcctattacgcactcgaacggcagcgcaaacgcgaaaacaacgcctaactcgatttcgaggggctgatttggcacttgccggagatctatctccgtttcaaggggctgatgcccgagtagacaaggctccacaatggcgtaatggcgttgccgcaaagccgtttatactcgtggtttggcgtttgagcagcccctcgaaagccaagtagatgtccccaccggacgaaatcagcccctcgaagccgagaaaccattgatggccgattatgttgagcccagtgacgtgcctggtcccgtgctcgaactggtacaacaattggagtttggtttttgcaaagggcattgttatgtacaaggtgttggtgtcgttcgcagacagctaatgcgcgttgactcgtcgcgctaagccgtggtcgccgtttgggcccacggcacttctgttgtgccatgtcccacgcacttggtcgaaggctggcgatgggccctgaccaagcgcgtcttcctatacgcgatcatactcggtgcaatggtgaacatcgcctgcgtagccagtatcaccggcgcgcagatcatgttggccacccgtggcgccaacgcggtcatgatcggactgctcggcacggcaatgggcgtgagtactttggtcggctcgctgttggccaacaagctagtcgatatggttcccacagggaaactgattgcgggcgcgctggcgttgttcgtggttagccagatgccactgctattcctgcacagctacgcggccattctgatctgccagattctggccggcctgccgttccccgcgttgaacgctggtctgctgggctttctctacggcaagacatccgacaacatgcaggggcgggcttctgccgtatttgaaaccacggtcggcatactgggcgcagcatgcccggcgatggtcggctggctgttgcaacagccagatctcggtttcacggcggtgatggccgtagccgtggtctggtccgtagcgggattggccgtatcgttggccggcccgctgcgcagcattccgaatcccgaccagtggtcggaggttttcctgtaacgccaagcagcggagcgccggtttatatcaggtcgtacggcatctgacgcttgaccagccagaagatgccgaggccgatgaacaccagcagattgaatccgccactatgccaccacaccacggcgatcagcgtcgccatgcgcgccacatagaacgccgcacgccgccagccttctcgcggccgggtttccactgtcatgtgcgtgaaactgccgccgaacgtgcagccgccgcgcaaccatggcaccacgccctcgaagaggatgagcgccgccaggaagaggatcgagccggtccagtcgaacggttccatcgactgccatgagccgttggagcccgagggcaggtttgagcggacgatcatgacgaacagatgcgtcggtatcacggcgaacccaatcagcgtcatgtcgatgatgaacgtgatcagccgcctcatgaagccaggtgtggtggtcggcgtcatatcggcgacccgcgccggaatcaggcgcagcgaaagcatggccagcgcgaatccgatcagcgcgccggtcgtgttccacaggagatcgtccacgtcgaacagacggtaggcgcacgggaacacgcccatgaggccggtcagctgcatcgtctccagaaatagcgacgtggcgaacgacagtactgcggtaaccggcagcggccaacgccatatgcggcccatgatgaagcccaacggcaggaagaacacgatattaaacgcgatttgcagtacggcggtgagaccatcggtacggatgtcaccgatgaactgcaatggattgagctgtggcgtcagatggtgcgcggcgcaataggctgccgcatcggccggcatcggatacagtgtgaagcacagcaggccgagcaggtacagcaccgtgccatacgccactatggccgacgacagtcggatgcgattgtcgcgatgatacagcaacgccagcaccggcaccgtcagcagcatggacacaaacggccacaatgccagcgcgaacgcaaacggttcggaaaagttcttgagaaatcccatcttcaatgctccctgcttcggtccgctccattcggtttcggaccatatctctcgacttctgattccaaggtacggaacatgacggcacgcgggtatcggccatgagagcgaaatcattgggatgaaaggcgattcgtatcattcgcatggatgaggaagatgcaccagttaccattgacgccgacgaggatggcgtggtcggcgccgtgaccgcgcagatgagcgagcgtacgtcgttcatcgtgttggaccagattacttccgccaccgctatgctgtttacggcccagcgcatcgccgccgaagcccatcgccgcggcatccgcattttggttgatggcgcgcacgctcccgcccaactggccgatccggccggcggactgcagtccgattggtgggtcggcaattttcataagttcccgtgtgcgccgcgtggcacagcattgctggtgattccgcccgaaggcggtcaggatggtcaggatttgtggccactgatcgactcgtggggtttcgctgacccgttcccggagcgattcgatgagcaaggcacccaggatttatacggtccgatcgccgcgcccgagtccctgcgcgagatcgagcgactgtggggctgtgatgccgtgcgccggtacatgtccgatcttgccgattacgcggagcgtcgggtatccgaggcggccagcgcggtcggcggcgaactgtacctgcgcctcaccgcccacgcctacgtcaccgccgacgccatagaccgcttcgccgaacaatctatcccaaccatcgtcggatggctgcgtaagcgaatcgtatgttgcgtggtgccttaactatggatgattaaggcgccaatgcaacattcatgaagccatgtctttgaacagtgagcaacgcgcggcgactatccgcgaatttcaggagaacatgagccggctgggtctgaccgccgaacggcggcagggattttggcgtcagcggcagcagagtggagcaaatcatcaccctcaagtcgggcgtgctggagtatccgtggattatccgcgcctatctgctgagcaaaaccgcggcgcagggcgtggaactgacgccgttcacggcgctacgcggaaatccgcacgattattggttcctcgacggcgactttatcgaccgaggcgaaatcgattaaaaccgattgataatcggccatttacacgcaagaggcgccgtcaatcgcctcgcgcatagaggccatcgctctccgtgcaggtggcgatgcgtgtgtagtattccgtcttgtcctcatggtcgatacgtgcgccgcaatgctgctgcaccgcaagacttgccggattggttttgtggacactcaggtaagcctccttgatgccgagctcgcgggccttggcaagcgtgagcttgagcccggcggtcgcgtagccgtgaccgcggtattcgcgggcgacaccgtagccgatgtggcccggaccgttgcgcaggaagtcggtgagccggtgacgcaggttgaagatgcccacatagtcgccctcatcgttgacgagaatgtatttggtggctggcacccag

SEQ ID NO: 2763 - DNA, 7737 bp, Unknown
  R36_18m  MAG No. k141_15050
gctcatggaacgcttcgggctgacgcgctccatgagcgcgaagggctgttcgccggacaacgcggccgcggagggattcttcggcaggatgaagaccgaggcggtctaccccgagaagtgggaggaacacacccgcaacgaggtgctcgccttggtcgatgaagtacatacgctggcacgaccacgagcgcatcaaacagtcgcttgggtggatgagcccggtacaataccgtcaaagccaaggaatggctgcgtgattatctccaagaaaatgtccgcagccccttatcgtacttcacatgtgcgaaacgttggaattccgccaaaattttatttgcctggtatttgcttgggtgggtcgcaaagcgcggttgcggcacgattcttagtggtggtgccttatggcgtcgggctttccttgcaaatcgaggtaaggaaactggcccttaacccggaatttgaaaaagtaaaaggtccctggctgttcaccagccagagacctttttggtaacaactgaggttgaggaaacctcggcagttgggtccaacggggcgaaagtctgtggcgccgccgagaagattgccccgaagctagcgcgacctttctgctacaacacagcataccagcatccatcgaaccttccccgtacactggacagaccaaaccaaggaactactagcgtggcaccttggcacggtgtcattgtgccagcaggcatagtgactggttacaactaaagaggaggttctcatggaaggcaacgaccatgacaaccgtccgggatctgaccggcaataccgggaaggcctgatgacgggcctgttgatcgctctggccaaccaagttgggcagggatggtcaacggctatcattatcgccacactggtgttgcttggtctgagcctcaggcgaggccgctgactcgtcagcggaacagccggaatccatatgggttccggcccctcgtcttcaatcagggcaccgtttcaaggcagaagaatcaggcggccttcttgcgaccgcggcgcttcatggtgccagcggtggcattggccacatcgaaaatcacggtcttgctttcggggtaggcggtaccgttgacggactggtaggcgatttcgccttccggagcctcgggtagagtgaagtatgccttcactgcttcaatgagcgtggcttccttgacgcttaccgaagcagcctgcttgccttcgggcttgctgaacttaatggcgttgtcggcctttgcggtggtcggggtcacggcgatctgcttggtcttgtcgttaatcagcaccttgacgtacgccgggaatccgagcacttcagcggtggctttgttgaaacgaatggcggaatcggtgacggtcagaacggtcttgcccaccggcttgaccagctgaacctcttcgaatccctgaagcaatgaagccataattgctctccttattgcattggtcacgtgtttttatttacgtcactaattgtaaccagctaatttcgcattatacaaatcatatgcatgcatgattgaataattgaagaacatttgacctacgtattgcgctccctgaatagtaccgatttaaccaataccaagaaaagaggaaacaagagcctgcaatatcagccgtattgaatatagaaatatgtaatttcaacatcgcgatagctgaccggtctttttgctggctctattcgccgatattgcattcaggccacagcaccgagcataatatcgacgccgtgcttgatctccgcatacacgcgttcaaacacctcgcgtgattgacgatgagggtcttcggtttcgagtgccgtaggcaaaaacggccgcagcataggtacgcaatccatgatttcgatgagcttgtctgcggcggtatcgccggcaatcggaccctcagcatgcatatgtttgcaagcgttcacgaagtcattgaacagaaatactttgcgaatagccagtggattctgctcaagcaaatcggaaatttgctcacgctcaaaacacagaatcaggtcggcttgccggctgatatcggtggtgagaggggtggaagaatgggaattcgcgtcgatgccgtcgttcttcagcaaatcgataaccatcggatcagcgggatgcgggggatagtgcagagtacccgcgctgcgcacggtgatattgccgctctgcaagccaattcctcggtcggcaagcttggctcgggtgtagtattcggccatcacggaacggcattgattgccggtgcatacatacatgatttgcataacaacgtcccttctcaagtgttgtgagcattccctcatatattccagtgagcattcttcgcgaatatgcgtgcgttatgtaccgtagcaataacatgaaaaaaccgggaatcatcgactcccggttcagtggtattcgcgaactatgcttcagtgtctaccgtttattatgtcagtcacgtcagcgacgagtggtgctcttgcggacggcgaacagggcgatgcccgcggcggcaagcagcacaacggccacaccgtacggtgcgatggccgcaccggtgttggcggtggtagcagtcgtggtaccggactggtcaccggttccggttgccggaacctgaatggtggcggtcttggtaccggatacagcgccaacagccttgaccgcgatggtcttgccagcctggctggccttgaacgtgtacagcaaagtcaaggaaccatctgccttggcagtgaacgtcttggatacttcagcgatctgctggacgtcggcgacgatggcatcatcgtagtacacggtgacggattcattcggttggaatgtgcctgcagggaacgtcacggtagcggtggtgccgctgtaagtaaccgttgcaccgtaatcatcagccatggcggtattcgttgcgaaaccaaagcccagaactgcggcgataacggccagcacggccataatcttcttcttcataacttcgaacctccacaatggaaccggttactaccaataaaaaatcggttcttatcaatagaaaatcggtcttttttcaattacagcccccaaccatacacccccctttgccggtatataaggggtaattatgttaacggataaggggggtgtgacaacgtggtcacatcatgtgacaacgttcgaacatattgtcgccgcattaccgttgcggcggggtctcctgacgttctgaaaacgttgctattccaacgattgcggtgattggcgatacgtgcatggtaaacaacagggaaatttttttctgcgacacgccgacgggctactcggattctgattcgtactcgtcgtcaaaactgaacaggtcctctacggtggtgccgaacacccgcgccaaatccatggccagacgcaatgatgggcagtattgcccctgttccagccttcctatggtctcacgtcgcacgttgaccagatcggcgaggtcggattgcttcataccgcgttggagtcggtgaagtttcagactagtcttcatcgtcgcccccggtgccggtatcgtgttccaaccatagatatcgaatatcggaaatggccaaggcgcacatggccaatgcgggcagtagcattggcggaataatgtgaactatcgagcggtcaatcagattcagtgtggtgtagatgaaaccgacaattaccagaatgcccaccaaactgaccagcgcgaattgcatggccgcgctttgatgcatatcggaaagctcgtcgcgtcgcgggttctgccgtcggaatacagtcatgccccatacttcgccgccgatccacaacagcgccgcgatcgctgccacgattactccgagcaggttattgccaataagagccatcagcatgcaggcaatggcacctatggattcaaggatggcacgaaagcaaatataccgattaaaggtcatggccgtctccgtgaattatgcgagcgatattgaattgcacacgcaattataaagttaggggggtaaccccttgtgtggtggttaggccaaccggcggaggttctttgcgtagaccgagaataatcgcaatcagtaattgttatgggcgatccagtagttgtacgctgcgacgatgccgccgtagcgctgctcgcagtagctgatgaaccacttgaactgggtcttgtagttggtctgccagtccgcgccggcggaagccatcttgctaccggggaaggcctgacccaagccataagcaccagacgtggggttggtggcggtggggctccaaccggactcgtgattgatgatgtagttcgcagcggtgaagtccgcttcgctatacccgttgtctaacagatactgatgcgcccaggactgaacttctccagccggaacagtggtgccgagatcggccgacgatgatgacgacgtcgacggcgactcggtggaaccagtgcccaccaggatcaccttatccaccggggccttcttgacccatgaggcgaatacgttggaagagacgaccttgtcgccggctcgcttgaccagcgaggtggtctccataatgcccttctggccctcggtctcgaccttttcctgacccttgggcaggctgctggtctccttgcgcacttcattgaaggcgatctcggtatcgttggtctccacatcggcatccgcgcgattaatggtgaccacggtggcctcggtgaccttggatttcagcgagggcgatacggcatcatccgggtcaagcgtgatatcacccgtctccagcacgtccttgacggtggtcatgttggctttttcgccaagtactacgcgcgaatcgccattaatcttcaccgtaatgaacgtggtgttcttgtcggcgctgttgattgcgccacgagtggcagaacgggatgcggccgaatcggtagccgagaacgaagtgatggtggaaatcggcttcacatcatcagcatggtagaaactgcgcgacaccaatcccgccgcgccgagcagacctgccgcggccaccacagccgcgatcttcatccactggcgcttgttcaacggcctgagcatacgggtcggcttggcatgtctcgtcattgcgctccttgattggatttcacactgctcaccatgataggcggcgcagtggatgaaggaaaatcaggctcaggcctgctggtcggcaccggactgggcggccttggcggcggcgaggtcgagggccttggcctggccgatcagatcgtcgagatcggcggcctgcagcgcgccggcctgctggaagatgacctcgccctgcttggcgatcatcagcgtgggcaccgcctggatgccggcggcctgggccagatcctggttggcgtcgatatccaccttgacgaaggcgatgttcgcgttctccggctcgttggaggccgcctcgaaaatcgggccgaacgcgcggcacgggccgcaccatgtggcccagaagtcgacgaacacgatctcgttgtcggtgatggtcttctcgaaatcggcagaggtgatagcggtggttgccatgatgttcccttcttctgtgttttccttggcgtcgccgtacggccctcgtgcgtggccgccgggcgattgccttattcatgcaatacgtcttggcgcttggagccgtgcggttcgtggccgtcggctccctgctggctaccagcttcccagcaccacccaacatttgtgtcgtattttccgccgccggccaaacgtttcccaagatttcgctggaaggtgacgcgcggcgcgctgtgacgcgcaataatgggatgcatgccagtcatgaatgatgaagtgcccgacgagggcgattatgatgccggccgtggccgcggcgaattcgacaacatcacgcccgaggacttcatccacgggggcggttccggccacggcaacccgccgggctggctgggaccggccgacatcaaccgggcgcgtcatcagatgcccatcgcatacgtggagatcgtgcccgtgcgcaccgatgagatgggccgcatctcccaggtgggctcgctgctgcgcgtatccgaggacgggtcgatcgaacgcacgctgatcaccggccgtgtgctgtaccacgagacgctgcgcgaggccatcgcccgcaatgtggccaaggatttgggcgatatcgccttgccgctgctgccggtcgggctccagccgttcaccgtggccgaattcttccctacgccgggactgagcgaatactacgatccgcgccagcacgccatcgcactgtgctacgtggtgcccatcgccggcgactgcaagccgcaggacgagacgctggacgtggaatgggtggatcccaagagcgacgtaatgaacacgttcgtggcgcagatggtcaacggccacgggcgcatcgtgcggcaggcgttggcctgggccggaatctgacagttgttttgcttcccgctggtgggacgtgaatgtgaaggagtaattcatggcaatcgaattggccaatcatatctatcgcgatggcgaaggcgtgccggtggtgctgatgaacgcctacccggtggaccaccgcatgtgggacgtgtgcgcgaaggcgctcgccgactccgccgacctgaacgatgtgccggacttcccgatttgggcgccggatatggccggctccggcgcatccccggtgccgagcgatgccgattctggcccccgcatggcgaacggcgcgtacagcgaggcgctggatcgcctggccggagcctacgtggacctgatcaaggccgccggctacgagcaggcgatctgggtcggactgtcgatgggcggctacgtggcgatggacatccagcgcctgtaccccgaaacggtggccggactggccttgtgtgacacgatggccgcgtccgacggcgtgggcggagagaaccgactgaagatggcggacgccgccgaacagacgaactcggtcgaaccggtcatgcacttcgcgcaaccggccgatggcgattccaccgtcaagaagactcctgaattcatcgcgaccatgaccggctggatcaacgaacagaacccggctggtctggcctggcgtcagcgcatgacctacggacgtcctgaactgggggcggtgccggaaacgatcagcgcaccgagcctggtggtatccggcgaactggacccctccagcaatccgagtgtgatgcggccgctcgccgaacgaatcaccggcgctgaattcatcgatattccggactgcggccatttcagtgccgtcgaacatccggataccgtggcgcgagcactgctctcgctcgtcaagcgcgtgcagagcgcgcagaagaacgcataggagacttcgatgaccgctgacattcatttctcgcctctggcactgacccatgcgctgccgttcctgccgctcgcacaaggtgacatcgactatcaggtggaccggcgcagcgaacccggcctgatcgacgagctgttggccgagccgaccaccaaagtcgtgcttacgcgcggcggacttgtcgccgtaccgcgcggccaaggcgagcttgtggactatgagaacgtgaaaatgcggctcgccacgttgccgggtgcctatgtgtccgccgaactggcgcgctaccccgaagcggtcgccatgttccttggctcctatgtcggggcgcgcggcgaatccgtggtcgccgtggatatcacgcgcgtgccggaagccggtgttcccggtgttggcgggattgctggtgtttccggtgctgccggcggcgtgctcggcaccc

SEQ ID NO: 2764 - DNA, 6250 bp, Unknown
  R36_18m  MAG No. k141_15111
atggatggccagggccgataatccattgcgtgccatccatagtgaaccagtcggccagttggatgatgtcttgcgagggcaggtccatcatgcggttatgccagcaggccagtgcattgcggaaggagcgcatcgcgttcgccgacgccttgcggccccatcgagtgaggccgtccacgaacatgcggtcaatacgtgacagcgccgggccgcagatttcagatggctggcttggatgggattgcgccaacgcatgccagagggattcggcgttttccgcgcctttgagcgtggcgtacatcatcacatccgcgccatcaagacagaacgtgagcgcggcacgatacaacgtatccgtgggaggtacgggaatagtgcgcgaaacggcgagactcgtatcggtgtgatccacacttcctgcggtgccgccagattgccggatatcagtagcgttactcatgtcatcctcgttctcatttcgatgccctgatggacgtcctgttcagtgggggatacgcggccggccagatcggcgagcgtccaagacagacgcatggcgcgatcagccccgcgcaatgtgagttgatgattggacagggcccgattgaccaattccatcgctttcagcgacgtattggcatgcagccatttgcccgaagcttgcgcgttgcacacccatccatactgtctgaaccggtccttggccacttgacgggcgcgaatcacacgagcttgtatcccggcactggactcgccgatcgtctcgctctgcgcggcaatgcgcgagaccggtggcaccgccatctgaatatccacacgatccaatatcggtccggacaatcgcgagaaataacgaatacggtctttttcccggcaagcgcaacgttcgccggtaccgtaatagtatccgcacgggcaggggttggccgccatgatgagttggaatgaggccgggtagtaggtgctgccttttgaacgggaaagcgccacatacccggattccaatggttcgcgcaacgtctgcagggcgcgtgcgctgaattccggtgcctcgtccagaaacagaatgcctcgatgcgcgcgtgtgattgcgccgggaacggcgatgccgctgccaccacccaccaaggccgccgtgctggcggtgtggtgcggtgcctcgaacggcggcatgtcggtgatgccgtactgaggcagtatgccgcacagcgaccgtatcgacgccacctccagttgttccgcctcgttcaacgggcacatgatgccgggcatacgtgaggccagcatggttttgccgctgcctggcggtccggtcatgatgagattatgtccgcctgccgccgccacttgcagcgcccatttggcatgttcctgacccagaacctcgttcatatcgccacaatcgttgggatggcttgtgggcgattgatccatggtggtctcgtcggcaaccggtgtatcagtaatcgtataggtggcatcgccgcccatcagttcgatgagctcacccacatgcctcacgcccactacatccagtccatccaccattgaagcctcgtcaagattgcgatggggaacaatcattttgcgcacgccacgttcctcggcatgcagcatgatcgggagcagcccatgaatcggcagcaccgagccgtcaagattcacttcgccgagcacaatggtatcttccaagcaatcatgccctatggcacccgccgcgcataggacgctggccgcgatggccagatcatgcgacgaaccacgtttgggcatggccgcagggctcatgttcacggtcacgcgggtttgcggccaaccgaatccagtggcttgacacgccgatttcacgcgctcgcgggcttcggacaacgatgcatccggcaatccgatgatgctgaagtatggcaagccagggctgatgaaagcctgcacttggacgatgaaggccttaaggccgatcagtccgactgagagggtgctgccgatagccatgtctactcctttcacaatgtgtttcgcaacgtggctgtttttttttgggggggggcttcagaaggcattttcaatgtgatgcacgagcggcctgcccacccgaagcacgatggtgacgaaatcgaaacggaccgccgaatgcggcacccgattacgccggtcaagtagccaatcgcaggcggctttcctgagattgtgctgtttcgccggcgtaatggcctcttgcggatatccgtaatgcatggaccggcgtgatttcacttcgacgaacaccaccgtgtactcgggattgagcatcacgatgtccaattcgccgtaacgggtatgccaattgcggctcaaggtcgtccaaccgtgttcctccagccacgcggcggcatactgctcgccgagcgcaccgaactgtttgggcgtcagattgcggtcgcccatcgtggccgcaatccgttccgaaggcagcgttgcctgcggatcaggtgaagccagcatgggctggtgaaaggcaagaccggcgtcgatgccggacttcgtcgtcggctgggtaggtggtaaagcgttcatgattccactgtgcgggttacttatgtaagagcacaagcgcaaccggcaaatgtggatactatgacgcggtttggcgtgttgtggataacgtgtggatgaaaactcggttatccaccattagttcagaaggtttaccaaggctcaccagtcgacttccctgtgacgaaaaaacaacccatcggattgttcgctgaatacgtcagacccagtgagcggagaggggagccaaggtgcggtcacttcaccaaatcggtgagttcgccaaggttcagttcgaagctgacgccacgatcctcgaaatgcggctggttacgggtgctgaccatggcgtgtcgcacgaactcgccggcgatttcggccgactcggccaagccgcggccggccatcaccgcgccgcacagggcagatgcgaaggcgtcacctgtgccatgaatcatgtatggcagcttttcatgagccagctcgatcttgccggcaacaccggtggaagcgctggccacatagttgacgattttgccatcgccatggtcaatgcccttcagcaccacgttcttggcacccaactccagcagagcaccaagcagctcgttaaccgtggcctcatcaatatcctggccaggatagtcacgcttggtgagaatgctcgcttcggtgaggttcggcatcaacacgtcggcaccatcggccagagcgcccattgcctcgcacagctccggtgtatacgtggggtacatttcgccggcgtctcccatcaccgggtcaaccagacgcagcgcattcggatattcacggtagagacgctgaatgatcgccacctgatcgggggagccgaggaagcctgaatacacgccatccagttccacgtcttccttctgccaggcatccaagtaaccggagagaatatccgtggtgtcgtggaacgtgaacactgcatagcgcgtgtgcgccgagaacagggcggtcggcaccgggcacacatcgcagccggcggccgagagaatcggaatcgcggcggtcagcgagcacttgccgtagccgcacatgtcgtgcacggcggccacgcgcggaatatagctcggatcacggtcatacagtgttacatcggtcatgtctgttcgaaccccttcaccatgttggcggaataattcattggcgatgtttgactgtagtcgttcgtcatgtaaaccatgtaaccgggcggcggaaaaaaggaacagacgtcatcaccgagcgggcaaaccgtcttggtgacgggtggaacaagcaatcatcacggacacttgagccatgcgcgaaaggcatggtagcgatatcaccgtgaccgcagtcgaccgtgaaagcgcatgcgtgcggcccggcgtgtcgcgataatttcaacgactttttcgtgacttctgacagtctcccacgtcaatgatcccaaggctttataagcccttataggcaagcccgataacgttcggcttgcgccgcgcggcccaaacgtcgtaacttcataaccaacacctcgccaaccgcccgaacacggcaggcgggtggcaaggaaaaatcctcgcgacctagcacaaccaaggagaaagacccatggccgagaacaacaagaagtaccgttttgagaccctgcagctgcatgtgggccaggagcaggccgacccggccaccgactcccgtgcagtcccgatctacgccaccaccagctacgtcttccacaacttcgaccacgccgaggctcgcttcggtctcgctgacccgggcaacatctacggccgtttgaccaacaccacccagggtgtcttcgaggaccgcatcgccgcccttgaaggtggtaccgctggtctggccgtcgcttccggtgccgctgccgttgaatacgctgtgcgtaatatcacccagtccggtgaccacatcgtcgccgccaagaacatctacggtggaaccttcaacctgctgcgccacaccctgccgcgtgacggcatcaccaccaccttcgtttccgccgagaacccgcaggagttcgaggacgccatccaggagaacaccaagctcgtctacttcgagaccttcggcaacccgaacgctgatctgccggacttcgaggccatctccgaaatcgcccacaagcatcacctgccggtgatcgtggacaacaccttcgccactccgtacctgttccgcccgctggagcacggcgccgacgtggtggtcgagtccgccaccaagttcatcggcggccacggcaccaccctcggcggtgtgatcgtcgaaggcggcaagttcaactgggccgaggtgccgggcaagttcccgaccctgaccgagccggacccctcctaccacggcctgaacttctacgaggctctcggcggcaccgccttcgtgacccgtatccgcgccatcctgctgcgcgacaccggcgccaccctgtccccgttcgccgccttcctgctgctgcagggcaccgaaaccctgtccctgcgcgtcgagcgccacgtccagaacgctctgaaggtcgtcgagtacctgcagaccgtgccggaagtcgagtccgtctcccacccgtccatcccgggccgtccggatcacgacctgtacgagaagtacttcccgaacggagcaggctccatcttcaccttcgatatcaagggcggaaaggatgcggctcgcgtcttcatcgacaatctgcacctgttctctctgcttgccaatgtggccgacgcaaagtccctcgtcatccacccggcttccactacgcactcccaggagaccctggaagagctcgaggaccagggcattcaccagggcaccatccgcctgtccatcggcaccgagaacatcgaggacatcctcgatgacctgaagggcggcttcgaagcccttcgcgcttccggcttggccaagtgaggtcgacaggagggttgacggcccgatgagaaggggcgcgatgctaatggggtgcatcgcgaatcatcgagccgcatggggtgccttccgcctgatcgcttgacccaaggagtagaaagctcgcactgacgtcatgcagtgcgggctttcttgcgtctgtatgcctcacactgtttgcgcagaggcatgaatagtgtgagacctgagacgacataatcctcaaggatgagggccggcgcgtggcccctagcccaattcagtctggcgcacgatggggcgcgccgttatttcttcataagttggaatcgtcatccgggcataaggtccggccaaatatggagaggcattatgaacgtgcagaacccgtccgcatcgcgcggcatcgctattcaggccgtcgacttggtcaagaactacggcaccggcagcaatatggttcacgccctgcgtggcgtgaacgtgagtttcgaacgcggcaaattcaccgccatcatgggcccgtccggctccggcaaatccacgcttatgcacacgctcgccggcctcgactccgccacatccgggcatattcttttcggcggggcagacctgacccgcatggacgacaagcagctcaccttgctacgtcgccacaagatcggcttcatcttccaaagcttcaacctgttgcccatgttcaccgcagagcagaacatcctcatgccgctgactttggccggtgataagcccgaccgtgcctggttcgatctgctcgtagaaaccttgggactcaagcaacggctcaaccatcgtccga

SEQ ID NO: 2765 - DNA, 6504 bp, Unknown
  R36_18m  MAG No. k141_15127
ccatcatcttgcggaaggtgaaccggtatgcacaggccagcagcaccgacccaagaatgatagccaaagcgaagatgaaagcacctgctgccaaggtaccgatccaccccatatctgctatatcgccaaagacaatgaagacgccgccgcatatcaccacgtccaaagcccagagcaggccaaccaccaacagaaaaaggtaccgacctacaacttgtgcagtgcgtgaaacaggaatcagccctcgcatggcactgtgccctgcagattcctcggatgacgcaggccccaatgcactcatacatgccatcgtcgatgccaaacctccgagtccgcccatcagaccactggcaacgtgttcatcgacgtgggtcgatatcatcacgagcgataccacgatagacagcaccgggaaaaccagcagaaataccatattcgccacgctaaacagacccgtcccgacacaatcgaatcgacattgctttactacggatttccagctcatcgtcaccattcccttgaagcaaatatgcgagaggcaattacatacgagattccatatgccacaaccgtcgttgccaataccgcaataaccagccacaatcgttgcgcgatgatggcattcgcggcatgggccaatcctctggtcaccgaagcaggcaaaatagatagcagtatgaatccagccaatacaacgacataaatcaccatcatcgtgacttgaagaccgcctagtttggtccacagataacccgtgggcacgataagcgcgaccatcagcgcggtgcagaaacctcccaacggagccgcccacagattgcccgcgaatgaccaatccggattgaccagcacttgcaacccgtcaatcagaacaatcatcgctatcgacaatacggaaatcaccaatccaaccacatatcgcgcggccacctgactcttcctcgaagccggaataatgccacgaagtcgacatccgttctgtaagtcagcaaccgccatggtcagcacccacatggcgcaggtgaataccgtcatgatgacacccatgcgatagccgaagccatccccataagcttcaccttgaaagatgacggagaacaacggtgccaacaacaacgagaacacagtccgttcgccgacgcacaggtaggccatatcgacgcgcaatgcagtggccaatgcatgttgccgagaccgcgacaccctcagtattgcctccatggccgctcacctcccgctcaagtcacgattggaatcatgggcattggtcagtcgaatgatgtcatcaatggaagccgattcaacgacaagccccgaaaccaccgacgcaacagcatcaagcctgtctgaccggaccagcgcatcgaatccggtggcatacgtatgtgagcccagcaccacgtccgcaggcagttgtgccagttcgtctggaccgcccttaatcaggcggaacgattcctcaaactcgtctttcggaccggtgtagtagagacggccatcggtgatgtaggtaatgaagtcagcagcacgttcgaggtcggcagtgatatgggtgctgaacagtaccgaatgttcgccatcctcaatgtaggcatgcaggatatccatgagttcgtcgcgggcaagcacatcgagtccgctggtcggctcgtcgagaatcagcagcttggcatcatgactcaatgcgatggccagcatcagcttcatctgcatgccgcgggaaagatccttgatatgtttcttgccgttctgtgcgtcaccaagaccgaaagtatccagatacttgcgatagcatccaccgtcccatgatggatacagtggcgcgacgatacgttcaatgttcttgacttgccactgttcatgcatgtagctgaagtcgaacaccacgccgagttgttctttgacgggctcctcgttggcgatgttgtcgaggccgagtacgtgaatcgaaccggcgtcgcggtggatcatgttgaggatgagtttgatgagggtggatttgccggcgccgttcgggccgatcagtcccatgatgtagcccttgggcaggtcgaaggtcacgtcgtccagcgtgaagccggaatcatagtgtttggtgacgtcggtgacctgcaacgccatcgcgtcggattcggatatggcggtcatggccatggtcctttcttgaggttatttcttgcggtattcctcttcgagcatgcggcccaatgcgtccagcggaatgccggcggctttggcgccccggcttgcctcggccaggctttcgcgaatctgggttttgagctgacgttgcatcagttcgttgcccttgtccatcacgaaagtgcctttgccttgaatgttctgtaccacgccctcatcggccagttcgttgtacgccctggtgacggtgagtacggagatgcgcagttccttggcgagctttctcaaggaaggcaaggcctcgcccgccttcaactcgccgctgagcaccgccgaacggatttgggttttgatttgctcgtagatgggttcaccggacacggatgagatgatcagtttcatctatgcccctttcgattgtggttgactagcaccccagctgtttagctgttatacaacacagtataactgttctgcttaactgtcaaggtgtgttacataacagctaaacagtgaacaaacaccttgccaacatacagtgtcgaaacatgggccgcgcctacaatggcctcgggaaggggcacctatgccaaacaacgccgttacgccgacagccccgccagcgggggtgtaatttttttatcacagcacgcgcggagcgtcgtggaagtcgaagaggacgccgtcggccaggtggcagatttcgggccaatcggaggcggaggagtcgtcgtgcatggcccagaccgtcataccgaccgatttggccgacttcatgccgaccagcaggtcctcgaacaccgtgcagtcggccggtgcagcacccaggcgcttggcggcgagcaggtagacgtcgggctggtccttgccgacgtcgttcacatcatcgacggagacgatatcgttgaacagttcgaacatgccgacgtggcgtagcgccggctcacgcagatgcgggggcagcgaggtggcgacacccagtttgacaccggaggctttcagatcgcgcagatagtcaagcgcgccgggtttggcttcgaccgtggtggaataggcgacgctggccatgtcgtcccattcctgcatgagctcttcgggcgtgtctgtaaggccgaagcgtgcgatggtgtattcggcgatctggcggaattgcatggcggaaactttggtcatgtagtcgggcggcacttcgattccgcgcttgttcaggaagtcgatgtcgacttggtcccagactcccatggagtctaggagggtgccgtcgaggtcgaatatggcggctttggtcataggacactttccttcaacagttctcgggcgtggtccagtgaggcttcggattcgctgccggagagcatgcgggcgatttcgtggacgcgggtttcgccgttgacttcggcgatggtggtgaccacgcccaaatcgtcgtcatcggcatccggcggctccttggtgaccacgaactgcgcgtccgcccacgaggcgacctgcgccaagtgggtgacgacgatgacctgcgcgctgcgggccagccgtgccagacgtttgcccagttcgaccgcggccttgccacccacgccggcgtcaacctcgtcgaagatgaaggtctggtcggcaccgccgcgcgtgtcggcggccaccagctccaaggccagcatcagtcggctcagttcaccgcccgaagcgcttttgcccatcggcaactgcggcgacccctcgaacggcgtaaacaggaacgcgatatcgtcgcgaccatacgggccgagcggatcatcggccttgtctcgcggcgtgacgcgcacttccaaagacgcacccaacatagcgagcgagccgagttcttcggtcacgcgcgcacccaagtcggcagcggcagccacgcgcgcggcgctcagcacgtcggcggcggcgagggccgcatcgtacagcgtctgccgttcggattcgagttcggcgaccttttccggcgaggcgtccagatcctccaaatcgaacgccgccttgtcccgccaagcgagcacgtcggccaaggtggggccccaccgacgggtgaggtcgccaagctcgtggatacggccgttgatctggtccagatcctccacgctgccttcgtcgcccagctcctggctcagggcgaacaccacgtcgcccagatcggcattgatggattcgagccgatcggcctgctcggcgaacgtgccgccgacgcgaatcgcgcgcagcgaggtcaccgcatgattgatgagttccacggccgaagcaccgtcggtggcgtccacatccacctgtgaggcgtccagcgcacccagcgccgaacccacgccttgggcgatgtcggccgcgttttcgatgcgttcgcggcacgccttcagctcctcgtcctcccccggctgcgggtcggttcggttgatgcggtcgatggattcgcgcaggtagtcggcctgttggcgggcagaggattcctgcgagcgcaggcgttccagccgctcatccatggcggccagcgcatcccacgccttgcggtaggcggccagttcggcttcgtctccggccacccggtccagaaactcgcgttgccgtgcggcggccgcgattttcagctgatcggtctggccatgaatgatgaccagttcgccggcgatggcccccagcaccgaacgcggtacggacttgccgccgagcacggcccgcgaacgtccggaagcgcgtacggtgcgggaaaggaacagttcgccgtcttcggggtcgacgcccgcgtcgtgggccttggccacggccacggcagcaccggtgaacccgctgtcggcatcgttggtgtcgccggaatattcagatgcgacggcatcatccgcgagcgcgaaaatcgcctgggcccaagcctcgtccgccccggccgagacgcgcgaggattcggcggccccaccggagaccagtcggatcgcggagagcagcatggatttgccggcgccggtctcaccggtgatggcggtcatgcctgcggccggcgcaatggcggcttctcgaatcggccccagattgcggatatcgagttcttcgagcatcaggctcctgccttgccgtcgcgttcgcccggcttgtcgggctcggtaccagcgacaccagcgtcaccggcaacgccagccgcatacgcggccgccgggaacgtgtgcccgtgatgcagcggctggctcgaggcctcgttgcgcgcgtgctcgcgccaaccgaccacgggcagatcgaacttggagaccagacggttggtgaccggcacgccggagagtcgggcgaggcgcaaggtatcgcgcgatacgcgcaccatgacgcgcgtaccctgcggcagggcgcgctggcggcggccatcgcagcaaatccagccttcggacatggattcgtccagaatatcgatggtaaaggtcgaaccggagccgatgatcagcggcctggcgaacagggcgtgcgcggccaacggaatcaactgcagggccttgacgttcggccacatgaccggaccgcccgcggagaaggcgtaggcggtggaaccggtgggcgtggatacgatgacgccgtccgcgccgaacgagttcatctccacatcgtccacgcggatggacagttcgaccatcttgccccggtcggcgcgttccagcgtgatgtcgttcagcgcccaatcctcaatgggcttggtggtgccaggcagccagacgtccacatgggcgatcatgcgttcgtcgatcgaatagtcgtgggtggcgacccggcggatcgcctcgtcgatctggaagctttcgaattcggccaggaagccgacatgccccatgttcacgccgagaatcggcacctgggtgcagtggacgagttcggcggcgcgcagtatcgtgccgtcgccgcccaggaccacgacgatttcggtgtcgtccgatacgcacggcggctgcacgccgaaatcgggggcctcggtgttgtcgatgatggtgacttcgaaaccggccactcgcagctggctcaccgcctcgcccactacggttccggtctgcctgagcctggtatgcgtcaccaccaccgcgttgcgcttggccatggcatcctcctgtcgattcggtcgcactgctcattattctagccgcagacaccgtcatcagtcgtacaggtgttcgaaaaatgctgcttcgtggcgcgtcgccggcaacgttccacagagtcgattatcgtaaggcttcggcatacaatggcgtacagccgcgcaatcaccgtacgcgtgccgtgcgcagcgcgatggcatgccgtatgaccatacagcagtatcagttgaggagcttgaggacccatggccaatgacttcgacgaatcctccgccaatgagga

SEQ ID NO: 2766 - DNA, 3411 bp, Unknown
  R36_18m  MAG No. k141_15424
ggtgcggcgcatgtaacgggcggtaggtagtctgaaggactgtaatgcaaagccgaacaggggagtgaagcatgtcgttggcggtacgagtcatcccgtgcctggacgttgacgccggtcgcgtggtgaagggtgtgcatttcgagaacctcaaggacgcgggtgacccggtggagctggcggccgaatactaccgtcagggagccgacgagatcaccttcctggatgtgaccgcatccagctcccaccgcaacacgatgattgacgtggtctcctgcaccgccgaacaggtgttcatcccaatgactgtgggcggcggcgtacgcacgcccgaggacgtcgactcgctgctgcgctgcggtgcagacaaggtcggtgtcaacacggcggccatcaacgacccgtcgcttatcagccgtgtggccgatcgtttcggcaaccaggtgctggtgctctccgtggatgcccgccgcgaaaagggtgagcagcatacgcagtccggttttgaggtcaccacgatgggcggccgcaaatccaccggtattgatgccatctggtgggtcaagcgcgccgagcagcttggcgccggcgagattctgcttaactcgatggacgccgacggtaccaaggaaggctttgatctcgagatgattcgcgccgtgcgcaaggaagtcaagattccgatcatcgcctccggcggtgccggcaaggtcgaggacttcccgcccgccatcgaagcaggtgccgacgcggtgctggccgcatccgtattccattacggcatcctgaccatcgccgatgtcaaggcggaactcaagaagcacggctacaccgttcgctaaacgaatacaccttgctcccgctggacgaacaatccagtggattgttcgtagcagtgcgctatgcacatgtcgcacataatccgggagctgtcagcgaagctgactgagggtggtccacataaggaagataggtatgacagacactacatacgacaattccactgaactcgatccccgtattgccgcacgcctgaagcgtgacgccaaggggctggtcgccgccgtcatccagcagtacgacacacgcgaggtgctgatggtcggctacatgaacgacgaggcattacgccgtacgctgaccaccggccgcgtgaccttctggtcccggtcccgtcaggaatactggcgcaagggtgatacctccggccatgtgcaatacgtcaagggcgtgtccctggattgcgacggagacgcactgctcgtcgaagtagaccaagtcggtgccgcctgccacaccggcaagcgcagctgcttcctcgaaggcggccccctgtccgtggtcgaaggccatcgcccggccgagcagtagaacgggctttcctgactgggggaagccgagcgaccgcgtactatgaaacaagacatcgagttgtaagcaaaggagcgaatatgagcgaatgcagcgtcaaacacctgaagtggggcgccacctggcccagtcgcgaacagttccacgaactggccgacgccggataccgtgtgattccgattgtgcgccgtctgctcgccgactcgctcaccccggtcggcttctacgagcgtctcgccggcggccgatccggcaccttcatcctcgaatcggcggaatacggcggcacgtggagccgttacagcttcatcggcgtcaactcgatggcccagctgcgctccaacaacggtcaggccgactggctgggcaaggtcccggttggtgtgccagtcaccggtgacgtggtcgaagtcgctcacgccacgttgaagactctgaaggccccgcatgtggaaggcctgccgaacctgaccagcggtctggtcggcacggtcggctgggatgccatccgccactgggaaccgaccctgcgcgccgaagctccggacgagaccggccagcctgagaccgtgctcgccctggccaccgatatcgccgtggtcgaccacgtatccggttcggtgtggctcatcgccaacgcggtgaacgtggatgataaatccacccgcgccgacgtcgcctacaacgaggccgtcgctcgactcgaccagatgcagcacgatgccgccaccccggctccgggcgagtcccgcgtcaacatcttggacgaaacggtcgcccagcctgagctgcgcttccgcaccgagaaaagccactacgagcaggccgtcgaacgcgccaagcagcacatcgtcgacggcgacgtgttccaggtggtcatctcccagcgtctcgacatcgattcgcctgccgacccgttcgacgtgtaccgtgtgttgcgcacgctgaacccgagcccgtacatgtatttcatggcgttgaccgatgctcagggccgcgacttcaacgtgatcggctccagcccggaaaccctcatcaaggtggacaacggccacgcgatgaccttcccgattgccggatcccgccctcgcggcgccacccctgaggaagacgagaaattcgccaaggaattgcttgccgatccgaaggaacgcagcgagcacatcatgctcgtcgacctgtcccgcaacgacctgagcaaggtgtgcgtgccgcagtccgtggaagtcgtgcagctcatggacatcaagcgtttcagccacatcatgcacatctgctcgacggtcaccggcaaggtcgacccctcgctgaccgcattcgatgtgttcaagtccgcgttcccggccggcacgctttccggcgcgccaaagccgcgcgcagtcgaaatcatcgacgagttggaaccggccgaccgcggcatctacggcggcaccgtcggctacttcgatctctctggcaacatggacatggccatcgccatccgcaccgcgttcctgcgcgaccatgaggcgagcgtgcaggccggtgccggcattgtgctcgactccgtgcccgctaccgaatggcaggagacgcgcaacaaggccgaggccagcgtcgagtccatccagagcgccgcccagttgcgcgaactgtaacgttcagcgcatagcgatgcccccgctgacagaagttgtcggcgggggcatcgctgtctgtacgttagtgggtttcgcccatgatgtcggtggcgtcggtttcggtgctcacagcggcttcgatggcagcttcgataccgtgcgccatggtcgcgatcaccataccgggcgtcgcattcttcaccttgccgatcagttgcgcggctgcgtatggacgcatgagcgtcggctgagcccggtcggcatggtgttcgctatgatggacagtcggactttggtaagagacagtattcgtaacaggcaagtaggttattcatggctattgaggtgcagggacttgaaattcagatcggcgcgcgcacgctgcttcaccccaccaacttccatgtggccaagggagaca

SEQ ID NO: 2767 - DNA, 5812 bp, Unknown
  R36_18m  MAG No. k141_15597
aatatcagcacctacgatgtctcctatccccatggaggaacatggcaatatggaaccaccttgtggggcggatgtggagatgtctactccaatttcctccacaattcccgtcggcatcattcctcggttttgaacgccgataatgtatacgcatacagcggcgtcaaggaagcgggaatctgggcctccgcaaggacttacgcggtatgcggcaaagtggatcaagctttctatggatttgatgcttgaatcatttcgcagcatccacaccatttattgaatgtgcggcgagcgaacttcctatcgtccgccgcacaaacacattgttaccgggaataaggtgtatcatgcactggacttataaaatcgccagtatattggccgtggctctcatcactctcgcagcaggattctatgcgcagaataacgaagaaacctatccctccggccctagctacgatattggaatttccgacgcgcacgggcagcctctatcgacattgaccggtctcgcagcgacccatcatgtcgtactcgcgagagtctcctatgagccggacggtcacggtaccaacagacgcgtaatttctattttcggcgcattagacggcaacggcatgcatgcgaattcgccatacccggattatgggttcgggccgcgcacacgtgtgcaacgcggagacagattcaccgacccattgggaagatggcttctctatggatcaccacgggataccgcttcagtagccaaatccatacggcgccaaggattcgaacttaacagagcaacccccatcggcatcacacaaatcaccaaacaattcttctccaattccatcgcccaagtcatattcgccggacttgctgtagtatttgtgtccggcgcgctttccgtgtcgacagcttcacgcgtttgcgcgatacaagccttgcatggcatgagaacaaccggcattattatgaggcaattcctgcggcatgcgttctttttcatcatctgcgtctgcatcggatggatgacttggatttccattggtgcgatcttctggcctttcgcttctcccttaggattcgccggtcaggtattcctctccatcatcatcgccacaacgtgcatggcattggttgccttgtcattgtcgattgctctagtaagggttctggtgccgaacgcactcaaattaatccaaggaaagcgccctttacgttttctcatggtttccggctgcatcatggcaatcatcgttctcgctctcagctctgccagtttgaacgttacgaacttcaaatggcggcaatcccaaacactgaaaacaacattggagcatcaattgtcatccaacgacggattccaattgcaactgtggtatagcagcgatcaaaaccgagcccgttccatgccctcatggaatgacttcgtcgaacaaacttcccaatcagaacatacgcgattcgcctcattccggctaggatgcacgtgggtggatagctcgcaagacccacagccctgcatcctcatggattcccgtacggcaaggcttcatcatcttatacgaaacaacacgacacttgcacgaatcagtgtgattatgcccgagaatgaacaatggaacagcgaatccattacgaacaatgtgcttcgcgcatactcattcgagcaaagtttggcggcagaagagggaaagagtctgcccgccatcaatcgcacgagcatctccattgaatccagaccaagagatgctgtcttatcggcatttgacaccccttccaacaccgatggcctttcctctgttcctgttgttgtcattgacccgtcactgctctctggcgataccactacatcgatggtgtccaccggcggcatgaccttcgattacagctcccgccatcagctgctcgaaatcctacgggaaaagggcgtggactctttggtggcttcggtcgtcaatcggcacgacgagatacaaactcgtttggcacgaacaactcaggaaatgaactatttttccatcacagcttgcatatccataacatgtctgctgggcggcgcaatcatggtggctttgacactatgcacactccgacgtcaaattatgttcgtggaatatatgcatggagcgccgtcatatctccgttttcaatcgatactgttcctagcagcggcgttatgcagtgcatctcttccgatccagttgctcataggaggttacaacgccgtttccacgacctcggtttccttactattcatcgtcgtttcgctggcaaccacagtgctttacgattcgcggctgcgcgccgacagtatcaaacatccctgatcgccatccacaaacctgtatcagcaatcacttaccacgtaaggaacatcaatcatgagcgccttattgatcacgcataatctgacatatcgaatcgacgaccgcaccttatgggaaggactgaacctgacattcagtcccggtgacatggttgccctgaccggagaaagcggatgtggcaaaaccactttgttgaatgtcctaggtcttttggaagagccaagttcaggaacaattacctatgatgggcaaacaattgcctccagaaagggccgacggctcatgcaccgcaacgtcatgggattcatgttccagaattacgccctggtggagcaatggacggtgaacagaaatctgattctggctctgcgcagcgtcggaataccatcggcagatagaagtcggctcatcagacgcgcattgcgagccgtgaatctgacgggctacggcaatagaccgatctacacactcagtggaggcgaacaacaacgagtcgcaatcgcgaggcttctcatccgtcaatcgctgcgcgtcatactggcggacgagccaacagcggccctcgatgccgacaaccgcgccatggtcatgcgtcacctgcgtgatttcgccgacaacggagcgatcgtgatctacacgacgcacaacgaggagaccgcggccctcgccgaccgcatcatcgcattatgattccgccagccactgttcgtacagcgcatcgacggcttcgagcattcgacccatcggctgcgtggaatcgatcaccgcgtcggctatgacacggcgttgttccgagctggactggtggcgaatgcgcgcaagcgcatcatctcgcgtcatgccgcgggtcgacaccattctgtcgacccgtacttgttcgggcgcttcgacggtgacgatatggtcgaatcgcatgggcatggcgtccaggacttccgccaacagcggaacatcatgcacgaccacggcatccggattgtccgcgaccgcctgccgctcccgagacagcgcaagatcatagatcaacggatgctcgatatcgtccagtttcctccgcaaccgttccgagtcgggcccggcgaacacgtgctcggcgatccatcgccggttgagccgcccctgatcggtcagcgcgtcggggccgaaacattccgctatacgacgaagaccgacgccgcccggttccaccactcggcgcgcgagctcgtcatagtcgataagcgccgcgccgagctcccgcagtcttgtggacaccgtgcttttgcccgccgcaataccaccggtcaatcctattcgaatcatgctccccccatcatggccatgtttcgaggttcatgcacacaacggcaaaacccggcccgccgaagcgagaccgggttttgactatacgtcaggcgtcagtcgcccgatggcgaactcacttgccgagcagctggtcgcgcagggcggcgagctgatcggagtcggcgagggtaccggtagccggagcagcggaagagtagttggaggtctcctcgaccggcttctcttccttcgggccctggccgtcggcggctgcggattcggcagcgttctccagctccttggccacgaactccttgtgctcctcccacagctcgtgggcggcggcgtactgggactcccactcctcgcgctgcttctcgtaaccagcgatccactcgttggtgttcgggtcgaagccttcggggtacttgtagttgccctgctcgtcgtactcggccggcatgccgtagatggccggatcgaagtcctcggaagccgggtcgacggagtcgttggcctgcttgagggacagggagatgcggcgacgatcgaggtcgacgtcgatcaccttgacgaacacggcctcgcccggcttgaccacggtctccgggttctcgacgtgacggttggcgagctcggagatgtgcaccaggccctcgatgccgtcctcgacggagatgaagacaccgaactggacgatcttggtgaccttgcccttgacgatctggccgggaacgtgggtgcgagcgaagcgctgccacggatcctcctgagtcgccttcagggacagggagatacgctcacggtcgagatcgacgtcgagcacctcgacggtgaccttgtcgccgaccttgacgacctcggacgggtggtcgatgtgcttccaggacagctcggaaacgtggatcaggccgtcaacaccgcccagatcgacgaaagcgccgaagttgacgatggaggacaccacaccctcacgaatctggcccttcttgagctgggacaggaaggtctcgcggacctcggactgggtctcctcgaggtactggcggcgggacaggaccacgttgttgcggttcttgtcgagctcaaggatcttggccttgatcttctggccgatgtacggggagaggtcgcggacgcgacgcatctcgacgagggaggcaggcaggaagccacgcagaccgatgtcgacgatgaggccgcccttgacggcttcgatgacggtgccctcaacgacgccgtcagcttccttgatcttctcgatgtcgccccaggcgcgctcgtactgggcacgcttcttggacagaatcagacggccttccttgtcttccttggtgacgacaagggcctcgatggcgtcgccgacctcgacgacttcgtcaggatcaacgtccttcttgatggaaagctcgcgggaggggatgacaccctcggtcttgtagccgatgtccaggaggacttcgtcgtgatcgatcttgacgacggtgccctcaaccagatcaccatcatcgaagttcttgatggtggaatcgactgccttgatgaagtcctcttcggtgccgatgtcgttgatggcaaccttggcgacttcagtgttgttctctgccatgtaaatatatggtttctaatagtggatggataatttctcgatattcagttatacgcacacccttacaggcatacggatattcacaatacaagcaactctgcccaaatttcctaggaaactctaggcgtgtcgttcggccatttccacgacgttggccaggagcatggctcgggtcatggggcccacgcctccggggttgggggtgtaggcggaggccttgtcgtagcaggccttgtccacgtcgcccttgatgcggtagcgaccggcttcttcgtcgtagacgcggctgacgcccacgtcgaccagcacggcgccgtccttgatcttgtcgggcgtcacgaatccggccgaacccattgcggcgacgatcacgtcggcgcggcgcatgtggtcggccacatcccgggtaccggtgtggcacaaggtgacggtggcgttgacggcgttgcgcgtgagcatcaggccaatcgtgcggccaatggtgatgccgcggccaagcacgcacacttccttgccgttcagatcaatgtcataggcgtcgagcagctcgagcacaccgcgcggagtgcaaggcagcggtgtcgaaatgtcgccgcgcaca

SEQ ID NO: 2768 - DNA, 23852 bp, Unknown
  R36_18m  MAG No. k141_15829
catctacactttccagcccggctccacccagccgtacggcattgtgccggccgcagccatcgtgttcttcagcttcatcggattcgacgccgtgtcctcttccgccgaggagaccatcaacccgaacaagacgctgccgcgcggcattctgctgtccctggccgtttccaccgtgctctacgtcatcatgaccctgatcatgaccggcgtggtgccctacaaggagttcgccaagtacatcgacgccccggtggccggcgtgattctggagaccggcatgaactggctcgcggtgatcgtgaacctaggcgccctcatcggcatgaccacggtgatgctcgtacagctgtacggccagtcccgtatctgctacgccatgagccgtgacggcctgttcccgaagttcttcggccacgtgcacgagaagtaccgcaccccgttcaagggcacctggttcttcggtctgctgaccgcgttcgccggcggcttcatcaacatcaacgtgctgttcgagctggtgaacatcggtacgctgtccgcgttcatcatcgtgtcggccggtattctatggatgcgcaagacccagccgaatgcgccccgcggcttccgcgcgccgggcgtgccggtcaccccgattctggccatcgtattctgcttcgtgctcatcgccggtctcaactgggagacctgggtgcgtttcgccatctggttcggtctgggcctgatcgtgtacttcggctacagccgcaagcgctccaagctcggccttgagcagaaggccggggctgacaccaaggtcgctgcgactgaggactgaggtctatcggctgaccgatagccgatggctgctttcgtgaaaaccgtacgctgagttactttcagcgtacggtttttgcgatatgaggccatgtcggagaccaccctggaccgtatggtcagaaaaagcgtcgaggaggccttgaacgcgatgcccgctaccagcggtgcatggtccgcttcgagcgcaacgtcctcgccagggtcaacccccgcaaccgcgaaatcagacggcgcacgcgcatggtcggcagcttccccgacgaacgcagcgcgttgatgctcgtctgcgcacgcgtgcgctatgtcacgtcgaacgagtggtcgacgcgccgctacctcgacatgtcaagactcggtgagaccgtatgggaagcgaaccgatcatcgccacagggacgggcgaagaccaaagtgcgcaagatatcgggcactaccccagcgcaagctctcccagggcatcaccgccggtgccgtgaaataccccccccagcagcccggctcaccccagacaaaacgccgtggcgggacgggcctgcgacaggaaaggaagtaagcatcatgctcgacgcattcaccacagcgaaccccgcgccggggctcggacaaggcgccttggatgccgtggccatgaggacccccggccgcacccgctgcatcaacgccgaaaacccggacggcggcaagggccgcgcggccatggcggccagcgcgttgggcccctcccgcaagggaagcccctgcatcagcacggtgaggtccggggaatcggtgacattgatggacgtcgagggccccggcgtgattcgtcacatctggatgacggtaaccgaccgcacctcccccaccggccccgacgtgctacgcaacctgatcctggaattctactgggacggcgaggactccccctcggtgcaatgcccgatcggcgacttcttctgctgcggacacgcccagtcctgcaccatcaactcaattcccgtcatggtcaacccgaaccggggcttcaactgctacttcgccatgccgttcgaacacgcgcgcatcgtgctgcgcaacgaccacaacgaggacgtgcccgcgttcttctaccaaatcgactacaccgaatacgaccggctgccggccgacacgatgcgcttccacgcgcagtggcgccgccaacgcgtcaccgaactcgcccacgactacgtggtgctcgatggcgtcgaaggacacggcacctacgtcggcacctacctggcgctcaccgcgctcgaaagccgctggtggggcgaaggcgaattcaagttctacatcgacggcgacggcaaataccccacctggtgcagcaccggcgccgaggactacttcggcggcgcctggagcttcgccgaattcgacgaacacggccgcatgtacgagcgcaccttcaccggcccatacctcggcttcccgttctactcgcagaacctcgccggacgcgaaagcgcctactgggacactgccacccccgtgacccgcggcctataccgttggcacatccccgacccgatctacttcgagcgagacctgcgcgtcgaatggcagcagatcggcaccgaggaagccggcaacttcgaacgacaggacgacgtggccacggtcgcctactggtaccaaagcgaaccacacaagccattcgccccaatcggcgaccgcgcgttccgccggccacggtgacttcctcgatgcctgtcggccgatggggctccatcggccgacaggcatcgccatgtcttctccattcacctgcgcggtgaatggattggcaacggtgtgttaccccgggattcgactggacgccgccgcacgacgacagcatgacagccgcaagcaccgccacgacgcccccgacccaacgtgttcttctcacacactgattctaccgtcagaaaccgatgacggtgcagaaacgagcacatcagccggcagccacactcaccactcgtggcgctgataggcgattctggtggtgtcgaccggccggtcgagcagctggatcaggccgcaacgggcgaagccggagctttcgagcacgtgctgcatggccttgttattggggtgggtgtcggcgcgcacgttgccgtagtgcttcagggcccacctgatgcagtcgcgggccgcgtggcgcaccagaccggatgcggcgatgcggtggatggtcacataggtgtcgttgtccagccaggcgccgtcgattttggcgtaggtcggatccttgcccgggcacagggcgaactgggccagaatgcgttcgtggccattgcaggtgtcgaccagcagcatcgtacgctggttggcgatgtcgtcttcaatcaccgattcacgcggaaattcgttgccccactgggtggggttgccgttggcggccatcaacgcgcgtgcgcgtgcgtagattttctgcatctgcggcagatcgcgcatggtggcgtggcggaaacggcggcctgtcgccttgtttgcagcgttcgactgagtcacttctcacctctccgacatgccgggttgccggcacggtgaccggcgactaactgacggccaacttaccatgccgtaggcacaagaaatcccgtccgcgttgcatgacggacactaataaacaatggcttccgtccgcaggagccggacagtccagccgagttgaggacagccaccctcagtcggcttcgcccccggctcccgccagcgggagccgaatcagaattgaatcgaatcagacgaatcagacgaccttgcgctcgaacgggtcggagctgatgccttcctcaaggatctgcttggcccattccttggcggcgaacaggctgtggtcgcgatagttgccgcagctcttctcggtggtggcgggcacgtcatcccatgtggccttgtatgcgatgaactccaacgattccttcaacgccttggccacatcctcggtggagtgggtgccccaggtcagcaggtggaagccggtgcggcagccgaacggcgagcagtcgatgtagccgggaatgcgttcacgcagcagcacggcgatggtgtgttcgatggtgtgcaggccgccggtggggatggcctgctcgttcggctgggtcaggcgcagatcgtaattggagatcacgtcgccgtgagggcccgtttcggtgtcgatgtaacgcacgtacggcgccttgaccttggtgtgatcaagctggaatgattcgacgacgggcttttcggccttgtcttctgccatgctgttgcctttctacttgctgagtgttcggtcatgaagtatcgaacagtcatcgtagtcgcgccagcccaagaacgcccgcaaatactccgcgggtcgctataggagattgttatgacgcactcccggcattgaacgaggcgatggtttgcatgaagcgctggccgtagaggtcgagcttgtgttgaccgacgccgttgaccgccagaaattgcgcgttggtaaccggcttgatgcgggccatgtcgcgcaaggtcttgtcggagaacacgatgtacggcggcttgccgatttcctgggcgatggtgcgtcgcagttcgcgtagcttctggaacagcgattcctcgtcatcgtccgggatatacgagcccagcgcatcgccgggaacattggcggaatcggcagtatcagccactcccccgctccgaccggaaccggccgccgccgacttgcgttccacccgtttgatctcatagtggaagtcgggagcggcggtttcggccgcccgcgcaccgaacatgacgattggcatacgcccttcggcgattgacaggtacccgtccgtggccatctggctcaacacgtcgcgcacgcgagcctcgttcacgtccttgagcatgccgaaggtgggcatccgctccgggttcagccatgccagatcctgtgcccgcgaaccgcgcaggatcttgacgatcttgccggaaccgacgcgctgccccacgtcatgcacgcaacggctgatcgcctgcgccacgcgggtcacgtcgatggtctcgaacgtgctttcgcagttcgagcaggcaccgcatctgccggactgcgaagagtccgccgcaatgtcttcacccgccgcggaaccagcattcggcgacaattcctgaccgaaataccgggtcatataccggtgcaggcagtcggtggtgcggcagtagccgaccataccgtccagcagccggcgcttggactggcgaacgatctcctgctcttcgggagtcaatcgctcgttctcataatcgttatccagcaaccgacgccgggtgacgatgtctgactcattccacagcagcgtgcatcggctgggctcgccgtcacggcccgcgcggccggcctcctgatagtaggcttcaatggattcgggtagattgtggtggatgacgtaacgcacgttggacttatcgatgcccatgccgaaggcgttggtggctacgaccaccggcaccttgtcggtgatgaagtcgcgctgggccacctcacgcgcgtccggcgacatgccgccatggtaggcgacggccggatgccccatctggttcagcgtgtcggcgagcgcttcggtggtcttgcgggtggcgcagtagacgatgccggattcgtccggatggtcggccacataccgcgccacccatgcggccttgtatttggtctccagtttgaccacatcaaaatacaggttcggccggtcgaatccggtgacggtgacggccggattccgcaatcccagcagtcccacgatgtcccgacgcacccgttcggtggcggtggcggtgaacgcacccaccggtggacgctgcggcagcccggcgatgaaatcgccgatacctaagtacgacgagcggaagtcctgaccccactgggagacgcagtgggcttcgtccacggcgatcagcgagatcggcgtacgggcggcaaagtcgcggaatcgcccggtttccaagcgttccggggccacgtacagcagtttgatctgcccggcggcggcttgggcgaacaccatcgcctgctcgtcgggagtttgagtggtgttgatgaacgcggccggcagaccgaggtcgttcagcgcatcgacctggtcgcgcatcagggaaatcaagggagatacgaccagagtcacacccgggctgagcgcggcgggaatctggtagcacacggacttgcctgcgccggtgggcatcacgcccaagacatcgtgtccggcaagcaaagcctcgacaattccttgctgtccgggcctaaacgagtcatagccgaagtatcgtgtgagcgcctccagcgccgcctgatgtgctgccataaacgaccagtgtaggccgaccgcggatggatttcatcgtataacggaatacctcgtaacgatgtacgtagcccttccgtattattatgcgtcgaggaacgctattcccggcatatcacacgatatgccgctttgagagaactaagacggggcattttatggccaacaatacattttccttttcctctcctgacgatcaggagacggcggtgctgcagcctgtggccgccgatgggctgttcgcagccgcggccacaggtaccgccacgccacagcaaagcgacaatggcaccaataaccatgccgacaatacagcctatgtgggtgaacatgttatggcatctaccaccgctaaatcacatggcaaggccgcacggattgccatcataaccatatttgcagtgttgcttgccgcattaatagcctatttcttcgtcggacgttggtacttccaagacaaggctgcgcccggtgttcatttgggcaatgtctctgtcatgggccagacccgcgaagaacttgcgaatactgtgaagcagcagctgaataacaccacagtgacgttcaccgccgaaggcaacagcgtcaaagcctcgctgaaggaccttggcgtcaccgtcgacacggataaaaccgtagatgcgctgttgaacgcgaagaccggcgacgtggccaagctcaatattttcgatcagccgcatatcgctctgaccgccaccagagacaaagagactgccgaacaattcgtcaccgccggcctggtcgatgaggccgaccgagcgcagattgccaccgttgtctacaacaagagcaccaagcagttcgattacaccgcgggtcaggatggcaagggcccggatatcaatgttgtcaatgctgcagtcaaggaggccgtcgcgaccccgggcgaaaatgcgacggtgccggtcaagctacagactgcaaagaatccgattgatgacgcgagcgcacagcaaacacagtttgacgccaatgccaagcttggcctcaaactgaccgtggacaacggcgtgaacaagagcgtcaccatcccggccgataccattgcctcattcctcaagcccacggtgaataaggcgggtggcaccatgagtctggtagtcgaccgcgatgccatcaccaagtacgtcaccagtgacagcgtaaccaaggaactgactgttcccaaggtgacacgcgaggtctacatcacgccgaaagacgaaggcggcgtggaaattggtgccgataagacactcggtgtggatggtattgaagtgactggtgccggggacgcccccgaacgtctggctaccgccatcgagcagaaccagtccactgattccactgtggctgtgaaagacagcccatatgatgtcaagcaggtcgaggtgcctcataacttcgatacggcaaatggcgataagtgggttcatgttgatctgacgaaccagactgccactgcatatcagggcaccacggtggtcaagaagttcaacatcgcttctggcaagcccaccgccgatggttccatgctgtccgataccggcacgttctacgtgtatctcaagtacgaatcgcagaccatggttggcgaaggctacaaccagccaggcacgccgtgggtttcctactataacggcggcgaggccctgcacggtgttcctgcatacatgtggggcgagcaccccatctatgtgcagcagggtatcccaggctcgcacggctgcatcaacatgcaggtggccgacgccaagtggatgtacgactttgccaccatcggcactcgtgtggtcgttgatggcaccacaccgacttccggtcaggcgttgcgcccggctggtgcggatgccaccggatggcagggcggcaacgccagctgattcgatccatgtttaatcgataacggaaaatccccgacccttgtgggccggggattttttgtaggtaccaatcgatagcgagtccgccgataagcgtggtggcaccgtcaatacggtgccaccagtaccgtcagtacggtcagatacgatccaatgcctgcttgagatcggcgataaggtcgtcggcgttctcgataccgaccgaaatacgcaccagattggcgggcacctgcagggtggtgccggccacggaggcgtgggtcatggcggcgggcacctcgatgaggctttccacaccgccgagcgattcggccagtgtgaagatctgcgtgtggtccacgaagtgcttggccgcctcggcaccggccgcgagctgcacggagacgatgccgccgaagccgccgtgcatctggcgggcggcgatttcatgacccgggtgggactcgaggcccgggtaccagacgcgctcaatcacatcagagggctgggattcgagccattcggccaccttcagggcgttggcactgtggcgcttgacgcgcagatccagggtcttcaggccgcggatgtccagccaggagtcgaacggggagggcactgcgccggcggcgttctgcaggaaggcgaccttctcacgggtctcctcgtcgttgaccaccacggcaccgccgaccacgtcggagtggccgccgatgtacttggtggtggagtagaccaccacatcggcgccatcggccagcgggtgctgaagggcgggcgaggcgaaggtgttgtcgaccgcgaccttggtgccgtactcgtgggcaacttcggcggtggccgcgatgtcggtgatgttgagcagcgggttggacggggtctcgacccacacatactggtagtgcttggaggccaatgcggtttccacggctttcagatcggtgatgtccaccacgtcgaggcccacaccccacggcacgaacaccttggagagcaggcggtaggtgccaccgtacacatcgttgccgagcaggatgttgtcgccgggcttgatggtggagcgcagcagcacgtcgatggcggccaagcccgaggagaagctcagcgcgtacttgccgccttccacggcggcgagctgctcgtcgaagctggtgcgagtggggttgatggagcgagagtagtcgtggcctcccctgaggcccaacacgccatcctgcttgaaagtggaggtggcgaagatcggcgtgacgaccgcaccggtggtcgggtcgggctcctggccggcgtggatggcgcgagtggcgatgtcggtattagcgaacttggcgttgtattcagcggacatgatattgggttcctttcgggattgttccgtattcgaaggtaaaacaggtgcggttagttagtgcggatgttggtattgattcttttgatagctagttatggagtccatccgcagctccctcatcagagggagttccgttaaggtactgctcggcgagggagggcttgctggtgcgttccacgatgtcgccgtagccgttggcacgcatccagtcgtcattgaagatcttctccagataactgcggccggaatcaggggcgagcaccaccacaatctggttctcgtccaaatcattggcaagcgcgtacttgatggcgctggccacggccatgccggacgagccgccgaccagcaacgcctcctcgccggccagacggcgggtcatttcaaaggcttcggcgtcggatacgcgcacgatgtcgtcggtgatgttccggtcgaaagccttggggtagaagtcctcccccacgccctcgatgtcgtactggtggacttcgtcgcgtgaggaagcggagtagatggagccttccgggtcggagccgatgaccttgaccgcgccgttggaggcttccttgaggtacttgccggtgccggagatggtgccgccggtgccaatgccggccacgaagtgcgtgaccttgtggtccgtagcctcccagatctcggggccggtggtgtagtagtggctcagcgggccgttcgggttgtcgtactggttcgggcggaagccgccgggaatcgtgttggccagtcgttcggcgacctggtagtaggagcgcgggtcgtccgggccggcgtcggtcggtgtgacgatgacttcggcaccgtaggcgcgcagcaccgcgcgcttggattcggaaaccttgtccggcagggtgaaaatcgtgcggtagccgcgctgctgggcgaccagggccaggccgacgccggtgttgcccgaggtgggctcgacgatcacgccgccgggcttcagctggccggactgttcggcggcgtcgatgatgcgctcggcgatgcggtccttggaggagccgccggggttgaagtattcgactttgacggcgatggtggctttgacgccggccgcctgcgggatgtggttgagcttgacgagcggggtgttgccgatgagttctgcgaggctgttgtggatggtcatgtgaagtccttcgttgctggggttgtgggggttttgctgcgttgcgttcgtgaaccgacgttcccagacgaatggactgtggctttggtttgaaaatcgagtattcccgctcactgtacggtgaatccgaaaagtgaaccggtttttcatgttaaccacggctcgcgcattacacgattacgcttgtgccatcggatacatgaaaagtatgcggcagattcgccgcgattcgaatgctccatctcaagttatgcgtcactgaccgctcgcccaggggcgtcggttagcgacaacaacatgagataatctgcatgcctcacaccatagcacaacccgcgacaagcgcgtgtcgccggcggactgaggggagtacgacggcacccgtaactcccctcagcctcactgcattcgacagctcccctcagggaggggagccaaaaagatctataacgaggctgcctcgatgagctgacgggtgtaatcggattgggggttgccgagcacttcggcggtgggacccgtctcttcgacgcgcccgtcgtgaagcacgaggatgcggttggcgatgtgctgcaccacgccgagatcgtgggagaccatgatgatggcggtgctcggccgggcctcacggatagcggcgaaggcgtcgaggatctggatgcgcgcggccacgtcgatggcgctcattggttcgtcggcgaggattaccttgggctcgttgatgatggcgcgggcgatgaccacgcgctgcgcctggccaccagacaggtcgattgggtaccggttcaggaagtccgccggttcaagacccgccatggtcagagccgcgaccacccgctcgtcgatatcggtgttgttcagatcacgtcgctgcagactcagcggttcagccaccgatttggcgacttgccaacgcgggtcgagtgatgagaacgggtcctggaacaccagtcccgattcgcggcgcagggtcgcgaatcccggcgattttcggccgccgacaatggattggctctcgtattccacgctgccggagtccgcggattccaagcccagcataatgcgggtcagcgtggatttgccggatccggagccgccgatcacggccagacattcgccggcgtggacgtcggcggagacgtcgaagaggacttggtggcgtgcggtgcgcggtccgaaggatttggtgatggagtgggcggagaggagtggcacactgctgttactcatgcgaatcctccttgggggtgtggagggtgagggtttgggcggcggcgaccaagcgttgggcttgcggcgtggtcggtgcagcaagcaggtcggcggtgggtccggattcgacgatgcggccggcgtccagcacgtagcagcgggtggtggcacgcgcgagtacggagaaatcatgggtgatgaacagcatggatgcgccggcgtcgtccaccaacgaggtcagcaggtccacgatctgacgttgcgtgatggagtcgagcgcggtggtgggttcgtccgcgatgatgaatcgcggtgaggtgatcagcgccgtggcgatgcccacgcgctgctgttggccgccggacagttcgtgcgggtatgtgccggccacgtcacggtccagtccgaccttgtccagcatggtattcactcgctcagcacgttcggccttggtcagatcgtagtgcagtctcaacggcaacgcaatctgctgcgccacggtcatcaccgggttcagcgcatgggccggattctggaataccgtacccacataccggccgcgcagatcggcaagcgtatgctcgtcggcgtacgcagcggaatcgtggcccgaggtggcaaccctgcgttcaccggcaacatggtgcctatctgccgcgccgcgttcttcgtcagatcctgagtcatcttcctgcccatgccgcgactcggcggtttctccggacaggatggcggtttctcccatcgtgatggtgccggacagcacggcctcgcgcggcaacaggccgagcaatgactcggcgatcatcgatttgccggagccggaggaaccgatcaggccgacccgttcgccgtccgcgatggacagatcgacatccgtgacaatcggtttgccgccgatagcaatattcagcccgtgaatttcaacgctcatcatccgtctccttcggcgctgccactgcggactgcgccgcagtgtcaccggctcccctagccaccggcacaaccgcaccgggcacagtcatctgccgcaacgcgggattagccaccgggtcggtggcgtcgcgcaacgcgtcgccgaacaggttcagcgcgaccaccaccagggtgacgatcagaccgggccacaccaccgtcaacggaaacacgttgatgagtttgaccgaggtggccagcgaatggccccagctcggcacccccgcgccgacgcccacgcccagataggtcaggcccgcctcggccagcaccgaggtgcccgccgacatcgacgattgcaccatcagcaccggcgtgatgttcggcacgatgtgtctgaccagtacgccgaacccgctggcgccgttcgcccgggccgactgcacgtatcccgagcgggcggcgagcagggcggccgggcgggcgacgcgcgccagatgcagcccgtagccgatggagcacgcgccgatcaccacggccgcggatgcgccgaacggcacggcgagcagcagggcgatgagcacggtggggatggagatcagcgcgtcgaccacggcgaccgacgccgaagcgagcgccgaagaacgggcgaccatcagcccgaccagtaggatgccgatggcagccgagcagacaacggtgagcagggcgatggcaaggttcgtgcgcgatccggccatcagccagctcagcacatccgcgccggtgccgtcggtgcccagccaatgcgcggacgacggcttgtcccacacgtggtagccgtcggtggccagcagcgactgcggggtccagaacaacgacaccagggcgacgaccatccacaaccccagcacgatcagcgagtagcggccggtgccacgggaccagatggtgcccagaaccacgcccgaacgacgccatcgaccattgcgatcaaccatcattcctcctttccggcggccagacgcgggtcaagcagcgcgtgcagcagatccaccgtcagaccgatcagcaggaagaacgcggcgagcaggaacagctcgctttgtacggccaccagatcacggttgccgacatcgcccaccagcagggcgcccagaccgggcagggcgaacaggttctccaccaccatcacgccggtgatcatcgaggcgaacgccagccccaccaccgagacgagttgcggagccgccaatcgcaatcccacgcgcatcaacgcctgggtgcgggtcatgccgcaggacatggccatatcgatcggacctccctcatcggcgatgccttccagaatggagcgcgtgtaacgcatgatgcccgcaccggacacgaatccggtggcaagcgccggcaggatcagggacgagaccgcccgcccgggagcgccccacccagcggcggggaacccctgcgagggcagcagaccgacaaggcccacgccccgtgcgaacaggaggatgagcagcaggccgctccacagggccggcacggcgccgcccacgatggacagcacgcgcaggaaaccgcgcacggccggcgaccgggagatcacggcggcggcgcccatggacaagccgagggtgagcgcgatggccagactcatcacgatcagcgggaacgtgatcgtcgcacgttggccgacctgggaggtcaccgcccgcccggtcagcgccgacacgccgaggtcgccgtgcagcagccctccggcccagtcgagatactgcacgacatacggccggtcaaggccgaattcggcgcgcagggccgccacacgcgccggcgatgcgttcatgccggccatcacgaccgccacgtcgcccggcaggatgcgcagcatcgcgaacaccagcaccgagatgccgaacagcgccgccgcgaacagcagcaaacgttgcatcaagaaccgcataacgcctcccttatcgattccctcgccaccgcccgtggcgtcaccggccggatgggccgtccacggtcgggcgcgccacggaatcactcccgcgccgcgcccgaccgatgggttccgggactacttggtgtaggtgatccgccagaggggcagcacggtctggctcaggttctgcgggaagccgtccacgcccttggcgtaggcgatggtgaccttccagctgaacagccagtcggccggcgcgtcctcggagacgatcttcgcggccttggccagatacttcgaggcctcgtcgtcggaggtggcctccagcgccttggcgtacagggcctgcacgtccttgttgtcgtagtggaagtagtagctcggcgtggtccatccgtagaagtcgtggctttcggcatggtccacgagcgaaagatcatagttgccgttggcgtgcacgtcctgcagccaagtggagaactccacgtagttgatcttcaggtcgatgccgatgggcttgagctggctcttgagctggtcgccgagctcggtgccatacacgttggcgtaggtgagggtcaggtccagcggcttcgactcggagtatccggcctgttccatgagcttcttggccttggccacgtcatgcgggtacaggccgctcagatcctcgtaaccgggatcgaccttggggatcggaccgccgaggggggcgtccacgccgccgcgcgaggcgatgatctgcttatggtcgatggcgtatcggatggcctggcggacgcgcttgtcggagagcttgtcgttggccatgttgaaggcgagcacgaacttgtcggaaccgtcaccggacttgaccacatagttcggatccttgcggaacggatcggcaagggtggcggagatgggcgaaagcacctgcacgtcgccgctcttgagggcgttgatgctggcgttctcgtccggcaggaaccggacgatcacgttctcggtcctcgccttgtgctcggtgccccaatacttggggttcgccttgagcacgatcttgtcgttcgggtcgaaggagaccacggtgtacggacccgagcccaacgcgccgttcttctgatcccaggtggcgtccttgtcgtagaccaggccgggacggctggtgaggtaccacagcatgttcgagttgggcgcggagagggtgagcctgaccgtgttggcgtccacggcctcggccttgtccaggctcttgacctgctcgtagtcgtagtacttctgggccttgagctcgttgatggaccacgccacgtcctcggcgtcgagcttgtcgccgttggagaagttcatcttctcgttgaggtggaacgtgtaggtcaggccatccttggagatctcccagctcttggccagaccggggtggaccttgttgtccgagccgcgcgagacgagaccctcgtacacgttgccgatgaggatctgctcaagggccgaacccgactggtggcggatgtcaagattgaccggggcgagtttgaggccgacggccacggtgtcggatcggctggccgagacggaggcgttcgcgtccttgcccttgcctttcccgccgaagacggtgacgcccacgatgagcgccgcggccacgacgaccgcgatcagcgtccacagccaccatttcgggccgccgttcttcttgtttgatgatttcgcgcgcgcgttcaggctcgcgtcggtgctggcagcttgattcgcgccgtcgatgttcctgtcttcggttgcgccggactcgccgtgcacaccattgttctgggacatggatactccctgatgcattcgggcatgcttacgcccgaatatggtttcgttgttatcttgcgtggttgaccgcccattcgggtcgatcaccacgttctactatatccccggacacgccggaggcaatggctatactggattgcggcgccgacggagggtccgcggcgaccacaacacgcggcgcatcgtcgggcaacgacgcgggaagcgctggcgtgggcacacgtgcggccttggcataaggccgggaggcagctatggcacatattcttctgggcgtcaccggcagcatcgccgcgttcaaggcctgtcatctggcatccgattggaccaaggccggccacgaggtgcgggttatcgaaaccacagcggccgaaggcttcgtcactcccctgacattcacctcactgacccatcaacccacccgtaccacgatgttccccgcttatccggccgcgcacggcgacgtgacggccaatccgaccgtgccaacgaccatcaatcatgtggccgatgcggcctgggccaatctgctggtggtggccccggcgagcgccgacgtcatcgcccgcatcgcctgtggattggcgaacgatacgctgacgtccaccattctggcctatgaggggccgaagatcctatgcccggcgatgaacgtgcatatgtacaacaatccggccacgcagcgcaatctgaaaacctgcgccgaattgggctggcagattgtggagccggaggaaggcaatctggcttgcggcgacgtgggacgaggccgtatggaagagccggcgcgcatcgaggaagtggccgctcggctgctggcggatgcgcaggatgaccaggctccctcatcttccccgctcaaggggctgcgcgtgctggtcactgccgggccaacgcaggagccgctagacccggtccgctatctgacgaaccattccaccggcaagatggggtatgcgattgcctcggccgcagccgaatttggtgccgacgtaacgttggtctccggtccagtcgccttgaccgcgcccgatgcggtggatgtggtgcgcgtcatgaccgcgcaggatatgttcgatgcggtggccgacgccttcccggcggcggatatcacgattatggccgccgccgtgggcgatttccgcgtggccgagattgcgccggagaaaatcaagaaggccggccgcagcaacatcaccgtggagctggtttccaacccggatattctggcgtgggccggcgaacgcaagcgcgacgacggctcgcagatcctgtgcggattcgcgatggagaccgagcatctgattcgtaatgcgaagaagaagctgacgtccaagcattgcgacatgctggtggccaacaatctgcgcgacgccggtgccgggttcggcaccgacaccaacgttgtcaccgtgctcacgtccggagcggaggatgccggcaccccgaagatcgagcattgggacaagatggacaaaaccgtgcttgcgcaacgactgttgctgcggctcgcagcgttgcgttccggcggcgcgagcaatgtcgatgacgagaaccaggaggcctgacccatgctgatggcggtcgatatcggcaatacgaatatcgtgatcggttttctggaggtcgaccgcatcgtcggctcctaccgcatcaccaccaaggcgacgcacacctcagacgaatacggtctgatgatcacgcagttcctggctttgagcgattacacggccgacgatgtggacgatgtgatcgtctgctcggtggtgccgaaggtgatgtattccttccgcgcctcgctgatcaaattcctcggattggaaccgatggtggtgggccctggcgtcaagaccggcatgaacattcgtctcgacgaccccaaaaccttgggctctgactgcatcgccgactgcgccggcgcctaccacacctatggcggcccggtgctggtggccgacttcggcaccgccaccacgttcaactatgtggacggttccggcacgattcgctccggcttcatcaccacgggcatccgcaccggggccgaggcgttgtgggggcagaccgcccagctgccggaagtggagatcacgcaaccgcagtcgattctggccaccaatacgcgcactgctatgcaggccggactgtattacacgttcctcggtggcattgagcgcacgattcagcagttccgcaaggaaatcgatgagccgttccaagtggtagccacgggagggctcagccgcattttcaagaacgacaccgacatgatcgacgtctacgattcagacctgatcttcaaaggcatggcatacatctactcgcgcaatgtgaagtaacgcggtgggcaggcatcggccgcgcatagcgcagtcgattccgtccctccccgaaaaacctactcaaaaccctacttaatcgtaaagccctgattgaggccgtattctcggaggtctttctgccatcgggccaggccgtcggagagactgactttcttgccgggcttctccaatggttcgagcgggttgccttcctcgtccttcatgcccatctcaatggcttcctgtcgctgctgataggcgtggaaactgccggaccactcgtatgcctggcccaccgtcgatttgaagtcactgcgcgcatacacttcgaatggcagatactggtatccgaccgacacatcctcggcggcctccgacagtacccggttgaacttctgcccgccgaaatacgggatttcaatgccacggtcattggtaatcgtggttttatccagaaaatcagcggaattcagggtggcgtaatcggccgggaaggcaccgccgtctacacgcgcgctaatgccttgggcgtcatgcgccacaaagtccacgaaacgataggccgcatccggcttacgggtcagttgcaacacggtcagcgccgagccgccattttcggcgttggcaggctgcccaccataggtgggcatgggagccacgcgccacagaccggccgcgcccggcacattggacagcagcaacgacggcatccaagccccagagaacacggaggcgatggtgccggtgcccactctgcttttccaccgatccgaccatgtggcggaggtggtgtcaacaagcccctcatcgatcattttctgccagaattcggtgaaccgttgggtgccggcatcctcatccaaatcgatggtcacggttttgccgtcggccgacgtgtggaacggctgaccaccggcgagccagaccatcgcgtcatagaaactgccgtcgcccgagtcggcggcgatatacgcgccgatctccttgagcttttcggcggcctcgtaatagtcatcccaagtcttgatcttggtggcgtccacgccggcttggcggaacacgtcttcgttgtagaagaagcccatcgggcccgaatccatgggcagtccataggtacggccggcgagctgcacggacgaccatgtgccgagggtaaagaagttggaataatccgagccgattttgtcggtcagatcaagcaattggccggagaccgcgtactgcaacagtgcatagtattcgatttgagccacgtccggcgtgccgtaaccgtcttgaatggcggtattaagattgccgtagccggagatattggtccatttcacgcggatgtccggattggctttttcgaaacggcggatgacctcccccatgctcggttcccagctccatacgctgatctccgtacggttgtcgtccgtggcctgcccgcacgaggccagggatacggaaaggatggcagtcactgctatggttgccattcttttgattcgctgtccgatcactcgcatggtgacgagtgtactaggcggggcttaaaacggtaaaagccccgtgacgggattcgtcacggggctttgtgtatcgaacggggtcgcgccggcggccccttcgcgattgcgaatcaccacgtgcggcgcgttgacgccgaacaaacgttcacccaacagtacgagcgggtaatcgccctccaaagctgcgatatcgtcaaccgtcatcatcagagggcttaagatgagcccatccgcgctgtgcgtgcccatcgatgcgatgctttccagcttgcgggcacgattgttggtggtggattccacgatgacgccatagccatgttgccgggcctcggccagaatatcctcggcgagttcggagaaatacacctgccgcagatcgggaatgaccagcttgagcaaccaggtgcgcccggaacgcaggtttctggccgacgagttgactttgtatccgagcctgtcgatggcttccgcaatacgcgcggccatcgcctcgctcatatatggctgtttgttcagaaaattagacaccgaggctaccgaaacaccggcctcatgggccacgtccgccatcgtcactctgtttttgcctcgcacggtgaccaccctacccgactttgctggagatacgaaaacgactcccctgctacgatgagcagcaagggagccgttgggtaattaggcgctatgcgcgttttacagcttgacgacgagtacgccgttgggctggatggcggccgtgtgctcggactcgttgacctgggccagcgaggcgaccagcggttcgccttccacgtccacgaccgcaacatcgtgggtgcggttgaacaggaacacgaagtggttctcgccagtttcgtccgcacgctcgacgcgcagcacttcaccgcgatcgtcctcagccgaagtctcgatgccgagttcctccagcagcacgggcaggctcttggccaaaccctcacggccgagacgggcaccgacgtatgcggccttgccgtcgccgaagtcgttgacggtgatggcgggagcgccgtcgaaaccggtccacttatccgccttgaaggaggcgaccacgtgagcggtatcggccacggaggtgatcacgtcggcgaaatcgtgcgccacggttccgttgtccaagtcaaggtggtccatggcaccggggaaatcgttgcccatcggggcgaattcctcaacgcgcacacccaccacgtcacggatggaaccggggtagccacccagccagacgtgatccttgtcgtccaccagaccggtgtagtaggtcacgaacagcttgccgccgttcgccacatactcgcgcacgcggcgcgtggtctcttcggacaggatggtcaggctcggcagcacgacggcttcgtactcgtcccaagggccgcgaaccggcaccacgtctgcggtcagaccgttgtccgccagcgcgcggaaccacgcgaacggctcgctacaatggcgcacctcctgagtaggcgtggcggtgtgttccgtagcccattgggactcgtaatcgaagacgacggcgaccttggacttgaccagcttggtgctcagcaggccctcgtcagcaagcttgttgaggtcggcacccagctcgcacacatcgcggaagatctgggagtcggggcccgcgtgaggaaccatcgaagagtgccacttctcggcaccggccttggactggcgccactggaagtagcagatggcgtcggagcccatggccaagtgagccagggagtcgcgcaccaattcgccgggttcgacgcgatagttgatcgggcgccaattgacggcggaggtggagtgctccatgaggaaccacggattcttgcgggcgatgccgtcgcacagggaggccgagtaagccagctcgtcgaagtgagcttcgccaggcgtgaagtagtgatcgttggacacgaagtccacgtcgtaaccccacttgtcgtaatcgatgacggcaccgccggcggagaccatgaagttggtggtctgcggcttgggggcgatctcgagcagggcatcgcgctcggccttgtaaaagtcgagcagggcgtcggagctgaaacgcttccagtcaagcagtttgcccgggttcatgaagttgccatcgccgatgaagcgcggcgggatgatctcggagaaattgttcatgcgctgcgcccagaaggcggtgccccaggcgtcgttgacggcgtcgatggtgccgtacttcttctcgcaccacttctggaaggcgcgctcggcgtcttcggaatagtcgaagcggttgtggcagccgtactcgttgctcacatgccaagagaccacataggggttgtccttgtagtgctcggccatcttgcggcacaggttgagcgcgtagtcaaggaagaccgggctggtggcgcgccagtgctggcgggcaccgggctggcagacgtcgccgcggtagtcgacccagaggatctccgggtgggcctgggtcatccacatcggcggggatgcggtgccggaggcgagatcgacggcgatgccggccttgccgagcttgtcgatgacgcggtcgagccaatcgaagtcgtacacgccttcttcgggctcaagcttggcccaggagaagatggctacggagacgaggttgacgccggcctgctgcatgagggctacatcttcgtcccacacttcctcaggccattggtcggggttgtaatcgccgccgtaccagatgcggggcttgttgcccgcaagcggctgcggccacttgaactctttacgttccatgatgattcagctcctttattgaattttatcgataatctgcgtccgcgggaataaacagcccacagggctgtttgcctaacggctcagctcgtcagagggggggcttggcactattttacctccctctgatgaggaaggttgtctcggcggagccgggacggagggagggaccccgccgcgaggcggtgaagacaccgcgtcggcggagccgactccatcactccttgacggcgcctgcggcgagtccggactgccagtacttctgcaggcacaggaacgcgatcaccagggggatgatcgtgatcagggagcccgtgatcaccaggttctggatcgcctggccgcccgcggtcgaggcctggtccttccactggttcaggccgatggtcagcgggtaccagtccgcgtccttgagcatgatcaacggcaggaagtagttgttccacgtcgccacgatcgtgaacaacgccgtcgtcacgatgttcccgatactggccaacaacacgctgggggcgagcacgtcgatgtccgtgcccaggaaatcgttcaacgaacccaccaggccgtacttcgcgccatacacgaaaccccagatcaacgtcgacaccaccgccggcaccgcgtagggcaggaacgtcgagatacggaagaacctcgtgccatgcagcttcatcgaatccaacgccagggccatcaaagccgacaggcacagcatgatcggcacctgcacgcacgtgaacagggccacacgaccaacactgctccagaactggccatcacccaacaggcgcgcgtagttctcgaagccgacgaacttggtgccgccgatcatctgcttcttgaagaacgaaatataaacggcgtacacgatcggcacgatgaacacgaacacgaacacca

SEQ ID NO: 2769 - DNA, 10638 bp, Unknown
  R36_18m  MAG No. k141_15958
gtcgcgggtggcgttgtccgccaccttcccgtccgtgtccttgagggtctggctcgcgccgtcgataccctgcttgagctggctcttggcgtcgtccagctccttcgccagcttgctgtccttgacggccttgagcgcggcgttgagcgtcttcgcttgggcgttggcctcgtccgcgtccgtggcattggccttcttcgcggaggcgagctgccacgccagccactcgctgggggcgtcgttggggatgcccttgagcgccttggccttcctgatggcggcgtcgagcttgcccagcagcttcggctccttgagctgatccgccttatattcggtcgccgtggcctcgtccacggccttcgagagcgccttgtcggcgttctcggcttgggctaccgcctcatggtaggcgttgtcctcgtggtgcgtccagtaggcgtagccgccgccgatacccgccagcgccacgaccaccaccgcgacgatgacggcggtgagcttgatggatttagcgtccctctctggcttgaattcgctaacaggattttgcattactttctccgtctctttgattgggtttacgcggctcattgcaaaccctcaagattcatagatcaaagggcttagatgcatgatgtcatcgtcggtggtgaaaaaatgaaggctcagctacctatacggcaccaaacggggcatgccgttgatgacaatacgcggtttgtcgatgaatttgttggttacccaagtgcctcgatcatccagtgtctcgaattcggggctgtagacattcggcgggtaataaacgtatctctttccctcgtcatccatccaagtctttgatccattgctcagggtctggaaagtgcccttggccattggatgcgattcgatgccgcctccgggcaacaggtcgattagcgtgcagtccccgttcaaggtgctgcctccgccggcatttcctgctggtccccaactcccggcgaaagccgagcatggtgttgagttggcttgggcgctttcgcttaccgcgttcatggcgtcatccagttgcttggatgcgtcggcgatgccgtttgcgtccttgccgtccttggccttgttcgcgttgccaatggcggtctgcaatgcggatcttttatcggagtcggcgtccgaaccattgctattgagcaggtcctgcgcctgcttgaccttatcgtccaacgccgtggaagcatcgacgagcgttttcgcttccctggcatctgatatggctttggccgccttctgcaaagtgcgtgttttcttcgtcagcgtcttggccccgcgatccgcctggctggcgttacggtcaagctcattcgttggcattgacgttcggcaccctgggatattgatgtcctgggggatatccttctcggcttcggcataggcgtcgattagcttctggtcgcccacgtcgtcaatggtgagtttcgacgtatcggcgttgtcggagaccgtcttcctgatgctggcggcggcatccgcatatcggcctaccgacgattcgcatgcggcgaaggccttgccgtgcatggagcgcataatccaccagccgcccactccgcctccaagcgccagcacgacggcgaccgccacggcaacgataatccatatacgcttcttacgcttgggcacgacgggcgattccggcctgccattatcgcccaccggcggagacacaagcgtctcactgttgatgtcgccgcccatatcagcggccttcgccccgcagttcatgcagaatacggcgccttgcggcagttgcgcaccgcaatagctgcacaccatcatcgatgctcctcttcttcgatattctccggcgtcattatttatcggcagcttccatcggaacattggggtccgtcatagccctccggcgcgaaatacgactcccacgcattggcgtcgattccatcggaaactgcgtgcagcagcatgccattgggcgatgcgccgctggggaccagctcgaacttcaccacgctggaggggaaagcgtcgcatgccgcacgttcctcggacgaagtctgagacgcatcgtaggcgcatttgcccacacccgtccaggcataccgcccattggccttctgtttgaacgaatccctgtcataggagccagcttgccattggccttggtgcatggaggaagccgtgctgcagtcggccttcaacgtgtaggtgccgaaggccgaccccaacgttcggtagtcaccggcccaggcggcgcaccgattcgattcgtctttcccgggcagcgcatccgtcgaatacgtggacgcgaatgtggaagagatctgttcgacaatttggtcaccggccgccttctggctcgtggggtaggtgaattccaccgtccgcagtacatccggggcataaagctggtgcaggtaggtgatcgtaccgttctcctcccagctggcgacgaattctcccggcatcaccgccttgtaggagtatttcggatcatcgacatcgaacacatcctccatggccccgttggtcacgttgaacgatccccacgtcgtgatggtcatgcccagctggtcattggtgaacttacggccatcgccgttgtcggattccggctgccacgcgaaatcctccggtacatcaatcgcaaaagcgaaccgcgcattcgtgtagtgcttggtcttcggccgattggtctcgtcgttccggatcgtattatcgttgtcgccgtccgatttcttggccgcatccgtctccttcttggttgtgttcgtctttttatgttccttgatattgatatggctggctgcaacgcccttgccattgtccggccccatgatggccacaccaatagccgcgctggccgccaccacgcagactgcaaccgctgcggcaatcatcggccagaccgagaccctgtgcctgacccgattgccgcattccgtgcaaaacaggtcctcgggtttcaatggccgtccgcattgccggcacaaacgtgcttttgtcatgacacaacaccccgcagatacccgtatcctccaaaatcgatgcgatcataccccagagaaaagccgtcatctggaatctgggcgaacagtggagactgtatgcccttcggatagaacgtcgcatcggaagcatatgagtcattggaaatgcgccatgaatacgtcccatcggcattgcgacggaaagaaccgggcacgtaattcgccacgattccgccatataatcgcgcgtaaccacaatccgcgtgcaaggtgagaaagtcatcgccctgatacagggaatactcatccgcgaaagcggcacagcgcgtcagatcggcgacggtcttcctcctgacgccgtgggtctcgccgttcctgccgtcctccggtacgtccccggtttcatcggcggtctcgtcggacatcgttcctcccggtctgtcgttctgctcttccgagtccatcatagacaacgggatactacatttatgtagtaatcatatataatactacatttatgaagtaatcatatatgcagtggtgcgcttgggtggaaccatgcacgagcgcatatccgacgaactcacctggcggcagtacgccaaggggctcggcatacgcctgcgccgcctgcgcgaccaacgtggcctcagccaggagcgcgtggcctcggacgccggactctccacggtgcagtaccagcggcttgaatcgggaggtttcgccgggcccacgcccaaccccacctccaagaccctgatcgccatcgcccagatcctcgacgtcaccatcgacgaactcctacccccgccatggcccgacctacgcacgaagtgatgtgtcacgaagcgtccccatgtgctagaatcggcatcgtttaaggttcacatagccgccttggacatgaaaaacccaatgattccaagccttgcgaaacctcggcatgtagcccggtggactgttcgttcacgccgcctggccgaggccgataggacatgaccaggtaatgatgagtccggcgaagccggtccttgattgctgggggtgtgaaatagtccttgttaagcccctcaaaattgagggggctgagccgtaaaacaaacagcccgatgggctgtttgtaggcgaaggcgagacgagagtcgagccagaagaatgcgagcggcagcttgtccgtaattgcggtcgagctgtccgtgtagcggactgaggggagttaccggcacacctcagccatcctctctgtaaactcatccaaaaaacgtcccgaatccgcaccaagtgccacatgcacatgcggcatggaatgattcaccagcccaaccgggtctccggtggtccggcctcgtactccattgaaatcaccggtattggtctccgcgcgcaacgcaagatcaaaacaatcgaccagtgaagaatcaagtgcaaccgccgccgccaacggatcatgcaacggcatgccgccagagaacagtgcggggtcggcttccaaatttgccttgatggaaaagtccgcgagatcagccaagaaccgcccgcgcttggtccccgtcgcacgccactggtcggccgccgatcgcggtagcaaacactggtgagtcacatcaagtcccaccattgtgatgtctgcgccggaatgaaatacacgattcgcggcctcagggtcttggatgatattcgtctcggccaccgcatcccaacaattgccgggttgggtaagcgtaccgcccatcatcaccagcctgagtttcggtgcaatatccggtgcccgagtaatagccgcatccacatccgtcaacggcccggtagccagcacggtaacgtctcggccaaactcacgaacctgctcaatcagatactcaatcccatccgcagcatcaacggagcgcctccttttgccccagctggcgagagctgtcgatgtagccgactggggacggtccacaggccgagagcgacccacacgagaacaagaccccgacgccggatgagcatgagcgtcccctaccaaatacccgccaacagaaacaaccccatcgggcacatcctcagacatgtcatccccagacatatcatcaccaggcacaccagctccatcagccagagccccggcccctgccagccaagtattccccagtccatccttcccatgaaactgggcacaccctgcatcgggaataaacgcatcagcccaagaaggatgctcggagcccaaaaacaccggaatatccgcccggccaaacaaatcaagcaccgcgcaagtattggcataagccgtgttcgcatccacattgccataactggcgatcacaccgctcagttcgcactcatccgccgaccccaacaaatacgccaacgccaacgcatcatcaacaccggtatccatgctggcaataatgcggtcaggacgttgggccatggaatcgcctccttgttagcatgattcgctatgaataaccttatcggccgatacgcaaaaatgcgtcctttcctcatgggaaggacgcatttttgcgtagattcaaactcggaatatcggaaattacttgccgaggaattcgtcggtgccaaggtccttggcctgcggggcctcatgaatcaccttgtcatgactgtcagtgtaggcgtcttcttcagccaggaagtcgaagtattcctgagtgcccttgaagtcgttggtgccgagcacgaaagagccgtccttgatcttggccggatcgccccagtactggccgtcgacgataacctgcatgctcttcttgacgaattcgggcttgaggttggcgtcaggggcttcgtccacgagaatctgcgcggcgtcatccgggttggcgtacgcgtactcgtaacccttctgagtggcctgagtgaacttcttgaccaggtcgggatggttcttgatggtcttgtcgttggtgatgatgccgatggcgtcggcgttgccgggcacgccgtagtcaggctcggtgaagcagttgagcttcgggccgtacatgtcggcctgcacgccttcccacgtggcgtagaagccgccgaaatcggccttgccggattccatggtctggaaggtggaggtgccgacggtcaccttgtcgaactcgcccttgccgccgtcggtctggatcatgcggcgcaccacggcgtcggactcgttggagccgaaggtggcgaaggtcttgccatccaaatccttaggggacttgatggcggtgttggacgccagtgcgcaccaaatggcgctcggcttctgctgcacctgcagcacctgcttgatgtgagcgcccttcagcgtgtagatgcccacattggtcaagttggacagggcgaagtcggccacaccgttgttcacggcctgttcggcaccggcctgggccacggccacgatatccacgtcaagaccggcgtccttgaagtagcccttgttcttggccacgtacacgccgatgtggttggtatcgggcgcccaggaaagcatgaaagtgaccttcttgaggtcggaggtgttggagttggaggagtcggcggtgttggtctgaccacatgcggcgaaaccgaaagtcatagcaagggcgcccacgagggcagcggccttggatacaaggcttttcttcataatgatggttccctaattcgttgtctctctatcgttctctgggattgcttcgaacggaagtcggcagaaaacgatatggagggccttgatttccgttcgaccagcgcccccgacattccctatgaaagctcaagaaagccggtttgccacacgctggtaaagctgttccattatagagacagggctggagacctcatgagaagccgccccgttcagtcggttctggccgccggcttgtgtctttgacggtaaaaagaactactggtccgcgtcggggtcttcgtcatcgccggccgggccgagcaggatgcgctcgctggcgttcaccgccagcatcagtacgcatgtcatcaggataatgacgatggtggcggagaagatcagcggcgtgcggaacgaattgtaggcagcctgcagccagatgccgaggcccttgcgcgcgccaagatattcagcggtggatgccgtggcgaagatgtatgcggcagatacgcggataccgccatagatctgacgtgcggcaacgcgcagcttcacgtgccagagcgtccagaccggggtcgcgccgcaggtcaatgcgacgtcggaatagaactggggcaccgcttctagtccgcgcacggtctgcacggcgatggggaagaggccgaataccgccacgattacgattttgccggaaatctcaaagccgaaccaaatcaggaacaacggggcgatggaaatcagcggcatggtttgtgcggcggcaagcagcggatagaacgccgcgttgaacgtgtgcgagcagtacagtgcgatgccgatcataatgccgaagaacacggcaaacaggaatccaaccacgccctcatagccggtgattgccgcggccgggccgagcgtgttccatgtttcgatggtggcggcgaaaatctcgcttggcgcggagatcatcgtgggggagacatgtcctagatccacccacgtttcccagactgccagcaatacgatgacggcgatgacggtgggcatgcggcgcttgaggcgcttggcgatggacatgggatgtcaccttgctttccgcgccagtccggtttgctggtggcgcttgcggccggggcgtggaacagtaaggtgaggagcctgcgcgcctgccggtcgtgtgatggattgtgttatatgccgtccatcagtataggcgaaggcgaacgacaggggcacacaaaaaacctccctctgtgagggaggtgagagagctactccagtccgatggacttcatgtggtggagcttcagggaatccaccttgagactaccggactcggcggcgagcttgatggcacgcgggccttcggaggcgtaggagtaggagctcagcacctggtggccaccgttgacgtagacctccacggagccgcgatccacgaacacgcgcaggtccagcttgccggaggccagttcggtgtcggtcagtggggcggcgcggtagccgtgatcgccgttggccatggcctggcgatccaccaccacgcggccgatctggtcgtcataagccacgtaggtgtaggcaccgtcttcggtggcgtgaatcttcaggccggcacgatcggcagtggaggcagccaagtcgatggtcatttcgatttccacggcctcggcgtcatcggcgatgacctgctcgccatccatatcgagcgtgatcgaaccatggtcgagggtatcctcgcgcaggccttccatttcggcgaccggcgcggtgaccacgtcgccgtcatcgccaagggtgatctcgcgcggcagggtgagctgaccacaccagccgtcatcctccatgggaatcggctgcacgaacgggctcatccagccatagacgatctgacggccgtccacgttgaaggactgtggggcgtagtagttgtggccgcaatcccacaggcggaactcggtttccggcttgaattcgccgcccggctcccacgtgccgatcatgtagccggcgttgttgacgttgcggttcatgaagccgctgggcttggaccccatggcggagaagccaatgacccacttctcgttgccgtccttgtctttgatggggaagaagtcggggcattcgagcatgaacacatccggatccgggtgctggaagagcacgcgctcgtattcccagcggaccatgtccttggaggagaacagccacatctggccgcgcttgtccgcagaggagacaccgaaggtcatgtaccaggtgtcgccggtcttccagaccttcgggtcgcggtagtggtgatccaccttgtcggtcgggcagtcgatgatcatgccctgcttggtggcgctggtgagctcgtcattgtccggcagcgcggtcatctgcacctgccagtcgccgccggtgttgtcgtggccgttggcccaacggtggccggtgtagtagaacttgagcttgccatcgtcgccgattactgcggaaccggagaatacgccgtccttctcctcttcaagggtcggggcgaacatgattggctcacgcttccagttgagcatgtcggtggaggagacgtgtccccagtgcatcgggccccactgggtgccgtacgggtgcagctggtagaacacgtgccagcggcccttgtagaagcacaggccgttcgggtcgttgatccagccgccgttggatgcgatgtggaacttcgggtaccagcggttgttgcgttcggcggccatctcggccacgccggcttcggcttttgccagttcagcagcgtggtcgcggatgggggtgagaacaggggtttcgggagtgaagtcagtcatggtgtgtcctttcaggccttggcagcttccatctgacgcagctgcttgtcggtgtagaaggtgttggtcaggagcatgaagacgatgagcacccacagggtcggcatcttgagcacgccgaccatctccttgaaggaggggttggtcttctcggcgttcggatcggcttccttcttgagctcttccttctgctcggccggaacccagaacaggtagatgagcagcatgccgacgccgcaggcggtgccgatccagaagttgatcatcgggctgatgttgaacaggaagccggcgctcagggccacgatggcgtagctgaaggagccccaggcgcgggactggccgtattcgaagttgaacttacgggagtagcgttcggtgacagcctcggacagggagcaggctgccatgaagccggcggacaggacgatggagccaatcagtgcaccagcccagcgggtgacgcctccggcgttgatcatcggggcgtagacgaactggacaaaggggttgcgggccgcgccgaacctatagggccatccgcttccacttgcggatcttcgtcctgaacgatccgaacggggcgacggtgttcacatgaatgaacctgtacacttcccataccgccgttttggtggcgtcgtcggcccattgcctcatatgcggcttgaacagctcgtcctcgctcatcgcatcgatcatcatatatatggcgtcgacgttgtcggtcaacatgccctccagctcccgcagcgaaaggtgggcgtaggtgtcgttgaaccaccggtacagctttccgagctggttccacttgaactcatccgacggtgttcgcaccggaaggcccctccgctcgcgatcctcccactgcagcagcagggtggtccaaccgacctgataggcgaggttttccgccggggtcctctcgacctcgtcgatgcgcttgtctttcagggcttccggaatatcgtcgaactccgcaatgtatttgcggaacgccgcactgatctcctctttgagctcctgcgcgttctcgtatgttctcaccatgcacctcccggtcgccgtgcgtcgctgtgacgatgcgggcatcgtatcagtccggcggatgtcgtgacgtcatcggcgtgtcgtacccgttcgagacgcaaaaaggcctccgtgctgaacggaggccttgagaaatcgcgtgggcctcgtttacttcacctaggccttttcgatcagcgtgcagtggatcttcgccgga

SEQ ID NO: 2770 - DNA, 13333 bp, Unknown
  R36_18m  MAG No. k141_15961
ccggaacagccccttttagcggtagcagtcagcagactgatttagtcatcggtgctggcttgccagcgctgattggcgcgtgcggagaccgccgtccgaaggcgaggggcgtacgaaggtacgtcgaacctgaggaaaggcggtatacgctccgccaatcagtgctggttgttgagacggtggtacatctcggacagctccagttccttctcgaactggcgagcggtggtgttctcgtcgatgacggcgagctcaacaccggcgatgcgggcgaagtcttcccaagcctcacgaccgacggaggtggtcatgcaggtgtggtgagaaccaccggcggtgatccagcactcaacggcggtcttcaggctcggcttcggctcccagacggcgcgggcgcacggaagctccttgagggagccctgcggctcaacgacgtcgacgacgtccatgagcaggcggaagcgttcgcgaacgtcggacatggagaccacgacggcgtccttggtgggcttgccggagaagaccaggcggaccgggtcggccttgccgccgatgcccagcgggtggatctccagcttcggcttggcgatggtgccgatggacggggaaacctcgagcatgtgggagcccatgtcgagctcgtcaccctcggtgaagttgtaggagtagtcctccatgagggaggcgccaccctcaaggccgtagcccatgacggcgccgatgcgcacgaggacggcggtcttccagtcgccttcagcggagaagccccagccgtactcggacgggaagcgctgcgggccaacgcccggcagctgcggcagagcgccgaggtcctcgaagttgtcgacgccggcggtgcagccgttggcgcgcatcatgttgaccatcgcggcctcttccttggcggcgatgaacagggagtcgtacttggcgtccagcagagccgggtcgacgtcgtacttggccttgtagtcctcgatgatctccttgacctggtcgtccttgacggcgtcgtacgcagcgacgagctcgttgacggcccaagtgttgatggaggcgccgaacacgcgctcggcctcggtcttgtcgccctcggtgacggcgacgttacgcatgttgtcgccccagcgcatgaccttcatgttgttggaggcatcccagccggcgcaggcgcgggcccaggtgccgaccttctcgacgacctcaggatcggtgtagtggccgacgacaaccttgcgcttgatgccgaggcgggagacgatgtaaccgaactcacggtcgccgtgggcggcctggttcaggttcatgaagtccatgtcgatggtctcccacgggatttccttgtggtgctgggtggccagctgcagcagcggcttggtcagcacttcgaggcctcgaatccacatcttggccggggagaaggtgtgacaccaggtgatgacgccgatgacgttcgggttggcggaagcctcgaccatgaactccttgacaccgtcggaggacttcagggtgggcttgaggacgatcttggccggaatcttgccggtgttgttcaggtagtcgaccatttcagcggagtgaatggcgacctggcgcagggcttcctcgccgtacaggtcctgcgaaccaacgccgaaccagatttccttgccctcgaaggggttttccataaccatagggttacttcctttacttctttgtttatgggggtttgtttaagtttcattcgccgaccgaggctcccctcagagaggggagccaagacaccaccgtgctggcggagtcagcgctgatttgatgtgtgtgcccgcaaggcgcggaaggcgaaggcgtacgaaggtacgtcgagccttccgcaacgcggcggacactccatcaaatcagtgctggccgtagacgttctggtagcggtcgttgagcttatcgatgtcggcctggtcgatctcgatgatgtcaccgagctgacgggcggcccacatggtgtgagcgacttcctcggtcatggcagcggccttgacggcgccttcagcatccttgccgatggtgaaggggccatggttctgcatgaggacggccggggacttcgggtacttcttgagggtctcgacgacacccttgccgatcgcctccgagccgatcagacggaacgggccgaccggcaccgggccgccgaactcgtcgcccatcatcgtcaggccgcacgggatgttctgaccagtggcagcccaagcggtggcgtaggtggaatgggtgtgcacgacaccgtagacgtcgggcatgttgcggtagatgtaggcgtgggaagcggtgtccgaggacggggcttcggcaccgtcgaccacgttgccgtcaaggtcgcacacgaccatggaggacggggtcaggtactcgtagcgcaggccggagggcttgatgacgaacaggtcggcggtgtgcagacgctgggaaacgttgcccgcggtccacacgaccaggttccacttgatcagctgctggtgcaggttggagacgacctcacgaacctgcttgacctcggcgcgaacctcggggccgtaatcagccaaagttgccattattggttttcctttccactgtgatggatggacgttttttcaaaatctcaaggacctctctcaatagagggaggtcagaaaggcttacttatcttcgaggttgatggtttcgatggcagcgtgctcgatgggcaggcccttggtgaagcgggcgaagaagtcctcgaaaccaaccacatcggaagccaccggcttctcagtggtggactgggcgtccttgaacacgaaaccatcaaggaagtcagcgaggttgctgtgatcctcgttggtgttccacaggtagttggcgagcacggccataccccaggcaccaccttcggcggcggtggacatgaccttgatcggggtgttgaaggcagcggcgagaatcttctgagccaccttcggagtggtgaagatgccgccgtggcccacgagagagtcgacctgcacgtgctcctgcttggtcatcacgtccatgccgatcttgaccggggagaacgcggagaacagctgggcgcgcatgaagttgccgagggtcatgttggcttcggggctgcgggcgaacagcgggcggccttcaggcagaccggccaggaattcgccggaacggaacggatagttcagcaggccgccgcagttggcgtccacgtcgtcggcgatggccgcgcggaacagggtgccgtacagcataccggcgtcaaccggctggccgatagccttggcgaactggccgaacaggccgacccaagcgttgaggtcggaggtgaagttgttggcgtggctcataccggccagatcgccggccggggtggtgaccaagtcaacctcagggtggagggccttgagcttgtgctccagaaccaccatggcgaagatggaggtgccggcggagacgttaccagtgcgtacgcgcacggagttggtggctaccatgccagtaccggcgtcgccctcaggcggggcgagcacgatgccgggattcagggcaccggacggatcgagcagcttggcgccttcctcggtcagctcgccagccggagtgccggccacgagcggctcaggaagcaggttctccagcttccacggctgggctgcgacctcaggcagagcgtcgaacttctcgatgaatgcggtttcgtaagtgtgagtggtcgggtcaatcgggaacatgccggaggcatcgcccacaccgaggaccttctcaccggtgagcttccagtgcacgtaaccggcgagtgtggtgaagtaagccacctcggagacgtgctcttccttgttgagcacggcctggtacaggtgagcgatggaccaacgctcggggatgttgtactggaacagctcggagagcttcttgtgagcttcggaggtgttggtgttctgccaggtgcggaacggcaccagcagttcgccggcctcgtcgaatgcgaggtaaccgtgcatcatggcggagaagccgatgtggccgacgtgcgtgagcttctcgccataggcggtctcgacgttgttggccatggaggcgtaagcggactgcaaaccgccccagatctcctcggtggtgtagctccacagaccatcctccaagtgggaggcccagctgtagtcgccggaggcgatggtctggaagttgtcgtcgatgaggacggccttgatgcgggtggagccgaattcgatgcccagcgtggtcttgccagcgcgaatcttctcggcgatgtgggcggcctgctcggccgcgttgtcggttgctgccatatctttcctttgccttggagcgccggcgttgttatccccttccttggggagggtgttagcgctcacaatttcccaaaaaacattgtaccgataacctgcattcgacacaacttataccgtgtcacgcatcataacggtttgataacagggccaatttaccgccgaggagccggccccaaggaccgccgagcacgcacctcggcgggaatcagccccatgccgtgctgggtggtcaggaaggtcggctcgccgccctcccccagcaagcgcagcgtctctcgcatggcggccacgccgagcccctcgaaatcgggatgcacggtggtcagcggtgggtacatgttatccacgccagacatgtcgtcgaatccgaccacgctgatgtcttgcggaatccgaagcccatgctcatgcaacgcgcgcatgatgccgacggcctgattgtcgttcgcggcgacgaccgcggtgggcaacgccgcgcctcgacgcccatactcatcaatgagatgattcatgtgcgcatatgcctcagaggcatcccacgtatggcagcgcacgatctgtgaatcgatggatcgggaggcggcgagcttgcgccacgcatccagtcgggtgtgggcgtcgcgccattcgttgggaccggcaaaatacagagccgatttgtgcccgtattcgcccagcaaggccaccactttggccattgcaccccactggtcgataccgaccagtgcagtgcgacgcttgttttcggtggagataaggcccaatccctcacgcacggtcatttggccgtgggtggcggtgacgatgacgcgtggctgagtgactcgcgcacggcaggcggcggcgaacatcacgtcggtcggggtcaggaagatgaaggcgtcgacgttctgctcgttgaaggtgtcgcacaggttgtcgaattcggactgcatgcacaaggcctcgtggaccatcatcacgctcatgaacagaccgtgttcgcgggccatggattcgatggatgagatggaggaaatcgggccgaagaatttgaggcctccggcgatcagccctatggtgcgcgaacggcgggaagccagtgcgcgcgcggagttggaggggcggtagccgagttggtcaatggcggcctggactcgcgcacgggtggcgtcggaaacgtccggcgagtcattgatcacacgggagacggtttgatggctgactccggcgagcttggccacttcgaacatggatggacgtttgcttggcttgcggccggtcaccatgctacctaacctcccctctggcggccggcatccgtgcacggccaggcttgtaccttaatcaatactgactttagcgcgtccacaacagttttgcgttagcgctcacactgtcgtgtcgcacgcggctcaggtcaggtgccatgagacacgatggagcggagtcggcccgtgttcggcgatggcggcacggtgtgcggcggaaccatagcccttgttatgagcccattcgtaggcggcgtaacgtgggttgctttgcgcgaggtcgaccatcagccggtctcgggtcactttggcgatgaccgccgcggtggcgacggtggcgcaatgctggtcgcctttgactttggtcgttatatcggctggaatcggcacgtccggcgcgtcgaacgtgttgagcgccttggtgatgtaatcgctcggcccgtcgagaattccggcgactttgggcagggcgcgaacgctttccccacaatttccaatggattcccctacggagtctcccggacgaccttccacaatctcccccgcagccttttttgccgtcaatccccctccaagccgtaagccaagttcgcgttcgacttggctgagcgcgcgcagggcggccacgccgagcgcataggtgatgccccattcgtcgatctcggtgttgctggcctggcctacggcgtaggccgcgcaccagtcgcgcagttcgtcgaaaatcgcctcgcgcctatgttcggtgagcattttggagtcggccacgccgtccggcacgccgaggtaggtccgcccggacagttcgacggcatcatcgccatccaacggctccaaatcacgggcccagatggcggcgcacccgaccatcaccgggccggcgagcgcgccgcggccgacttcatcgaatccagtaataaggtcatagccctgggccgcaaggctgcgttccaagtcaagtgtcggggtaatcatgcgcggctcccatcgtctcacaatggttaggattcagacggtccaggttcaaatggttcaggattcagacggcccggaactcaatcagttcaaagactcacacggttcaaaaaaagactcaggaattcgagccggaagcgtcaggcacgtccttgaagacttcgtggtggtcatcaatcgcaccaagccggtcaagcggccagtatctcgcgattccgactccgaccacatcggagatgggaaccaagccgcgatcgccgtcatcctgatgatagcgggagtcggcggaattggcgcgattgtcgcccatgacgaacacgtggtcctcggtcacggtcaccgagaacgggaaggcgctcgggtccacgccggggcgaatgtaggaggtctcattgatggccacgccgttgatggtcaccggctggcccgcgcccttgcattcgaccacgtcaccgggcaggccgatcagtcgcttgatgaggtacccgccaccgggagcgctgctctgctcctcgttcaaccagttgttgggatctttgaataccacgacgtcgccgcgctgcagatcgaagatcttgggggtgagcttgctggtcaccacgcgatcgccgggcaccatggtgtccatcatcgagcgcgaaggaatctcgtaaaagccgacggcgaaaatgcgaatcagcagcacgataagcacgggaacgccgcaccacaggaaaaagtcgcgtagggtgaagtggtcatcatccatcgatgatgctgccgcggcattcgcgccagcggaagaagcggcgtgcgccgggcgcgccggtgccgggggaaccggggacggggcgatgccgtggtcggcgacttggaacgtacgggaatcgcgggcatcggcctcgtcatcatacgaggtctggttgctctccggattgtcggaaatcgggaattcgccgttatcctgatcgtcctgcataccatctcctcgcgattcatgctgccggatatgaggggtgccggcgcccgtccatcatacgtggaaaatacgaaaacagcccgaaaccgaaacggttccgggctgaatttcacggtttattcgcgcgcctgcatcatcaggctcacgattgcacccgcgaatcgactcacttagcagagttgtcgcggcgctcggcaatacgagcggccttaccgcgcagagcgcgcaggtagtacagcttggcgcggcgcacacggcccttacgcacgagcttgatggagtcgatggacggggagtgcaccgggaagcgacgctccacaccagtgccgaagctgatcttgcggaccacgaaggtctcacgcacgccagcgcccttacgagcgatcaccacgccggtgaaggtctggatacgggagttgttgccttcctggatcttcacgttcacgtcgacggtgtcgccgggacggaaggccgggatttcctcggccggcttcatgtgcttggcgtcaaaagcctcaacagcgttaaccattgttttccttcagtgctgccgcatatcagccacagatctggggccatccacgcgattgcgcatcacgtgcgttggcctgttctcgttatccctcgggtttgcccttgggaagcctgccgatccgccgaaagtcaggccttgcggccgttcggactggacccatggagacgtgggcttatgcggcggcccacttctcgacacagcaatcgtcaattgtacggattattgcggacagaatggctgcctgatggcattccaacaccaaggcactgcgacgtagttgacagacctgcaggcgggctttatcttgggagcgtcggtaggcgaggctaccgcagggatatgggttgctgccgctaacagtggagacactgcacgcaggtcagcagttcttgtcggatcaaggcatgaactaacgcaattccaccgccctgcgatgctgaagcttgaacgatggctcgaatcggcggattcgaagactttccgcccctcctgctggtcgcatggataccgacgatggtattgatctggcgtttcagcgcacggcttgaaggaggtgagagtccgatggacggtgattattccagtagttccgccgccggcaacagtcatagttgcggtggtgatgaccatgttttcttgtattccgttatccggaagtcgggctctcgcctgtagtgttccttggctccccggataacccttgcataattcgtctttcctatgcatagggaggtcttttcatgaccatgttttcattcaatcgcgtcggcgcgcgtccaaatgcgtcggcccgcaacccttccaccgccgcgtccgaccgccagccattcgccgtgcgcctggcctccgacgtactggtcgcggccggtattctggcgctgttcggtctgatcgcttggattctgccggcgatcggcgaaccgatcggcccgaaaggcgtgccgtcacaagtcagtacgcatctcgccgacctgccgtattacgcgctgcgctcggtgttccgcatgctcgtggcactgttcttctcactggtgttcacgttcatctacggcacggcggccgcgcgctgccgccgcctgagccgcgtgctgattcctctgttggatattctgcagtcggtaccgattctgggctttctttcggccaccatcaccatctggatggtgctgttccccggctcgatgctgggcgtggaggccgcgtcgattttcgcaatcttcaccagtcaggcctggaacatggcgttctcgttcacccggtccctgaccagcgaaccaactgaactcgacgaggcggcccgctcactacagctcacacgctggcaacgattctggacactggacgtgccgaacgcgatgattccgctgctgtggaactgcatgatgagcgtgggcggcggatggttcttcctgaccgcctccgagatgatctcggtgaacaatcgcacctatgcgttgcccggcatcggcagcttcgtggcacaggcggcggccgaggagaatctcgcggccatctgctgggccatcgtgacgatggtgctggtggtgctgcttatcgacgtactgctgtggaagccgttgaccgcgtgggcggagaagttccgcattacgcaaagcgagtcggcggtgcgcaagaccagtgtggtgctgaccatcattcgtcagtcacatatcgatgagatggtggcctggctgttcaggcctctcggcgacctgttcgacacgctggctcgcccgttgggtcggaccggtggacgttgggcggcggacgtgaagtccgcacgcagccgcgcgcttgacgtggtattcacagtgctggtgttggcagcgtgtgcgttcggactggtgcagcttatgctggtgattcatcgcgatgcgggattcggcgagctcgggcaggcgttcgtgttgggcatggtgacgttcctgcgcgtggcgctgcttacgctcgtctgctcggtgatttgggtgccgattggcgcgatgatcggcatgaatccgcgcgtttcgcggtttatgcagccgattgtgcaggtgctggccagcttcccctcgaacttcacgttcccgttcgtcacgctctggttcgtggcatgcagcgtggatatcaactggggcagtattctgctgatggcgttgggcacgcaatggtacatcctgttcaatgtgatcgccggggccagccagattcccgacgatctgcgtgagatgacgcgcagcttccagctggggcgctggcagcggtggcgcgatttgattttgccggcggtattcggctcgtgggtcacgggcggcattacggcggccggtggggcgtggaatgcctcgattgtctcggaaatcgtaagttatggacggcatacgctgaccgcctccggcttgggcgcgtatatcgccgaggccaccgaaagcggcaacaccgtgaggaccatcatcggcgtgaccgtgatgagcgtgttcgtggtggccgtcaaccgcctgttctggaacccgctgcagcgcatggccgagcgccgtttcgcactgaactaaagacttaaggagaataatatgactgttgcaatggaaaccattcgttcgctgcgggcgatgaccccgcagaacaccatcatcgaagcccagcacgtcggccagcgcttcacggccgacaacggcaccgaactcaccgtgttcgacaacatctcgttcaacctgtacgagggcgagatcgtggccattctgggccgttcgggtgccggcaagtccacattcctgcgtgcgctggccggactggtcaagccgaccagcggcacggtcaagtatcgcggcgaggccctgaccggtccgaatcccggcatcgcactcgtgttccagaccttcgcgctgatgccgtggctcaccgtgcaagacaatgtggaactcggtctgaaggcgcgcggcgtaccacgtgcggaacgcaccaaactggctctggatgccatcgacatgatcggcctggacggcttcgaatcggcgtatccgaaggaactgtccggcggcatgaggcagcgcgtgggcattgcacgcgccttggtgctgcggccggacgcgctgttcatggatgagccgttctccgccctggacgtgctgaccgccgaaaacctgcgtcaggaagtgctcaagctgtggtcgagcgaacagcgcagcatcaagtcggtgcttatggtcacgcataacatcgaggaagccgtggagatggccgaccgagtggtggtgttgggctcgcacccggggcatctgattgccgatgtgcgggttgatctgcagcgcccgcgcgaccgtcacagtgtcgaattcgaggcgatggtggaccgactgtacgcgattctgaccggacaggcctcgcagcctacgcaacaagccgaggctctatcgccatcggcatcgctcacgaacgcacccgtcacgaacgcacccgtcacggacgcatcagaccttcagcccgccaagaccatcgagaaaatcaaggagcatccgctgcccaacgccacgccgggcgggctcgccggtctgctggatgtggttgccgagcatcctcacggcatcgacttggcagatttggcctcggctctttcgttcgaggtggacgacctgttcccgctggtggatgccggtacgatgctgcgcgtcatcgtggtacgcgacggccatgtgcagatcaccgaggcgggcgacgcctggcataaggcggacattctgcgcgccaagcaggtgttcgcctcactggcgatggaacacgcgccgctggtgcgcaacattgagcatgcactgcggaagtctgcggaaggcaagctccgcggcgagctcatgctggacctgctgcgcgcccgttactccaacgacgaggcgcatcagcagttcgccatcgccgtggagtggggccgttacggcgaactcttcgattacgatgccgatgacgatctgctgagcttggatgaggcgaataagggcgaataagcgaatcagccacgtgagttggccagatagtgcctttatgcctgcaaacagatgccgaagcggaatatgaccatgttcgactcatctgactgacagcaatccgtatatgcaaagtgcccggcatccgaagatgtcgggcactagtcgtgagagagactccctcagtcagctacactgacacctcctctcacccgagggggcaccagaggaacgaatcagaactcgcgacgtgggcagccgccagactgcccaccaaacagcacagccgcggtcgcgcgaatcacgaattctgaccgagcaaagcgaatcagaactcgcgatttgcgcggtagaacttgatcaggctctgggtggaggcgtcctgggcggcgagggcgtcgtcgtcctgggagatggccggggtgatctgcttggcaagctgcttgccgagctcgacgccccactgatcgtaggagtcgaggccccatacggtgccttcaacgaaggtgatgtgctcgtacagggcgatgagctcgccgacggcgaacggggtcagagccacaccgaagatggaggtggtcggacggttgccggtgaacacgcgggccgggacgatctcctccggggtaccctcggcgcgcacttcgtcggcggtcttaccgaacgccagggccttggtctgggcgaagtagttgcccaggaacagctcgtgcacgtcctggtcgccgtccttggtcgggttcggggtgttgacgaacgcgatgaagtcggccgggatgagctgggtgccctggtggatcagctggtagaaggcgtgctggccgttggtgccaggctcgccccagaagatctcgccggtctcggaggtgacgggggtgccgtcccaacgcacggacttgccgttggattccatggtcagctgctgcaggtaggccgggaagcggtgcaggtactggtcgtacggcagcacggcgtgggaagcaaccttgaagaagttgcggtaccagacgttcagcataccgagcagcaccacgacgttcttctcgaacggggtgttggcgaagtactcatcgatctcgtggaagccgtgcaggaactcctcgaaacgagccgggccgaagacgacggccagggaggtgccgacagcggagtcgacggagtaacggccaccgacccagttccagaagccgaacgcgttgttcgggtcgatgccgaattcggcgaccttctccaggttggtggagacggcgacgaagtgcttcttgatggcttcggcgttcttctcgtcggagccgtcgatggcgcccttggccttgagctcttcgagcagccaggtgcgggcttcacgggcgttggtc

SEQ ID NO: 2771 - DNA, 2661 bp, Unknown
  R36_18m  MAG No. k141_15979
gatgctcacactgcacgccgagatagaacatatcgcccaggcacaccagcgtaccttgcagcaaagcaaggaaaccgaaaatcatgtatcggccgaaatattcgtggtgcaagcgtaaaccgaactgccgcgcattgccggaagactcggcacgcggcttcttcagcacatccaacgcggcggccggtccggcaatccgcccggcaatcatggcctcgcgaagacccactcccgaaccgagcggcagatcattgcccaaccctaagatacgggccttctcatggtcggaaatcgatactttcaacatggcgaccagaatgatcgcaccgacccagatagacagaatcgtgtagaacggagccatcgcggaaccatagttggcaacgggatagagcgcgatgcggtcgaccgctacgggtgccgccagcatggaagcaatggcatcgggcttcgcagaggaaatcacagacaggtcgttggtgccgccactggtgatagaggcgagttgggaagacaagttgtcgagtttcttcgccgaacgggtcaaagcgctagctgcgtcagtcaaggccgactggatatccgtcaggctgtctgaaacgccgccagaaagacctgacacgctgctgacggtcgacgcaagcccgtcgattacggaacttgcctgcgtggccacttcgtccatggacgaggtcagattgttcagttgcggtttcagcgtgctcttgtacgtgtctgaagcctgagtaatcgattgtttggcggcggcgatttgtgatttcagatctcgacgcgctgtatcggcatcggcagtaccatttgctatgtgcgtggccgcatcgcccaacgcggtggcggcttgctgcatgctctgctgcgtctttgtggcttggtctgcagccgcgttcagttgagcggcaacggtatctccgcccacgggcagtgaagccgcttgtttggcgagatctcgtaaagcggcggcatactttccaaagctgtcggcctgagcctccactttggattgcatatcggtcagcttgtttgatatctgcgaggattgtgagcccacatcggcaaaagcggcatcgatctgcttggcaatggtgtcgtaggatgaaccggcctgctgcaatgccgtaccgacgccatcggtggctccggacaatgccttgtcgaggctggagacgccgttgcgggtctgtttcaacgcctttttggttgtggccgcagctgagcctgttgatcccagcagcttatcggtggaatcaatgatgctgttggcggccccgagcagattggcataggaatccatctgcgacgcagtgccggtcaaacgagacgacatggtggcaatatgactggaggcgttgttgacgtactgctccatttgcgggctttgcgcgtaatcggccacgttggaaaccaaatccagcgccacgctcgccaaggtcttcacaaatgtctggtcgatggtcgtggccacggtggtagcaccctggtcggtgatatgcggagcgatcggattgattttctcattgagatagtattcgagcttggcgtgcttgatcttcggtgaaaacagcgtcatcatatcggagctgaagctctttggaataatcagcgcggcatagtattcgcctgagttcacgccatcgatggccttagcacgatccacaaactgccagtcaaggtcatgattggccctgagcgtattggtcacggtttcgccgacgttgatggtgatcggcatcagatcggacttatagcccttatccacgtttgccacggcgaccttcaaggccttggtgttgccgtacgggtcccagctggcggcgatgttgtaccaggcgtacagtgccggcacaatcgccaatcccatagccacgattacggcgatcacattgcgggtggcttggcgcacgtcacgtacgaatattttccagataagcttcatcgtgcgcctccttgcccagactgcccagactgcccagactgcccagactgaccggactgctcgaactgtgcggtgtgcgcagtcggctcggcggcctgatcgccgaacagtgtgagtcgttcagtggtttcgccgatatccggattgctgcccatcgccgcttcgtgacgtccgtggccgtggaaacgccgccacacatatccgttgagcatcacattgcggaactcgtcggcactcatggcactgacgccaagctgcatggcgtaggtttcgcgtgcgtattcaaccacaatgagataggcgtcgataagaataatcgacagaatccaagaggtcagcatggcgattttctcttgggtgacgaacagcagcaccaggaatacgaacgggagtacggtcagcaatgccagaccggcaacgatcatctttggataccgtgcgaagaaccggtgcgcgcgatgggcgatgatatcgcgcagttccttgctgtcggacaccgtgcggaatacggagttcaagctcacctgttcgttcaccatgctgttgtgctcggtgatcatcaggtcggtatctcccaaacgatggtcgaacagcgcgttcaggttcatcgcataccggcgtacgacaagtcccacgaaaagcgccgccggcagataccagaacaggtgcagcatgtcgagccagtaatggttcgcgtacaggccggc

SEQ ID NO: 2772 - DNA, 2551 bp, Unknown
  R36_18m  MAG No. k141_16575
aatcagcggagcctggccggccaccacgtccagcacatcggagaacagcggcacatgctggtagtaccccttcggcgcggcggacggcgtgaccaccagcggcgggttcgcgtcggcacccggcaacggttcggccttcaaatcgcctgactcgccgttcgggaagagcggaatacgggcgagttcgtcgtaagtcaggtcttcgatgcggcgcggatcgccggccacgcgcaacaaatcggcgtcatggaccacgaccacttggccgtcgagcgtaagctgcacgtcgagttcgatgccatagccagcctcgcaggcggcggcgaacgcggccagcgagttttcgggagcaatcggaccggtcatatccgcactgccgtagccggccttgacagccatgcgacgggcaagcgacacataatcatcgttttcggcgatggatcgctcagtggtatcggcttgggcgctgaccgaattatccccaccataatcagcgatatcggtatagccgaccaaaccagaacccgcatcgtgcaagccacgatgggcataccataccttcggaatggagggcacgaaattacgacgcttgtcattgaacgtgcgcggggccacggcccacacggcagcaccggcggcggccacgcctgccagcgccacgtttctccagagcttcgacgacattggaatccttcctgttgggctgcctctagcctaacgcttctgccagccattgtggagtggttggatcgtccggcttcagcgcgcggtccaggtggttggcacgcagcggctcccagctgaaatctgccagcagatcggcgggtttgcaagggattggagtgggttgcagacgcagcaaccaggcgcagtatccgatgatttgctcgggggttacgttgcgggcgcgcaaggctcccatatccagcgaacgttcgcgcttggctaaacgccgaccggccgcattgtcgatgagcggcaggtgcgcatactcggggtgctcggcgagaggcttttccgtgttgccgcattccggctcaaagccgccagccaacagacactggcgaatccacatttgcagcgcggtggagcgcagcagatcacggccgcgcacgatatcatcaacatccatatcgaggtcatccacgaccacgaccagttgatagccgaacagtccatcggctcggcgaatcacggaatcgcctacctcgcgggccaaatcgtagtgctgtggactatagacacggtcgttaaagcatgcgacaccatcaacgattccggcatcgccctgctgttccggcggcacggctcccgacagcgcagcggaatcgtcaggcactgtacgttgcttttctcccgctgccggtttcggcatggcgatacggatggaatgctggtcgccgcgagacagacgggcacggacctcgtcgggatggtcgtgcagcaggcggcggcacgtgccggggtacaccatgaagccgtcgccctcgttgggggccgaggcggcgcgaatgtcggcacgcgagcagaaacaggggtacagcacaccttgcgagcgcaggcattcgagagcgtattcgtatcgttcagtgcgctgggattggaacatcggttcgccatcccagtcgaggccgagccaatgcaggtcgtccatcatgagctggcccgcaccggcaaccacgcgcggcttgtccacgtcttcgatacgcatcagcatgcggtcgccacgcgaacgggccgaaagccatgcacccaacatggcgtacacgttgccgatatgcatgcgccccgacggcgtcggcgccaatcgtccggtcactggctctcccttcgtccgttaacactcactttcctaccatatgcgacagtgaacaccttgatgccacggttcttccactcttggggaacacaattgagacggatcggacagatacttccgtttcaaggggctgatttcgatgttgcaggaggtctacttccatttcaaggggctggtagccaagtagacacggcgcaacaatggcggaatggcgttgccataaagccgctgatactcgcggttcggcagaagagcagcccctcgaaacggaagtagacctccgaaagggggcaaatcagcccctcgaaatcgagatagacccacaaagacgaaaaagtgggtatgactgctaccatacccacctgtttaagagattttgcagagaaaaatcactgttgcgaaaccgcccgaactcccctcagtcagcttcgctgacagctcccctcagagaggggagccagtgattgtcacttatcttcggtaacgttgtccacgctcacatccgggtcgtcggagacgatctggtcgctggcccaggcggaaagctccagatgctcgccgccggtctggtcgacgagcacggtgtcgccatcgtggaccttgccggccagcagcatgcgggccagctggtcgcccacttcggtctgtaccaggcggcgcagcggacgagcgccataagccgggtcgtaaccggtgttggccagccattcgcgagccgagtcggtgacgtcc

SEQ ID NO: 2773 - DNA, 4188 bp, Unknown
  R36_18m  MAG No. k141_16611
ggccaagcgcgccgccgccatcgtcaaggccaccgccaactggcaggacgccgatctgctcgccaagctgtccgaaaacctcggcgaagccatggtcggcatcaacgaggacgagattcagaccatcatggccgctcgcggcgagtgacgggagtcgaagccggagaggacaacatggttgtagctgttgaatatatttccaaagaagagtccgcggacgtcgaaaacgtcaagcacggcgtgaccggcatcctggccgtacaaggcgcattcgccgaacatgcggcggtgctggacaagctcggtgcgccgtggaaactgctgcgcgcggccgaggatttcgatgaatccatcgaccgcgtgattctgcctggcggcgaatccactacacagggcaagctcctgcattcgaccggactgttcgagccgatcgccgcccacatcaaggcaggcaaaccggtattcggcacttgcgccggcatgattctgctggctaaaaagctcgacaatgacgacaatgtctactttggcgcgctcgacgccgtcgtacgccgcaacgcctatggtcgtcagctcggtagtttccaggccaccgccgattttggtgcagcggatgatccgcagcgtatcacggacttcccactggtattcatccgcggaccgtacgtggtgtcggtcggccctgaggccacggtcgaaaccgaagtcgatggccacgtggtgggcttgcgtcaaggcaatatcctggccaccgccttccacccggaactcacggacgatacccgcatccacgagctcttcctgtcgctgtagtcgattcgtctgccgttagactggtatccgactgacgaatcaaggagacgatctgccatgcagcttgagctgaatcgacgcagcaaggtgccgatgtaccggcagctggctgccgagctgcgtgaacagatcgtctccggcgcgatggccgagggctaccgcctgcctcccgaacgcgagctgtcctcgcgtctcgaagtcaatcgcaccacggtgttgcaggcgtatcagcagctcaaggacgaaggtcttatctcctccaaagtcggcaaaggcacgttcgtgctgccggctgcctccgcaagccgaacaccgcacacgtcaaacagtgacttcgggaatgcaataacgcgaacaacacgatcgtcggcagaaatgggaacatcgcaagcctcctcttccggcgacgtagaacgtgctacctccactggtttcttgacgacggaccagggcagcagctctgcggcggtccatacgattcgtgaaagccgctcggttcagggcccggagccaaccgtcgtgcgtccgccatggtcggtgttgttctctgattattccaaccggtttacctaccatgacatcgcctcggccgagcgggcgcagcgcggcgacaccattattgacttcgccaccggttcgccgaacccggcggatatcccggacgatctgctgcgcaaggtgagcatcgaggcgttcgaatcgcgggaattcgacggccaaccggaatcacctatcgagggattcgaagagttgcgtgcgctgcttgccgaacatatgcgcacacgaggcgtacaatgcggcgtccgcaacgtgatggtgctctccggctccgagcagggcatcgacctcatcgtgcgcgcgttcatcaaccccggcgactgcgtgctggtcgaacaatccacgttcttcccggcattgcagaccttccgctcggcggatgcgcgcatcatcggcgttccagtggacgagcacggtatgcgtacagacctgttggatgggtattgcgcgcgattccggcccaagctcatctacaccgtcccgacattccaaaaccccaccggtaccacgctgccgcccgaacgacgcagcgaactcatcgacgtggcgcggcgctatcagtgtctgatcgtggaagacgatgcttacggcgatttgtggtacggcggggaatcgtccgacgcacatcgccccataccgcttaagggcatggagaatgcgggatacgtgatgtatttgtcgacgttctcgaaaaccgtcacttcgggcctgcgcacgggatgggttgtggccgacccgcatgtgattaaccggctggcggctctgcggcgcatggtcgaccagcatacgagcacgtcatcgcagcgcatctgcctggaactgcttaaagaaggccgcgtcgccgaacatttgcgcggtttgatcaaggcttaccgcattcgacgagatgcagcaatcgcagcattggagcggtatgcgccggatgaagtgtattggaccgtgcctgcaggcggctactatatttgggtttccttaccggacggcgtgcgctctctggatgtattggaatcctgccgttcccaaggcgttacgttcatgccgggcagcgtgttcgacgttgacgaaatggatgattcccatattcgtctcaactttgtgcgcccggatgctgctgacattgataccggcattcgaatcattggcgagacgatagcacagatgtagccaagtgactggctcattgcggttgtcgagttttttgatggctgcatacccacatcgatgggtgcattcgacgaatgaataagcgaggaagccatcatcagttcgctgtggcatgcgcatagcgttgtcgggcgaacggggcagaccacgtggtcgttgcgtgacctggccgatcgagccggcatcgcattgcccctggcgtagtggcgaggtggcgcagtaacgagtcacgccatcgcgagccgatgatgcgaaatgcggaaccggtcgcggccatcaacggctatcatacatgcggaagcaacgatacgttggcgtcagcacatccatctgactccagaaagggacacgatatgaccacatcctccgtttctccggtgaccactgaactggcgggcagcgaaaccggcatcacgcttatcattcacgccggagcgggcagtcgtggcaagcgcagcacgcctgaacgcatcgcccaggtcgaacttgatctgcagcgcgccctcgatgccggataccagttgttggaatccggagcaccggcgcatgaggctgtggtcgccgccatccacgtcatggaagacgctcccgaattcaacgccggccgtggtgccgccctgaccagcgatggcatcgcccagatggacgcctgcctgatgaccggcgatggcgaggtcggtgcggtcaccggcgtaagcaccgtgaagaacccgatcgatgcggcgcgtgccgtcaaagagcagaccaagcatgtgctgttcgcggacccgaccgatgccgagatcgccgattggggcgtcgcgaccgaaagcaacgagtacttcatcaccgaacagcgtcgtcagtccttggccgaggctcagtccggtggcgatgagtgggagaagcatggcaccatcggtgccgtggcgcgcgatgccgagggcaatatcgccgctggcacgtccactggcggcatcaccaaccagatgcacggtcgtgtgggtgattcgccgctgcctggttgcggcacgttcgccaaccagtccacggtggcggtgtcctgcaccggcatcggcgaggcgttcatcaaggtggtcgccgcccatcaggtgtcggatcgtgtgcgtttcgccggcgagaacgtcgaggatgccgcgacggccactttggacgaagtcgccgcgcatcatggcgatggtggcatgatcgttctgccggcggtcggccgtggcgtggtcgcctacaacagcgagatgatgaacttcggataccgtagcgcgcaaggcggtaaggtgcagggctgattgcccccctgtattgcggcatatatcataatggccggtgtactgcggattcttggtaaggaatccgcagcacaccggccattcatgtatgcggcaagtgccgccgatcagtgcggcagtgcgcgctacttggtgatcgtgttgtacgtgggcatgttcgtgtaatcgaactgcacgttcttcacgttctgtgcagacacggcggcgaaacgtttgaccgggaatactggggtaatacgcaacttcatcgctcctcttcctcgaatgaaactatgttccattggtttgagccagtcacgtacggtattcgtgtctggcctgccacacaatgatgcagccgtatatacgggcacagcattgcgcggca

SEQ ID NO: 2774 - DNA, 2865 bp, Unknown
  R36_18m  MAG No. k141_16679
cggtccaaaaactcatgtccgccagcgcaacgcgactacgtaccttatgccggtctgcgcgtagaatagaacggctgcgatattgggttattcacggaggaatggatgcgacgctggctgatcaatgtagccaaaaatgagacgattctcatcgtcgccgcaatactcgccctgatttcgtgtttcattgtgccgccggacgccgattacaaaagctacattcacgccagcaccatcagccagctcatctgcctgatgattgtggtgtgcggattccagcgtatcggcgtgttccgcatcatcggttcgcgattgctggagaaggtcagcaccatgcgcggactggtcattacgcttgtcgctttgacgttcttttccgcgatgttcatcaccaatgacgttgcgctggtcacgtttgtgccgttcgcggtggccgtgctcatcatggctgggcaagaggataagaccatcctcgtggtcacgctgatgaccattggcgcgaacgtgggcagtatgctcaccccgatcggcaacgcgcacaacctgtatctcaaagccctgaccggcatgccgaccatggaattcctcggcatcatggcaccgtattccggcacggcggccgtgttgctggtcatcgtgatttccgtggtgtttggcggcaaaccggtcggcgacctgggcgacctcgaaaccggcgtgctggctcccgagcgcaacaaacaccagcccgacgagattcgtatcaccggctacggcgccggttatggcggctggcgcaccatcgtctactcgctgctgttcatcgtctgcctactggccgtctccgacgtgattcccctgtgggtgatgtgcgtgatcgtggtcgtcgtgttcctgttcaccgatcggcgcgtattcaaatacgtggattggggactgccgctcaccttctgcatgttcttcatcttcatcggcaacatgaagcgcgtgcccgaattctacgaactggcgcgctcgctggtcggcggccatccgctggaggtggcggtcggctccagccaggtcatcagcaatgtgcccaccacgattctgctttccggcttctgcgaccaatggcgcgatctgatcattggcaccaatttgggcggcatgggtacgctcatcgcctcgatggcctcgcttatttcttacaagaacgtcgtgcgccaatacccgcacaagaaaggccggtatctggccgtctactccgccgtcaacgttctgtttttggccgtattgctgaccttgagctggatcatcgagccgagtctctgagcccagccatctccaccccgctgacgggggctgtcggcgaagccgactggggtggtctaccgcgcgtatacggtgggggagccggtcagtcggctcatggccgactgcgggatgtcatgaatgcggccgatggtggcatccagcgtggatacgccggatacgccgtctgtgttggctgtggtggatgcagaggtgatgctggatactccgactgcggacgatgatacggccgcaaccatcggctgacgataggcgttggagttgcgggccagccgggcgagcgcagggcgctgcctgcggaacagattgataaacataccgcatactccttcatcgttggccggcggtcttctggccgccgtggtttccatcctgccctcccgtgcttgtattcgctatgggggatagcccctattattccctgaatctgcacgattccccctcatccttgagggtgattctaacggcaaaggcatcggcctaatggccgatgccaatcagcgcgaaaccaccagcgtgacgctgtacggcttgatcttcatcgccagcaatgaagacggcgacggcaatgtgtaagcccgacgttccggcacaatcgcccccgaagcctcgccgcggtatccgatagtggttttcgccgtcggactggcgcttaacgtcgtcacctccaaacgcaccggtcgcgatggcgaggcgcccagcccggccagtccgcgcgcgatttccaacgtcacatccaccggggaatcggaggtattgacgattttgatgtaacggcaggcgtcatccccgtcatgcccggtggcactgacatacagatgtttggcggggcgtgacgcggtctgctcgatggacacggcatatgtcgtgtcgcccagatgcgtggaaaacagccgctccacctcataattcaccgtggggttcacatgcgccggattgagttcgataagattctgcgcccaccccttagccgggatatgcgcgagcagcggtgcataggagatcatgcgcaccacgtcggaattgcgctcgcaaccggtcaggaacgcggcctcgccgagtgccgacttccacgtgttcgcgccctgttcggtctgcggttggccggcaaaatagccgttggctgaatattcgccgaaatagacgccggcgccgcaacgcgggtaagcgtcgaatcgtgacgcttggtatgcaaaccattcgggggagtggtaagaatgttcgtcgacgataatcgcgtcaccgatggcggaatcatgtgccccggaatcggttgcggccaacgctcgcgcatggtcccagctgcgtttcatcgtcggctggaaggggaacagtccggcgctcatcacacacagcatatccgggtatcgttcgtgaatggcctcgctgatcatgtcaaacttggccacgtagtcagccccgaagttttcgttgcccacgccgatcatgtccaggccgaacggttctggatggcccatatcccgccggaccgcggcccacgagctggactccggatcgccattcgcgaattcgatgaggtccaggtagtcctgaatcacattgttgcggaaa

SEQ ID NO: 2775 - DNA, 4708 bp, Unknown
  R36_18m  MAG No. k141_16773
cggtagctgttctggctcatctccaggccggagacggccacgccaccggcgttggcagccttggccgggccgtacagcacgccgttcttctggtagacctcgatggcctccggggtggacggcatgttcgcaccctcgacgaccacggtcacgccgttgtccacgagcttctgtgcggattcgccatcaacctcgttctgggtggcgcacggcagagcgatgtcgcccttgacggtccacacgcccttgctgccctcgtggtactcggagcccggaacgcgctcggcatattccttgatgcggccgcgctcgacttccttgatctgcttgacgacctcgacgttgatgccgttcgggtcgtagatgtagccgttggagtcggagacggtgacgaccttggcgcccagctgctcagccttctgagcggcgtaggtggccacgttgccggagccggagatcacgacggtcttgccctcgaaggagtcgttgcgcagcacgcgcagggcttcctgggtgtagtagcacacgccgtaaccggtggcctcggtgcgggccagggagccgccgaattccagacccttaccggtcaggacgccggagtactcgtcgcggatgcgcttgtactggccgaacaggtagccgatctcacgaccaccgacgttgatgtcgccggcgggaacgtcggtgaactggccgatgtggcggctcagctcggtcatgaaggcctggcagaagcgcatgacctcggcgtcggacttgcccttcgggttgaagtcggagccacccttgccgccgcccatcggcagcgtggtcagggagttcttgagaatctgctcgaagccaaggaacttgacgacggactcggtcacggtcgggtggaagcgcaggccgcccttgtacgggccaatggcggagttgaactggatgcggtagccgcggttcacctgaaccttgccctcgtcgtcaacccaggccacgcggaacttgatggcgcgctccggctcgacgatgcgctccagcacaccggccttctcgtactccgggtgcttctcgacaaccggctgcagggtctcgaagacctcgcgaacggcctgcaggaactccggctgatcgccgtcacgggcaacgacctggtcgtagacacgcttgatgtactcgtcagtgagcatgattctcctcgatttggtagggaattaagacggttttattctatgcgcgcaggcccttgctgcatagagtctcgctcggataacgggaaagctttcggcgtggttatggagtggctcaagtttccgtttgttagatttttcgggcgattgttggatgtctgtctatgcgtgaatcgggtcgaaatggaagccgcatcacaccggaggcacgttcatatagtggacataaaggcggacttgggtgatgtcagatgtgtctgttggggatcgtgcggtctgtggggtttgtggggtgtggctggaccgtggggtcgtatggtttttgtgacctgtggggtttgtggggtgtgtggccgcaggtcttcggcgcgcaggttaccgggttcgcggtcagtgtgcgaagtaggtctgcagaatcatcgtggtctcggtgcttaccggcaccgtgcggtggatgagattgagcagttcttcaagtgcggtaggggaagccacgcgcaccaccagcacgaaactgggggcgccggccaccgaatagcaggagacgatgccgtcgatattgttcagcttgtccggaatcgaggattcggctgagtagtcgagcggggtcacgttgacgaacgcgctgatgggcaagccgcgctgctcttggtcgatgatggccttgtatcccttgatgatgccgcgcttctccagcttctgcacgcgcgactgggcggcggagactgacagtccggtcgcctgggccagttgcgcgagcgtggcgcggccgtcggcctccagcatggtgaggatgcgctggtcggtctcgtcaatcgcggtcatgatgtcttctccgttcgttgtgctctgtgttcactgtacctgttgccggaatgcgatggctttccgattttgcctggtaatttcagtagttcttcctgtgttttctgttgtgtggtggaatgtttacgtttaaagtcctaattggatgtaataattccttttgaaataagagaacgacgaaataattccattgaggagggatgatatgcagaagttttccaacatgtctctgtccgaagttgcatctgctgctgcgcctgctactatgcctgctgccggtcgggttgctgtgccgaccgccgagcccgcgagcctgtccgccgaagccctgaatatcccgcgctccggcatccgagacgtattcgaccgtgtagagcgcgtgcctgacgcgatttcactgaccgtgggggagcccagcgccacggccgcgccgcatatcgtggcagccgcttgcgaggccgcacaggctggccgcactcggtacaccaacgtgcttggcatccccgaataccgcaaggccgtggccgattactccgcctgtgtgaagggacttacttatgatcccgaaaccgagattcaagccgttgacggtgccacgattggcctgtttctggcgctgaaagccgtggtgggcaccggcgatgaagtgattattccctcgccgttcttcacttcctatgacgccgaagtgatgctgtgcggcggccgcccggtcaccgtggcgctgcgtccggagcacggcatgcgcgtgaacgcggcggacatcgaagcggcgatcaccccgcgcacccgcgccgtaatcatcaactcaccgggcaatccgaccggcgcggtaacctctgccgccgaactggcgcgtattgccgaagtatgcaagcagcacaatatttgggccatctccgacgaggtttaccatccgttcgtgtttggggaaacgttcggggaaacgcttgggggagaggcagccgtggcaccatcgatcgccgcggtgccgggcatgaaagagcgcaccattgtggtggaaagcctgtcgaaaacctatgcgatgaccggctggcgcatcggctacctgctggcacccgaagcggtcatcgaacagaccggcaaaatcgccgaactcatgcactcctcggtgaactccttggcgcaatacgcaggcgtggcagcactggctggcccgcaagataacgtggccgccatgcgcgaggaataccgcgccaagcgccagatcgtgctggacggtctggccggatgcccggtattgcgtctgatcgaaccgcaaggcgcgttctacgcctttgtggacgtacgcctgactggccttgactccggtgaattcgcagaccgtctgctggacgaagagcgcgtggctgtggtccccggcgaggccttcggcgaggaggggcgcggcttcgtgcgcctctcctacgccggagatgccgacgagctgtgcgagggcgtcgcccgtctgcgcgcattcgccgaacgggtatggaaccccatcaccggccaccacaccgccacctatcaccccatggaggtgctggcctgaggcttaaagcgaggctagaccgccattcggcctcgtcggcgcgagcgatggcctgcttcttggctcgcagcaagatgtagccgagtaccagaacgttggccagagctcgatgttggcatcgtgtcaaaacaaccgcattaaggctgccgcgtctcgtatcgttacgcgtaggggctggctgaggcgtaatgctgaagagtaacattgaagcgatggcaatcaagccgatttgagggagagaggcacacgatggcgtactgcggccactgcggaaatagagttgatgggccggcacgattttgcccggcatgtggagcgtctgtagacagcgcaccagttgcgacggcaccagtaccggccgcatcgccagccgtaccgcctgcgtcgataccggcacctgctgtgccggcgtctgcggtaccaccatcgataccagccgcgccggttgccccatcggtttacgccgcgtccgctgccccacagccggcaccaaccgttcccctgccggctttgccgattcccgctcctgccgcatatcaggcgactgatgcaaccgccgtcctggcaccgcagcgcaaatccagtaagaagctgatcgccgctttctgcgcattgcttgcgacgattctggtggcggccttggcgttcatcatccccaacttcaccgccgtcaaagcgatgctgggcttccggcccaccaatccgctggtcgtcaccttcgacgcgatcaactcgctgtccactctgcgcagcaccaaatacgaactcagaacccacagcatcactgacgattctcttgacgtgcggatgtctggcatgtattcgctgggcaaaaccaccaacgaatcctccgcgtccttcactagcaaaacagacgaatatgcaacgaccttcgcttggtacaaaggcgcattcgccgagaaattcgtttggcatgacgacgacccctactacatctactgcccggccgaccaatatgaagatgacttaaggaacggcgttggtagtgatgtggcggacttgatattgaacgtcaaggatgcgttggtcaagaacggtgcttgggacatcaccggcgcggagcaaacgttctacgatcagctggacaagatgaacgacgatgggtactcgaacgacatcgaccgggccaagggcacgaaaa

SEQ ID NO: 2776 - DNA, 19152 bp, Unknown
  R36_18m  MAG No. k141_16823
cacgcgacctcccgccagcgggaggagaaagttcctatagcactatagtccagaatgcgagttgcaactcgcctcccacctacacactacaatgcgagccggtacccagtgcacgacttccacacccgggtcgaatggcaggtctagggttataggccaaaatatgtgtctgtttgggcttgtcaggtcttggaatgattggtgtttcgctggtttgaatgtggttggcgggactttcaaggtcggccggaatgtgtgtctgggatgggttgcggggccttgcgccacagggcctgacgggtgtttgaatgtctcctgtttgactggtcgcatgagaacacccaaatgcgcggcctgcggcggcgagatgaagaagaacggcgccacctcggcgggacggacccgttggaggtgcaaggatcggcggtgcggctcgtcgacgtcgcgcgcctatgacgtgagggctcgtgacctgcgttgcggcctggattggctgttctcgaagcagtcgcaggcggagcaccggctgccgtcgcgcacgcttcgccgccggtgcgagctcatgtggggcctgtggccgcccgtgccgctggtggacgaggtgcatcatgtggtgcacgtggacggcatccacctgcaccgcgacgcggtggtcctgatcgcggtggccggcgggcacgtgatcggctggcacgtcgccaaaagcgagaaagcggcggcatggcagtgcttgatggcgcgcatcgcaccaccggacgtgctcgtgtgcgacggcgggggcggcgtcctcaaggccgcgaaggccatgtggccggatacgaggatccagcggtgcctgttccacgtgcaggccaacatcctcgagctgaccggcaggcggcccagactcgaggcgggcggacggctgcgccgggtggccctgtccctgccccgcgtcggggacgcgggcggcgcggccgaatggctggtctcctacaaccagtgggagcaggacttccattcgttcctcgacgagaagagcgaatacgccgacggcagtgtgaacgacatgcaccaaaggctcgtcaaggcacggcgcatgatccgcagacgcatccgcgagggtcagctgttcacgttcctcgacgaggggctcgcgtccgtcggcccgataccgtccacgaacaacctcgtcgaatcatggaacgcgcgcctgcgcgacatgctgcgccgccaccgtggactgcggctggtcagacggctgaaggcgatctgctggtggtgccatcagcacacggcgcatcccgagaccgacgcatggctcgcagccaacgcgatgaccgacgaacgactcgagcgcctctaccggcaggcatgggaaagaagcccgcaaggccagtacgagacattcggcatccccgcaagatacggcaccggcatcgactggaacgagttccacacacgggtcgaatggcagtcgaacgactagaccgccggacacacattttggcctataacccatgttgtctgaaaacggaaaagccccggaaagcaaccactcagaagtggcggaattccggggctaatcggtcgggccggcgggatttgaacccgcgaccccttgacccccagtcaagtgcgctaccaaactgcgctacggcccgatggtgcaaaagcaccgagtagataatctaccagatatatgaaatctggcaaattacgcgcgtgtcacttccgcttcttcttctcgcggatgttcacggagatctgaatcggcgtgccttcgaagccgaattcctcgcgcagggaacgctcgatgtagcggcggtagccgtgctcgaggaagccggtggcgaagatcacgaaacgcggcgggcgcgtggatgcctgcgtggcgaagaggattcgcggctgcttgccaccacgcaacgggtgcgggtgggcggcctgaattttgccgaggaaggcgttgagcttgcctgtaggaatacgctgatcccaggattccaaggccttatccatggctcgcgtcagacggttggtgtgccagccggtcttggcggacaggttcacacgctcggcccacatcacacggtcgaattcggtgttccacaggcgttcgagacgctgcttgtcgaactcgtccatcgcatcccacttgttgaatacgagcacgattgcacggcccgcatccacggcggtggacatgaccttcaaatcctgatcggataccggctgcgaagcatcaaacaggatcagcgccaattcacagcgctcgatggcggcctgcgtgcgcagagaggaataatattccgcgcctgtgagcttgtgctggcgtcgcttgatgccggcggtgtcgatgaacagccagtcctcgccatcgatgttgacgatttcgtcgacggggtcgcgcgtggtgccggccaaatcgttgacgacggcacgttcttcgcgcgccagctgattgagcagagacgacttgcccacgttcgggcggcccaccagagccacgcggcgcaggccggaaggcgtgaggtagccggaagtcttctcggcctgcttgagcttgtcgagcgcgacgtccagcaggtcgcccactcccttgccgtgcatggcggaaatcgagtatggttcgccgaggccgagtttccagaattcggcggcaaggtattcgctggcctggtcgtcgatcttgttgacggccagcacgacaggcttgccggcggcacgcagcatcttgacgatgcgctcatcggtggtggtcatgcccacttgcccatcgaccacgaataccacggcatcggccaaggtcacggcaatctgtgcctgtgaggcgatggcggattcaatgccttccacgtcggcttcccagcctcctgtgtccaccagcttgaagtcggtgccggcccattccgcgtcatagctcacacggtctcgtgtaacgcccggcgtgtcttccacaacggcggcacggcggccgaggatacggttgaccagggatgatttgcccacgttcggacggcctacaacagccagcacgcccaccggcttgggaccggccttgcgcgcgccttccgtgaaaccacggccggaaatcagatcctcatcgccttcgtccagctcatagccttcgagattggcggcatactgctcgtattcttggttctcgatggcgtcctcgaccacaccgatgagcagatcgagcgtgtgggcgaagtccagatcggaattgtcgatggtggtaacgccatcggcggcggtcaggaagctggtgaccttggaatcggccttgtcgcgcgcggccacatcctcagcgcccacgcccttgacagcctggccggtgcgacgggcctgacggacctcctcacgggcggtcagcagcacgcgcacctcggcgtccggggacaccacggtggtgatatcgcggccctcggccacgatgcccaaccccccggagaaggagtcggccgacgcctcgcgggcgatgtaggcgcgctgggcggcgatgagcacgttgcgcaccgggatgacgttcgacaccttggagacatggctggagacttcggaggaacgaatggcctcggagatgtcctcgtcgtcggcgaatacgcaggggttgtccgggtccacggagatatcgaaatggtcgccggtgaagaactcgcccaccgcttcggtgatgacacgctcatccacggtttcggcgtccagatcgatgccctgcttcaggcaccaccaagcgcaggcacgatacatcgcgcccgtgtcaaggtaggcgtatccgaaatacttggccagcgccttggacgtggacgacttgcccacgccggcggggccgtcgatggcaacgcgaatcacaggccaacctccttggacagcgaacggacttccgtctgggacagcacgcggtaggaaccgggcttcaaatcaccgagtttgatcgggccgatctgggtgcgcaccaagcgcttgaccgggaagccgattgagccgaagatacggcgcacgatgcggttcttgccggagtgcagcacgaccttgaccatcgtgtggtcgcgtgaggagtcgatgatcgcgcagtggtcgagcttgatccagccgtcgtcgagctgtacgccggtggtcacgagtcgacggcatacggtgccggagatcttgccttccagtgtggcgacgtaggtcttttcgacctcgtacttggggtgcatgacgtgctgcgagagttcgccgtcgttcgtcatgaggataagaccctcggaatcgtagtcgagacggcccatgtggaagatgcgctcgtacttgtcgcccacgatgtcgcgcaacgtgtagcggcccttcgggtcgtccatggcggagagcaccttgcggggcttgttcagtgccagagtgacgtggttcggattgacgcgtacgcgcgaaccgtctacgcgcacctgctgcttatgggggtcgacgcgagttccgagctcggtgaccagttcaccgtcgacctcgacacggccttcggtaatcatgtcctcgcacttgcggcgggaaccgaatcccgcttgggcaagcagcttctggagtcgaatggaattggaatcgtcttgcgctttcgcagcgcgggaatatgcgtttggcatcgttctcccaacgtggccggacagattctgtcatcgcagagactgtcgatttgtatacatacttcagagttggcggactggaatcccagccaattccaacctatatatcataccgcaacgtaggactgctgctagactggcaaccgtttgtgcgggttcgcccgtcttccaacagatgaaaaggaatgaacaatcatggaagaaaccaagcaacagccgctggccctgcgcgtgtgcgccgaattggccggcagcttcctgctgtgctttgccatttacgccttctccacatggggttcggcagtgtatggcatcaatatcgtgttcttcgcgttggctaccggcttggcatatgccgcagtcaccgccatcttctcccgcgtgtccggtggccagctgaatccggccatcaccgtagcctccgtgctggtttccaagacgaaaatcctggatggcatcctctatgtgatcgctcaggtcatcggtgccatcgccgccggcttcgccgtggtcaagctgctgcccacatccgagcaggtagctgccaaagtgtggctgactccggccgttaacggtttcgagaacggctccgtgtcttactcgctgctgacccagtatggcattacgttctcgattacgctggcgattgtcgtcgaggtcgttgcctctctgattgtcgttgccaccgccatgtcttctctgggtgatcacggcgagtcctcggaccgtcatgtcattgccatgggtcttgcctatggtctggccgccgccatcagctacccggttaccggtgccggtctcaatcccgcccgttccaccggtatcgcactggccgcgatgaatgagggtcttacgcaaaatccgctgcaacagctgtgggtgttctggattagcccggtcttggccgccgctgtggtggcgttggtcatgatcatcgcgcagatgatgaccactcccaaagtgccggctgccgccgatcttccgcagacggatgccgatgcaaacgcggacacgctcgacgatggcgaattcttcgatcaggccgcctcgtctgatggcgattcagcggaaaaagatgttgccgaagagtccaaagaagctgaagtaggtaatcagcaggccgattcccaaggcgatgccgatgaaggagtcgaacgccactgagcgcactttccatgggcttttgtcctgaagaatcaggcgaacaagcccggtgatgatggccgtcacggcaagtatgaccgtggcggccatcgtatatccgaaagcaaccagcagtgtgatgacggcgacgacgccgagtacgcaccattcaaaccatggcttgccctcatgcgcttcggatacatagggatggttgtgcatgttgcgattccttctgtcgaacggttacgtgaccacaatagcaggcgaatagcaaaggtgggattccgcttggacccgttgacgggtcaggcggaatcccacctttgtgcgttttggctgagctgctcccctcagagagtcccgatcagtggaagaagtggcgggtgccggtgaggtacatggtcacgccggccttcttggccgcttcgatgacctcctcatcgcggatggatccgccgggctgcacgatggccttgacgcccgcgtcgataagcacctgggcaccatcggcgaacgggaagaacgcatcggatgccgcgaccgcaccggtggcgcgatcggcaccatcggccagcgtgttggcgcgctcgacggccaaatggcaggagtccacgcggttgacttggcccatgccgatgccgaccgtggcctgatcgtgggccagcaggatggcgttggacttcacgcagcggattgcacgccatgcgaacacgaggtccttcagcgtgtcggcgtcggcggcatcgccggccacgagcttccaggcgtccggatcgtcgccgacggcgttgatcagatcggtgtcctgcacaagcaggccgccatcgatctggcggatggcctcgtggcccttcggtggctcggccaccttgaggatgcgccgggtcttcgtcttggtctgcagcagttcgagcgcggccggctcatagtcgggggcgacgatgacttcggtgaaaatcgggcgcacgctttcggccatctcaagagtgaccttggagttgcaggcgatcacaccgccgtaggcgctcatcgggtcgcaggcgtgagccttcttgtgggcctcggccgcggtcgcgccgatggccagaccgcacggattgttgtgcttgactacggccacggcaatggcgggagccatatcccatacggtgcgccaggcggcgtccgcgtccacgtagttgttgtagctcatcggcttgccgccgagctgctcggcgtgggcgaaaccggtctggttgagcgggtcaatgtagagggcggcctgctggtgggagttctcaccgtagcgcagggtgtgcgcacgatcccaggtgcgggtgaactgggccgggaacttggcggaatcgacttcagtgccctgatcgtccttgtccacctcgacggcgtccagagaggccggcttgggccagtgcttggcggtccactcgttgatggtggcgtcataggcggcggtgtgcgcgaaggccttggctgcaagccacttgcgctcgtccagagagaagccggtgccgtcggccacgcgggaggcgaccagtgcataatcggccgggtcggtgacgatggccacggtggcgtggttcttggccgcgccacgcaccatggaggggccgccgatgtcgatcttctcgatggtgtcggcctcgttggcgccggagcgaacggtgtcggcgaacgggtacaggttgacgaccaccagatcgaacggcttgatgccgaagccgtcaagctgcttggcatgttcggggttggtcatatcagccagaatgccggcgtgaatgtacggatgcagcgtcttgacgcggccgtcgaggcattcggggaatccggtgacatcggacacctcggttaccttgacgcccagctcggcgagcttcctggcggtcgaaccggtggaaacgacttcggtgccggccttcacgaacgcttccgcgagtacttcgatgccttccttatgaaagaccgagaccagtgcccgacggatcggtcggttcgtgtttgtcatcctgttcctccttggattcttgtggttgtgacgccagggaccgcgcctgacggacgatgacggtcttcggggtcgcggcggtggtgcgggaatcattgatcctcccaaccaaccagcctatcgaaaaaacgagcgctgtgccaatcagcgcgagcagccatgccgcggtaaatcccaatgcggtcgaatgaccgacgactctggtggaggccatgacgtcgacgccaatgtgagcgagacgatgatcgccaagcgatccattggacagagcgaacagcaatgtggatgccagtgagatcagcatcgcgctcaggcagaatgacccggcggagtagatcagcgaaaccagtactgggccgcgggtggacgcattccgtatattcaacggtctgcaggcgaatccttgcggcaggaatacagccagcaggcccacgagcgcagcgatggcgagaggcgcgttcaaggcaacggtacgccatagttcgctgctgaccggttcgggcagaataccgaataccggtattgcaggaagctctttggattggccgagccataacgtgaaactggccaaatcaccgatggcgaatccgccgccgaagagccaggaaacagcccagagcatgacgttgggtagccagatcagcatggcgacggtggtgagaattcgtgaaccggtttccatcccggacaattcgaacaacgatacgacagcggcatggttgcgtaccgaccatacgatgacggtaatcaatccaattgccaggtatatgcccagtatcgcgacagccaagtcgacgccgattttcaggcagtggcgtatgtccgccggcacctgcttgcgagtccagtccctgaatgctcgcatcttggctgattccggtacggctgcgcataggaaaccgatcgagaatacgatggctgctttcagcaacaccagccactggtcatcgacaagacctaggtgtacggattgccggaacgcctcgttcaacccgagccaaacattcaatccggcaacatacgcatgcggcccgtatgctttgattcgcatggtgagtgcattgatcagccatatcagcagtatggtcaacatcaatggcgtgatggtgagggtgaacgaatcggttctagagcccgatccctcactcagaagcacaacggcctgtgtcagcgaggttgtgccgacggtgagattgtcgccgccctcttccatggagacaaccaataacatcagcgctgtatagcaacctaatgcaacggcatagatggccatggatgcgagggcgactatggctccccgcacccattggcgaatcacggctttcatcacgattggttggaaccgatcagtcgatgttggccttggcgagtatgtcgcgcatgatttcagcggcctggcccggggtcttgcccacggggatacccgccgcttcgagcgcgttcttcttgtcctgggcggtgcccttgcctccggagacgatggcgccggcgtggcccatctgcttgccttcgggggcggtgaaaccggcgatgtaggcgacaaccggcttggtcatgtgctccttggcccatgcggcggcgtcctgttcggcgaagccgccgatttcaccgatcatcatgacagccttggtgtcggggtcggcttcgaatgcctgcagggcttccagcagcgtcgtgccgacgatcggatcgccgccggcgccgagacatgcggtgaagccgatatcggacagttcgcccatgagctggtaggtgagggtgccggatttggagaccagtccgagcgggccgcggccgacaatgccgtcggggatgatgcccaagttgacgccagggttgccgagcgtgatgaaaccggggcagttcggtccgatgatgcgcacgcccttcttgagcgccagttcgacgaagtatgcggaatcggccaccggaatgccttcagtgatgaccacgatgagttcgatgccggcttcgacggcttcgaccacggcggacttggcgaacttcggcggcacgaacaccacgctggccttggcgccggtggcttcacgtgcttcgccgcaggtggcgaacacggggatgtccacgtcggcaccgttcttggcaccggggaaggtgacggatgtgccggccttgcgcgggttcacgccgccgacgatattggtgccggccttgagcatgcgagccgtatgggtcatgccctgatggccggtcatgccctggacgataacgggagcgccgtcttcgatgaacagcatcagcgaacctccttggactgggtcgcctcaccggcgagctgcgcggccttggctgccgcgccttccatggtttcggacacatggatattcggattgttggcggaagcgaggatatgcagaccctcggcggcggcgttgccatcgaaacgcacgacgatcggcttggaaccgccgagcttggcgaccgcttcgaggatgccgttggcgacttccacgcaggaggtgatgccgccatagacattgatgaacacggattcgacctgagggtcggacagtacgatctccaggctttcggccatgacggctgcggaggcgccgccgccgatgtccaggaagttggcgggcttgatgttggtgccctgttcctcgccagcgccggagacggcatccagggaactcatgacgagtcctgcgccgttgccgatcacaccgacctcgccgtgcaggtgcacgtagtgcaggccgtgttcgcgggcgcgctgttcgaaggggtcgggaacgatgagatccacgaaacgcgcccagccatcatggcggaaggaggcgttgtcatccaaggagatcttggcgtccaaggcgctcagctgcttggtggattcgtcatccgggtcgccgatcttggcgagcggattgatttccacgagcgtggcatcgttgtctttgaagcagcgccacatcttgagcagaatctgtgcggcctgatcgacgtccgcgtggtagaagccgatgctctgtgccatttcggtggcagcggccaggtcgaagtcgccgagcgcatcgatgtgcaggcgcttgacggcctccggatgttccttggcgatttcctcgacttcggtgccgccgttggcggtggccagcacgtcgaagtcgcgcgaggtgcggtccacggagatggacacgtaatattcgtgcaggatgttcttggcttcggccacaagcacgccggaaaccttgtgcccgtggatggtcatcggcaggatggactcggattcaagaatcgcctcgtcgcggttatgggcgatcttgacgccgccggcctgaccacgatgaccgatcttgacctgcgccttgattacgcagggatagccgattttgtccgccgcttcggcgacttcatgggagttctgggcaaagatggcgtccggggtgggaatgtcttgttcctcgagcagctgacgcgcctggtattcgtaaagatccatcgatccttccctgactatgtaattggtccggcatataactgtacacagtacatgccggaccttgaaaactaactgtacgttgggtgagacggaatctcaggccggcatcgcgatcagcgagctgctgggcttgccgccgagcttatccagaccgtcgagaccatcgagccgcatcacaaaactgaagcccaccacagtgccgcccgccttttcgataaggtcggcgccggctttggcggtgccgcctgtggcgatgagatcatcgacaatgagcactcgctcccccgcctgtacggcgtcggtttcgatttcgacgctggccgtgccgtattcgaggtcataggattcaccgatggtttcgggcggcaatttaccggccttgcgcacggcgatgaaacccttgcccagatgggcggccatggccgggccgaacaggaacccgcgcgattcgagaccggcaatggagtcgaattcgctcggggacaccggcagagccgtttcaagcgccttgagcagaatcttcaagcccttggggtcggcgagcactggcatgaaatcacggaagataatgccttccttgggaaaccccggtatggaacgcaccaaggacaccagatattcggcgtcctgttgccctaccttgctcaatgcgtcgatggtgatgtccgactgtgccatagtgctcgccccttttatgcctttgcgatgcgatactcggatggtgctaccgaatcgaacagcttacttcgtcttggtttcgttgtcgtcaccggtctcgtcagcggtgtcttcctcggacacgacggacgcctcgatcggaacctgaccagcctcatcgttagccggagcctcggtgtcttcgtcgggcagcgggttgccgttctcgtcgacctcatcatcggacacataggccgggcgggtgtactcacgggcgatggcgttgaagccgaaacgcagcttggagccttcggagtcgatgacgatctcctcatactgctcgtcgacttcgacgaccttgccgatcacctggccgatggtgatgacctcggtgccgggctgcaggttgcgacggaagtcctgcttctcctgctgttgctgcttggccttcttggactgccaccacatcatgccgccgaacacgacgacgatcacgatgagcataatgtactgttgttccacgaaacaactccttcaaacgagcgacattgacgaaacgccgccaagtgtgcaaacaggagaaagtctagaagagcttgctgacatcatctttgggcgtaattcccaaatgctgccatgccttctcggtagccacgcggcctttgggcgtgcgaatcataaaaccttcgcgcacaagatacggctcgcacacggtttccacggtttccgattcctcgcccaccatggccgccagattgttcaggcccacgggtccaccgttgaagttgcgcacgatggcattgagcacggcgatgtccagccggtcgaggccttcggagtcgatctggtacagggccagcgcctccttgacgtcgtccggccgcaccacgatcaggtcgtggacgatggcccagtcgcgtacacggcgtagcaatcggttggcgatacgcggcgtgccgcgcgaacgcaacgcaagctcatgagcggaacccgcatcaaggtttacgcccagtacgttggccgaacgttcgatgagcttttccaactcctcatgcggatagaagtcgagatgtgcggtgaagccaaagcgtgcgcgcaacgggcttggcagcataccttcgcgcgtggtggcaccgatgacggtgaatcgcggcagggtcagcgggatggagcttgcgcccgggcctttgccgaccatcacatcgacgcggaagtcctccatcgcgatatacagcagctcttcggcggcgcgcggcagacgatggatctcgtcgatgaacagcacttcgccgacgtcgagggagctcagaatcgaagcaagatcaccggcatgttgaaccgcagggccggaagtcacgcgaatcggcacttcaagctcattggcaacgatcatggccaacgtggttttgcccaagccaggagggccggcaagcagaatatggtccggtggcacatcgcgtttgcgggccgcgtccaggaacagttgcagctgggccttgagccgtggctgtccgataaagcctccgagaacatgggggcgcagctcctcgtcgctgaccggctcgttgccgatcggctgggaggagaccatgcgcaacgactcttcgttggcaccggtgtttgaggtaccgtaatccgttgtctcgctcatcagcggcccctatccatcagcgccaaagccagacgtagcacacgcggcacatcgtcggtggcaagcggcgtgggaatatcgttttcggcgcaagcctcggcaacggcctgctgggcgtcctgctgacgccagccaagtgaaatcagtccttcgacaacctgttccgtaccggtatccaccggagacttggatattgccgcctgagcggaagcaccctcgatctgactcaaatcaatagagcccttaagctcgaggatgattttctgtgcgcccttcttgcccagccccggagccttggccagcgcggtggcgtcgttgtcggcgatggcgtgggccagctgactcggcgtcagtgtggagagtaacgattgggccactttaggtccaatgccggagaccttgatgagttgcagaaaggttttcttggcgtcccgatccaggaatccatgcagggtaatggcatcctgagagaggttcatataggtgaagacgcgggtgtcttgcccggcgtgcagacggctcaggtcggtggcggacatgcgcacttcgtagcccactcccccaacatcaatcaatgcggtatcggtttcgaccgattcaacccgcccggtcagcatgccgatcatacaggtactccttcagggctccaggattcaagactcgaacaactgttcgaaagtatactacatgcctcggtcgtgattgatgcggcggcgcgtggatttctgtgcggcctcagcccactggcgttgcgcggcggtcagatgttgttcgcgttcgccgccctgcaatgcgcctgccgggcgcagcgcatggcaaatggccaaagccaaggcatcggcggcatcggcgggagtcggcattttggtgaggttcaaaatacgtgtcaccatacgctccacctgaatcttctgcgcctgcccgttaccggtgatagccagcttggcttcggtaggcgtatgcaacgccacgggaatattgcgttgcgcggcggcgagcatggcgaggccggcggcctgtgcggtaccgagtacggtgttgcggttggattgtgcgaacactcgttcgatggatacggcatcgggtgcgaagcgatccattttctcggacaggccgttgtagatggccagtagacgcagatcctgggtgatatccggtgaggaccgcaccacgtccacgtgaataaacgaaagccggcggtgctcgccggcttcgatcacgccgaccccgcaacgtgtgagcccggggtcgacgccaaggataatcacgaggattactcctcgtcgagctgggccatcacctcgtcggaagcggtccagttggagtagatgttctgcacatcgtcgaggtcatcgaggttgtcgatgagcttggacaccttgcgggcatcgtcgaggctcaactcgacctcgttcttcggctgcatgacctggtcggcggaatcgtagtcgaagccggcgtcctgcagagccttgcgcacggtgaacaggtcggacggaccggtcacaacggtgaacacctcaccgtcatcggtaacgtcctcggcaccggcttcggcggcggtttcgaacagcttgtcgaagtccacgccctcggacggcaccacaatctggcccttgcgctcgaagttgaaggacacggagccggaggtggccagagagccgttgcccttggtcagggtggaacggacttcggcggccgcacggttgcggttgtcggtaaggcattcgatgatgaggccaacgccggcaggagcgtagccctcgtagacgatgtcttcgtagttggcggcgccgtcttcagcaccggcaccacgcttgacggcacgagcgatgttgtcggccggcatggaggccttcttggccttgtagatggcatcgtacagggacgggttgccgtccgggtcgccaccgccgaggcgggcggcgatttcgatgttcttgatgagcttggcgaagagcttgccgcgcttggcgtcgatggcggccttcttgtgcttggtggtcgcccacttggaatgacctgacataatgctcctagcaattattgaaacggatgatgtcaaacgaaacgattgtaggccgttaatcagacatacccgtgatgtttccgatgattgtcttgttatgcgtaccgataagaccggtcacgcggggtgccgcacctgtgttaggcaagcggcagatgatactgcggagccagctgttcgaatgcccgggcataggcttctcgctggtcggacagcagaataggcatggtgcgtgtctgggcgacgatgggcatgaagttcgcgtcaccattccagcgaggcactacatgctgatggaggtgagcggcgactcctgcgcctgctacttcgccctgattaatgccgatattgtaaccgtgcggacgggagacggtttccatcaccttcatggcgagggtggtggccttctcgaattcgaacagttcggcatcgtcgagttcggtgatgaatccgacgtgacggtacgggcagatcatgagatgcccgacattgtatgggtagaggttcatgatggcgaacacgtgcgtgccacgccaggcgatgaggccgtcttcgtcggatttcttgggtccggcgcagaacgggcattccttcgtcttgggcttggttgggcgatcctcgctgttgcgcagcacataggtcatgcgctgcggagtccacagtcgttcgaccgtgtcttcctgaggcggaaagtccgccggattatcgacacgcacgtcagtcattttcgcaccctttcttggctcccctctctgaggggagctgtccgtgaaacggactgaggggagtgcgagccatgcaggactcccctcagtcgcctacggagccagctcccctcagagaagggagccagtaccattcacatcactcagccacagcggcgttgaagtcgtcggcggagttcacctggacgcgcttcttgatgacggtgaggatctgctcgcgggccttgtccaccggaacgccgttgagctggctgccgtcacggaagcggaagctgaccgcgttgttgttcatgtcttcctcaccgacgatgaggatgaacggcaccttggacttggaggcgttgcgaatcttcttgccgaagcgatcgtcggagtagtcgatctcgcaacggaccatctcgtcctcaagggacttgacgaaaccggccagatgcggggcgaactcgtcggcaaccggcacgccgagcacctgcacgggggccagccacgccgggaaggcgcctgcgtagtgctcgagcagcacggcgaagaagcgttcgatggagccgaacagggcgcggtgaatcatcaccggacgctggtgggtaccgtcctgcgcgatgtactcgagctggaaacgctcgggcaggttgaagtcgagctggatggtcgagacctgccaggtgcggccgatggcgtcgcgggcctgcacggagatcttcgggccgtagaaggcggcgccgcacggatcgtcgacgagctcgaggttggattccttggcgacctcggcgagcgtgttggtggcctcctcccagatctcgtcggagccgacgtacttgttcgggtccttggtggacagctcgaggtagaagtcggtcaggccaaagtccttgagcaggttcagcacgaaggtcagcaggctggtgagctcgtctttcatctgctcgcgggtgcagtagatgtgggagtcgtcctgggtgaggccgcgcacgcgggtcaggccgtggacctcgccggacttctcgtagcggtacacggtgccgaactcgaagaggcgcagcggcagctcgcggtaggagcgctgacgggacttgaagatcaggttgtgcatcgggcagttcatcggcttcaggtagtagtcggcgcccggcttggtgatgttgccgtccgcgtccttctcctcgtcgaggtgcatgggcgggtacatgccgtccttgtaccagtgcaggtggccggaggtctcgtacaggccgcccttggtgatgtgcggggtctgcacgaagctgtagtggtgcttgcggtgcatctcacgggagtagtcctccatcgcgttgatcacggcggcgcccttcgggtggaacacggccaggccggggccaatttcatccgggaaggagaacaggtccatctcggcgccgagcttgcggtgatcgcgcttggcggcctcctcgagacgggtctggtaggccttgaggtcttccttggtggcccacgcggtgccgtagatgcgctgcatggtcgggttcttctcggaaccacgccagtaggcggcggcggaacgctcgatcttgaaggccttgatgtagcgggtgttcggcaggtgcggaccgcggcacaggtccttccaaaccacattgccatcacggtctacgttgtcgtagaagctgagctccttttcggagatctcggtggcggcggccgggtcgaggtgtgcttccttgtcttcgatcagttcgatcttaaagggctggtcggcctcttccttcagagcctcttcctcagtcacggaacggcggcggaaggactgggaggacttgatgatgcgctgcatgcgcttctcgatgtccttgaggtcgtccggggtgaagggctggtcgacctggaagtcgtagtagaagccgtccttgatgacggggccgacgccgagcttggcgttcgggtagacttcctgcacggcctgggccatgacgtgggtggccgagtgacgcatgattgcgaggccgtcttcggagtcgagggcgatggggtcgacggtatcgccatcgttcagcggcgtgtacaggtcacggttctcgccgttgatcttgaccgcgatgatgttcttgtcttccgcgaacagttctacgccggtggtggttgcttccacctccttcgcttcgccgttgacggttatggagatggtagcttgcgccatgatttgtcctttgctatcggggcccacggtactaatgtgcaggcctggactggttaatcaacgtaggacacgataggttgggcgtgcgacaaataccaccagcatctgaaccaatacgaaaaaacctcgccgaagcgaggtttcgttgtggagcggacaacgggactcgaacccgcggtctcaaccttggcaaggttgcgctttaccaactaagctatgtccgcaaaggaatccgccgtgagaagcggaatccagtgggcgatgtaggaatcgaacctacgaccccttcggtgtgaacgaagtgcgctagccgctgcgccaatcgcccgaatactcggttcttcagttatatccagtcgaattgcttcgactttcgtgggcgatacaagattcgaacttgtgaccccttccgtgtcagggaagtgcgctaccactgcgccaaccgcccgggtcatatttcatcccattgaattgcttcgctggtctgagaggtgggtacgagagtcgaactcgtctatacggctttgcaggccgctgcctaaccgcttggctaacccaccgtaaggtctgtcaactcacggacctagagcggacaacgggactcgaacccgcggtctcaaccttggcaaggttgcgctttaccaactaagctatgtccgcgtgtgtttccttggcgaggtctccctgccgaagcacgagtgttta

SEQ ID NO: 2777 - DNA, 6025 bp, Unknown
  R36_18m  MAG No. k141_16904
cagctcgtcgtccgacagctcacgcacgtgcacacccatcgattgggcacgcttcacgctccactgggtgcgcttgtcataggacttcagcagacttttctcatcggtaatgccggtcagatccttgaggtagcgccaacgtggaaccgccgtgtagcccacggtgaaaccgccatgagtgaagccgatcgcctcgagccgttctatcagcttattgtcgggagcgccgttctggtcatccggcaaagaagctccattggtgtcgcgaaaccgatacggggattcaggggtgatttccagctgtgaagcaccctttgccttggcatggcgtttcagcgcatccatgaagaaggtcaatgcttcggtgtcgtgatagtcgcacatcgggccatcatggatggccgcaaatgtagagaatcgagagcggtgagtttcgaacagcgccgccgcgacgatcttctcgccctccttgagggccagatattcgacgtcgatcccctgcgcggcgcgaaggcgtcccatcgccgaggtctgttggaaattgccttgtggatgcctggcggagaaatcatcgaactcttcgtctgtcaacttcaccagcacaaaatcacgcatgcttccctctgcctccgagtcaatcaggctcaccatgctagcataacgcgcacacgacgaatggggtccgagcagatgaggtgtgcacatcgttcgcactattgcctccacaatggctcaaagaacaatggcccgaagatgctgaacgtccggcttgcgttgaatcaaacgcagtgctatattctctacttggctcttggagccacgccaccttagctcagtggtagagcatccccctcgttcgtgggaaggtcggtagttcgattctatcgggtggctcttgttcatcaagaaggccgacgcactaagcgccggccttctttcgtatcgcccttgctaggtcataggcgcttgctagacacttgcccgattcgggaggggctgagttgctgagccgcgactcaactgtggcttagtcgcggctcagtgcagctagacagcctagacgacttagtgcagcagcgcctcgatagcggggaccaaggctttcagcgccttgcctcggtgggaaatcgcattcttctcggccggagtcatttcggcgctggtcagcggctcgccttcatggtcaggctcagtgctgacgcgaccggcaggctggtcgtccgggacgaacagcggatcgtaaccgaaaccgtgttcgccacgagcctcgcggatgatacgacctggcatgtcgccgagttccactgtctccgacttgatggcgtaccgggcatgcaccggggcagggctcccatctgcagccgtggtgtaaacggtgatgccgtcggcagccactccaccggtcacgtcggcactggcctcggtgtccgggaccaccagcgcggcggcgcagcggaagcgcgcggtacgcttgtcatccggaatatcttcgatttgggcgagcagcagcgcattattggccttgtcgtggccgtgagcacccgcccagcgagcagacagaatgcccggagcgttacccatcacatcgacgatgagacctgaatcatccgctacagcgggcagaccggtacggatggccacggcgcgggccttgagcagcgcgttctcctggaaggtgacgccggtttccaccgggtccggcaggtgaaggctaccagcggacaccagttcgatgttttcggcatccgcgccaagatcctcttcgagaatgcggcggatttccacaagcttgccttcgttatgggttgcgacgacgatttgcatgggttctcctttaagaaggctccccttgtcaggggagctggacattgcagaccgtacggcttccagccgacaacctcccctaaaggaaggggagctggcttagtctagggacaaagcggcacgctgggcggcttgcagttccttgttgcccttttcggccaagtcaagcagggtgccgagttcggcacggttgaacggacggtgttctgcggtgccctgaatctcgatgaaggtgccggaaccggtcatggccacgttcatgtcggtcatggcctgactgtcttcaatgtatggcaggtcaagcatcggggtgccgttgatcacgcccaccgatacggcggacacatagtccttaagcacgcggctggcggacttgatatggcggtgcttctccgcccaattgactgcgtcgaccaaagccacgtacgcaccggttacggaagccgtgcgagtgccgccatcggcctgaagcacatcgcagtcaagctgaatctgattttcgccgagcgccttcatatcgatgacgccacgcaggcagcggccaatcagtcggctgatttcgtgggtacggccaccgattttgccacgtacggattcacggtcggtgcgttcggcggtggcacgcggcagcatcgagtattcggcggtgacccagccgaggccggagtccttgcgccaacgcggcacaccaggggtaaaagtggcggtgcacatcacgcgcgtgttaccgcattcgatgagcacggagccttcgggggcgtcggtgaagtggcgggtgatgcgcacggggcgcagctcgtcgaccttgcggccgtcggcacgaattatttggtgattgccaagcatgtctttgatttcaaccatgcgccccagcatacgccatccgctctatgcctggatagcaactcgtcaaccatcatcaaaccccagcgcaatgtcattccctgcttacatatccattccatgacacttggctgcacgccactattttcttatgcaccactcgcttacagagtcaatgcctgcgtacctgatgaggattgggaaagatcgtccgctggaataagaatgccatattccatgaaatcttggttgaattgcttgcgctgcatagcgttgagttcgtaatcgattaacggcaaatatgtatagtccatgtcatgcaacggctcttcatatcgatgaagcacgtgcataattgccgcgctcggcagtggggaccaccatccatccaagccataccggtacggaggaaccaatgtcaagcgtctgttccttgggttgatatcccaacgcagaaaacggtataaaccagcgagaaacgcaatccagcacgcatcgttcacccgtgcaaccgctcggacgaacgatatacgttgatgttggacattccgagcatgaatcagattgacgcagagcatcttcaacgtagaccaggtcgctccgctttctattgcatcgaaatcaggaggcctacgcagttgcgccaacaacatgtgcaattcgtcttccggaatcgtttgcgagggggccacggcttctaggtgaagaccaaaaccagcccgctcaagcccctcggccaaaacatcaaacaacatacctctttgcccacgcaatacgcgaccaattgcagaccgatccaaaccagtacgctgtgcaagctcataggcattccaaccagtctgcgacatcacttcattcagcacagccgcacacgaattaacagggcaaccagataccacaccgtgatgcacgacatcgcactgttctaacgctcgatgctctacagcgcgccgctctgatacgtcatcgttgcccgccgcgttctcatcattgagagtttcactcatcgaagtcaccttgcctcggccgatttcccggtcatttcatcaaaccgcaatcatcatatcccacaatcccatgacgatacgattcgtcatatcccacaattcagagacggtatgattcgtatcgcatcagttcacacgattcttcaacgattgctccgcaaacgattgctctgcacgcatcgcggcattctatcggcacactattcctcccaatcagcccaacgcaacatcacacgcaacacccctcacgcaacacccctcacgcaacactgcgccatctctgtaacatcaccgacaacacggcaatcccacaacgtctcggtgcaatatcctctgaaatggtttggtttttcactccacctcgtcggcatcctgaccaggataggaatatgtgtcgttccgcaccatgtacaaaacgttgtcaactgacaacgttcttcaaatcaattggataagacaaatggccatttcccgccaattcatctgaatcaagacgttgtcaactgacaacaaaatgtacattgcaacagcatgcacatatacatatttccccagtgaacagtacccccccccaaaaaaaaacaggggggccaccctcagctggaaccacgtccggcgaaccgggacgcagttcagcccgaggggacgcggccaatacagccccgggacacagccacaggaggtgcaaacacgggggtgcgaccggggttggatctccccgcctcggcggcgatcacaggagtgcggccaacacagacagaggggcacagacagagggaagagtagccaatgtaaccaaagggatgcggccagtgagatacggtcagagaacctgagtctccgtaggaatcactggctcgcccttcatgaggctctgcgcggtgatgggcagttcggacaacgccttggcgtggtagtcgtgggcggccatgatggcgtcatggccctgccactgagcgtcgatctgcccatgatccacaaagtcgaccagcaggttcttccacgtcggttcaggcgtgaaaccggccagcttctcctccgagccggaaatcacgtgttcgacttcggctaacgcgtattcgtaggagcggaatgccagtttgcgaccgggcactgtggccttgtccttggatttcttcatgaccggaaccatcgtgccgtcatcgccttcacgttcggtgagcttgtacaccatcgcacaagtgggagcgccggagccggtgaccagcatggtgcccacaccataggagtcgaccggcgcggtctgcaatgcggcgagcgcgtactcatccaaatcgttggtcacggtaatggtggtgttcgtggcgcccagggcgtccagctggttgcgcacacgctgggccatggcggctaggtcgccggagtcgatgcgcacgccacccagttcgggaccggccacctcgacggcggttttcacggcttcctcgatgttgtaggtgtccaccagcagcgtggtgttcttgcccaatgcctcgatctgcgattcgaaggcgtcacgctcggaatcatgcaccaacgtgaagcaatgcgcggcggtgccaatggccttcagaccatacagctgggcggccagcagattggcggtacccttgaatccgcccactacggcggctcgagcggcggccacggcggcccactcgttagtgcggcgtccgcccatatccatgcaaggacgatccttggctgccgacgccatacgtgaggcggcggaggccactgcggaatcgtagttcagcacggatagaatcaacgtctccagtagcgtgcattcgccgaacgtgccttcgacctgcaaaatcggggagttcgggaagaacatctcaccttcgcggtaaccgcgaatcgtaccggagaagtggaagttctccagccacttgatggtctcggggcttaccacgtgacggtcggccaggaacttcagatccgcttcatccaagtggaaatgttccagcgcatccagaatgcggccggtgccggccaccacgccatagcgacggccttcgggcaggcgacgcgtgaacacctcgaacacgcatttgcggtcggcggtaccgtctttcagagcggcgtcgagcatcgtgtattcatacatgtcagtcatcagagccggcgaataatcgaccattgcaaggcctttcctacataagtggtgaagttgcacctaagtgtagtccgggcaaagccatacagcccactggcgaagcggtagactcgatgcatgagattcatcgtggcgttgtggcgctttgcgatcgccggtttctgcttcgtgggcacatatgaggcatggtccaaaccgcagttctgggtgtatttcacgttccagaccg

SEQ ID NO: 2778 - DNA, 7960 bp, Unknown
  R36_18m  MAG No. k141_16930
tgccgccgagcctgtccagatggctgcctatatgaaccagtgacaggaaatcgcgggagagcaaacgagaggagtgtgcatggggcagttcggcgtcatgattggccagttagtcggatttctgatcatgctgatggtcggatacggatgtgtgaggctccggttctatggtcagacggcgttggacggcatgtgctcgctgctgctcaacgtgctcatccccgtgcttgtgttctcgaacgccgtcgacggcgcggaccgcgcgcagcttgccgccaactggggcgtgatgctgctgaccgccgtgatgtacgcgctgctcatcctggtgttctggctggtcgccgaactgttgcggctcaaaggttcgcgtagccatgtatttcaggcgtcgcttattttcggcaacgccggattcatcggcattccgttgattatggcactttggccgcagaacggcgcgatttacgtggcgctgatgtcgatcatcgaccagacgctgctctggacgtacggcgtatggctgtgcgagccggtcgacgaaacgactggcggcaacgcgattggcgcgcgaggtgcggtcgtgaacggttcggtgaacgacgccggttcggtgggcaatgctggttcggcgagcaatgctggttcggcgagcaatgccgcaaacggtggttctccggccgtcgtccgcccctcgccaggcacccgcgtcctcggcctgcttaaacgattcgtcaatcccgccttcgtcggcgtgatgctcgccctgattctgattctgctcggcgtcaaggtgccggacatcatcctgaagccgctgcacaccatcggcaatatggccacgccgatgtcgctaatctacttgggcggcctgttcgcgctgaccaagtggtggggcgtcctcaaacgctacgaactctatgctggcctagtcgccaagatgatcgcattcccgctcgccttctacgcgctactgaccgcgctgaccggcgcattgccgcaactgccgatcacccatgacatggtgctgatgatcacggtcatcgccggactgccgaccatgaccaccattgccatgttcaccggtcgcaagaacaacatgcccgagtatgcggtcggcttcgtgcttgtaagcacgctgttctcgctggcctccctgacgattgtgtcggcagttgtgttctgaattgtccccttcgacgaaaagaatgccgggggcctccggcgcttggaatctcatcgacgccgccaacgactcggcatccgaggcggccgtgccgtatttcaaggagatattcgattacgcgcgcacgctgcgatccgcagcatcgcccgctgacctacaccaatctgctgatggccgccggaggcaaagacaagtgccatcagttcgcggatgtcatctgcctgaaccggtattacggctggtatgtgcaagatgggtatcagctcatcggagccaagaaggccttcatcaacgagatgaaccaatggatgaacaccgaacccaacaagccattcctgttcaccgaatacggtgcggacaccgatgccggtgcgcacaagctgccaagcgtgcagtggagtgaggaataccagtgtgagtacctcaccatgcagcacgaagtgttcgacatgttcgaggcagtggtgggcgagcaggtatggaacctctgcgacttccaaaccggtgaaggcatcatgcgcgtcgacggcaacaagaagggcgtcttcactcgcgaccgtcagcccaaagccgccgcctatgtactcaaggagcgttgggagactaagtagcggcccgcccctggaatattccaggagcaacacacatcgcataacatacaacgcaacatacaaaaaagaacctcgtgaaacgaatttcacgaggttctttctagttacgctgaatgactcccattagactcccacaagagaagagcaatggcggaattccaacgttgctaagctctcaaactcagatgtggaagtagagctcgtactcgagcggggtcggggccaggcgagcctggtcgatctcgtcgcgcttgagaccaatccaggtctcaagcaggtcgtcggtgaacacgtcgccggcggtgaggaagtcgtggtcctcttccagggcgtccatagcctcggccagggagcttggcacctgcttgatgccagcgtgctcttccggcggcagctcgtagagatccttgtcgaccggctccggaggctcgatgtggttcaggatgccgtccaggccagccatcagctgagcggagaaggccaggaacgggttgcaggacggatccggagcgcggaactcgatgcgcttggcagccggggaggtgccggccagcggaatacggatggcggcagaacggttacgagcggagtacaccaggttgaccggagcctcgaagcccgggaccagacggtggtaggagttcagggacgggttggtgaaggccagcacggaggaggagtgcttgatcagaccgccgatgtaccagcgagccagatcggacagaccagcgtagcccttctcgtcgtagaacagcggcttgccgtccttccacagggactggtggcagtgcataccagtgccgttgtcgtcggcgatcggcttcggcatgaaggtcgcagccttgccggccagagcggcggtctcgtggacgacgtacttgtacttcatcaggtcatcgcctgcgtgctgcagggtgttgaagcggtagttgatctcctgctggccagcgccggcgacctcgtggtgggaacgctcgaggatcagaccgaccttctgcaggttggcgaccatatcgtcgcgcagatcctgggtgtggtcaatcggcggaaccgggaagtagcccttcttgacgcggttcttgaaaccgatgttcggggtgccgtcttcctcaacgtcaacaccggagttccacggagcttcgatggagtcgacctcgtagaaggagcgctgcatggagttctcgaaacgcaccttgtcgaagatgaagaactcggcctcaggagcgaaggatgcggtgtcggcgatgccggtggacttcaggtaggcctcggccttgccggcgacctgacgcgggtcgcgggagtacggctcgtcggtcagcgggtcgacgatggagaaggccacgtcaagggtcttgtgcttgcggaacgggtcaacgaaagcggtctcaacgtccgggaccagcttcatgtcggactcgttgatggcctggaagccctgaacggaggaaccatcgaacggcatgccgtcggtgaaagcgtccttcaggaattcgctagccggcacggtgaagtgctgctgaacgccgataagatcggtgaaacggacggagacatactcgatgccttccttgttgataagggcctcgacgtcttccttggacttgagttcggtcacgggaccgctcctttcgtatgagatataacggtatatatcgtaaaatagcgcgtttcgccggctcgaaacttgggttacgagaatgtttcgtgactgtggccgacaatcgcgcaggcgcgttatttcaacgaaacatcattacagaatggaaacggagactatcgggggagtaggtagagatgtccgcaacgtggacagtgggtattgacaggtgacgtaggtggatgtaagtggacgcgattatgagacatatgacgaagccccggaaccgattgaacggattccggggcttctgtgcgatttggttgtgtgctgccgatcagcgaccgcgcatcgcgcggcgggagatcttctgcgggcggttcggatccatgcccttggggatggcatagcccttcttggcctgcagcgtgcgaagacgatcgttcagcgtttccatctcggccttggtcagcaggaagcgacggcgcggatgaatcttggcgatcagtgcgttcttgtggtgcgtgggctcatagctcttggacttgatcaccgtgctacgcagcttggccagcggcacctgcttggggccgtggcccacggcgatgcggtatatcggaatggaggagccggcggtgacgcccttgatatcgcgttcctgacgatccatcgccttcatgacgcgaccgtattcgccttcgccgatcaggtagatgccgttcatcgaagtgccgcgccagatggcatccttggtcttcgggtcgatccacaccggttcctgcgggaagtcaaagccggctttctgcatgttgctcagcacgccgatggcggcaccaggcttgccatcaatctgcttgtagccgactgcatccgcgcggcgggtgagcatcatggtggccagcagaatgccgagcatgatggcggtaatcatggtgaagatccaggtcagccaggtccacttgacaatcagaccgatgatgatcatcacgactacaggcagcaggaaagcaccggcctcaagccacggcagggccttgtcttccttagccgtgtacttgtagatctggatgatctgcttgattgtgctctgcttcttcggcttcgcgtccttttccgccatcacttcttcctttgttgggacgaaacacactggacaatatcttatcaggtgcgctggtccgaacttgcttgtgctggttggtctcagcgtgtgtgcaacggtcgtccgtcggccttgagcagcgcctcgccgagcgtttcactgaatgtgggatgcgggtgaacgaggcgggctgcgtcggcgagcggcacatggttgccgaccagctgttcggcttcggcgatgatgtcggaggccatcggggagaccatgtgcacgccgagcacgcgcggggtgtccgggttggccgcgtcgcagccggagacgatggtcaatgagccggccgtgccgctcatcagcatgcgcgcgttcgccagcatcggatagttggtctccttgatttcgacgaggtcctctctcgcctgcgcctgttcgacggtgagcccgaccgacgccgcttcggggaaggagaacacgatctgcggcacagcggcttcgttcaccggcttgggattgagtccggcgatggtctccgcgatgacgatgccttgctcaaaagcacgatgcgccagtgcgtgaccggccgtcacgtcgcccaccgcccatacgcccggtttgtcggtgcgaccgtacgcatccgtggcgacatgtccgtggtcatcaatcgtcacgccccatgctgggtcggtgatcgggtcacgcccgatggcgacaagggcgatttcgccccaaacgctctgttcgccgtcctggccttcgcgcgtgtagtgcacggtggcaccaaggttcgcgccggtgtccacatgggtgacgctggcgcgggtgatgatgttcacgccatgacgtttgagctcacgggtcagcgtggtgccggctctccggtcccaggctgagagcacgcggtccttgcgaatcagcagggtcaccttcgaaccggcggcgttccacatcgaggcgaattcaagggcgatggccccggcgccgataatcaccgccgaagagggaaattcgttgacttccagcgcctgtgtggagtcgatgagggcgccggcgaacgggttaccgggcaatgggtgtggcttggcaccggtggcgatgacgatgttcgtggccgtgaggtccatcgtggggccgctgggttcggggacatcggccttgtgataggtgaggatgtcgctttggtcgggggagggaacgaggtggacgatgtggttggaagttgctggagtgatctcatccgcatggaacgcggcattggctcggaacacggtgatgccgcgatgggccagcagtccggccagtcctcccaccatcgtcttgaccacgcgcaggcgatagtcgcgcagcgtgccgaagtcgatgccattcaccgaggcgttgacgccgagttcggccgcacggtgcacggtgtcgatggtgtgggtggcggtgatgagcgccttggaggggatgcagccacggttgagacaggtgccgcccacggtggcgtcacgctcgacgagtgccactttcatgccgagttcggcggcgcgcagggctgtggaatagccgccggggccggccccgatgatgaccagatcaaactgttcgctcatgattgcctccttggtgcatataagtatggctcccatgctagggagccatatgcggctatcgccgccacttcgcctaaaaacagtccactggactgttttctttacggctcagcccctcaacgaggggagccagagtatatatggacaatcagtccgccggccagtgaccgcgcttcgggtaacgcggcttgggaagcctccaacgacgcatctgaatcgaacggctccaagcgtaggagaaggagcgggagcccttggacacggactgttcgccgtacttggcgatgagcttggccttgagcttgcgccacatcagccatacgtcgatgatcacggcaatcaggtaaccgtacataagcgccatcatgatgatggaagcccactggttctgcatcaaagaagtgacgaacatggagacgatcagaatcgcgaaggccaccgggatgaaccattcgccaaggttgaaacgggcatccacataatcacggatgtagatacgccaaggcaggcgttccgccttgggcatgtggttgatatcgcccttctgcatcgcctcgtactcggcgttctccttctcacgcagacgggctttggcggccttggcgctggccttgcggtccaccggaaccagcggacggataccggcggcctgagcctgcttcatcttcggggtaggacggccttttttctcagaaggatcggcggtcttcttcggggcctgctcaacgggaacttgagcctcttcttttttcctaaacggattccatgtcatgctttgaggttacggtgacgttcagacacttgtatactggcgcagccattgcaatgacgccgcttacacacatataaaggaggaccatcatggcaacgctcaccgctgacgagattcgttcgcgcgtcgaaaccgattggaaccgcatcgtcaaggtgctggccgaaaaggttgcgctgcagtcgatctccgccaagggcatcaccgccgaacatatgaagcgctccgctgaattcgtggcagacgaactgcgcctcgtgggtgtggatgccaaggtggtccaggcttccaatgccgacggcactccgggcgcatgggaggtcatcggctcgcatatcgtttctccggacgcccccaccgtgctgctctacgcccatcacgacgtgcagcctgttccggacccggccgagtggaacaccgacccgttcgtggccaccgaaatcgacggccgcctttacggccgtggctccgccgatgacggcggcggcatcgccatccactccggtgcgctgaaggctttgggcgacgacctcaacgtcaatatcaaagtgttcatcgaaggcgaagaggagatgggctcgccaagcttcattcccttcatcgaggctcaccgcgacgaattcgccgccgacgtgattatcgtggccgattccggcaactggtcggcggacattccttctttgaccacctcgctgcgcggcaacacttgcgtggacgtgaccgtgcagggccttgagcacccggtgcactccggtcagtacggcggcccgattcttgactccaacacgttggccgccatgctcatcgcttccatgtacgacgagaacggcgatctggccgtgcccggcgtggccgcggaagagccaatcggcggtttgcaacgcgaccttgacgaaaccaccgtgcgcgaggattccggcgtggtggccggttacgagttcgccggcaccggttcgctggcctcacgcctgtggaccaagccgtccgtgaccgtgatcggcttcgacgcccacccggtcgagggatccttcaacgtgatcgccccggagacccgcttccgtctgtcgctgcgcaccgcgcccacccagcgccctgaa

SEQ ID NO: 2779 - DNA, 3631 bp, Unknown
  R36_18m  MAG No. k141_17328
tagggcactactactcgccgcgccatccgcagaaccgctcatcgtgtctgagccgccatcaagccaaggaatggccacgccaccacgcgacaacatccacaccacaacggcaatgccggcaaccgccagcgccaatcgcttatcggcgtatccggcaatacccaccgccaataacacggcgagcattgcacccgacggcatccagatcggactcatgcacaacactatccaagccaccgctaccgccacgcatccggtgaccggacgaaacgccatccaccccacaatggcaacgaatatgaactccgcaaggcagtccgccgccgagacactgtcagcagccaagcccgccatggtttccatcgtgcatatcaaggcaacaaccagtatggcaatcaacagccatgcattgcgaacaccgctatccagctcggccaatcggtgtcgtaacgctttcatagcagttcctttcctaccatccatgccgttgcacatgcagcccatgccaactcttaaatctcatgccgtttcacgcagatcgatatggcatgagcgcgactgcgagcgccgagtttggcgagtgcgcggcgttcaaaagtcgccacagtggccacgctgatgcccaatcgctcggcgatttccttggtggtcaccccatccgcatacatacgcagggtgtcgcgttctttgccggaaagcgcgccacggtgcgcgtatgacgtatcttcgagcaccgcgtaggcggttgcggcatccatgaaggacagcgaattaccgctcccctcatctcccagtaccagctcattggtcgacaatccttgggctgcattgcgaatagcgagcgcaatgccgttcaaatcggttttaccaaccaaggcctgcgccccgcagcgagccgcctcgtcgtgaaatgacgcgagcgcgtatgaggtgacacccaccagcccaacctcgggtgttttggtacgaatcgcacgacagacttcggtaccgggcacgtcgcccatagacatatccgtaaccagcacgtcaggccgcttggtggggctcaggcatcggctgatggccacggcacccaaatcgcaggtccatatcacggcaaaatcgctggacatgcgctcgattagcgcgccgaacactttcagcgcatacgggtcattgtccacaatgccgatgcgtatgttgcggttgcgcgcttctcccattacattcaccccttcagtgtgcccgacgccgaactgctccgtcctgacatgtcatggtcactatgacaactatcattccacatttcctgcgcgatttacgatggaatcatcatcaatccttgacaaggcggtaaaggaggactgcaatgaaccgtgcacaagcactcagcaagctcaacaggagcgatatgcgcaatgccgccgccgagcgcgggacgcaacgaatattcgcgtggaaccgcgcgcattggattggcatggttgtactgatagcggtgttgttgctgctgcagtggagctcatcaatgtatctcatgcccgacgaggtccttgacagggctgccaaaaacctgttcgtatggttccccggtatggttctgcactggccattggtgttgggaatcaccagcctgatactcggttcgatacgatccggcagtctgtctttcccattggcgagcgcaatcatcggaccgctggcattcggctgtaccaatcttcgcttacggccggggttcccataccgttcctgggctcagtggtggaagctaatgcacgctgaaagcggccatcagctattggttcattcgttgatcggctcggccatgctgttgatctgttatacggccgttgcgttcatctgctatgcaatcggacgctacggtctgcgcgaattgtttgtggatccgaatccgcagacggcgagcggacgactgctcacatggattcgtcaggatgcgattcgcttcggctgctggctggcgacggcaatcatgtacggcttgctattggcgctgaccttacggggcggcatggctgcgatggccgccgcgttgctaatcaattttgtgattccgcccgccttgctggtcatcaacggcatctacgcgctacgcccggcctcactgacgtatccgtggaaaagcctgctgttcccgttggcgtgcacactggtacctgcgccgatgctcatggcgctcatcacggtgtatgaagacacgtgcccgataggaagtacctgcacgctgatcggcgaccgatacctctcctggggctcgatggatcaggtcttgcatttcgtcatcgtgttcgccgtggcgagcttcctcggattcggcgtggtgtgggccgtgcggtggattgtggctcgtcgcacaaaataagagagaccaaaatatactggaatcaggggcttcgtgcaatgatgcacgagccgatccaagcaaaggggctgaccatgagcgagaaactgatggaacagtaccggttgcgcaaacaacgcaaacgccgtaacgcttgtatcgccgccatcgtgacagtagtgcttgtccttgccgtcgccggcggcgtatggtggacggccggcgatggcagcgcactggttcgcaatatgttcaagccgaaggccacgcctgccacacagccggtagtcgacagcaccgcagccttcgcctaccgcaccgcaccggaattcctggcgatgggagccggcgaccgagacaccggtaatgtgaactactcccctgcttcgatgtggatggcgttggccatcgccgcgcagggcgccaatggcacgacccgctcgcaactgaatgagctgctgggctccggttcgctggccgacagcgactaccaatcgctgctgagttcgatcaacgggcaatattcgggggcgaaatccgagatgagcgccgcgaactcgctgtggatcgataacgactactctcttgccagcgattaccaatccaccgtcaagaagatattcgaggccgaagtcaccacgctaccgttcgacgatcaggccgccgccaagatgtccgattggattgccaagcatacgaatggttcgctcaagccgaagatcacgctgcgtgaccgtgaagtcctgtccatcatcaacaccgtctatgcggatggccgctggaaggatccgttcgaagagcagtccaccggcgacggcaccttccacggcgaagccggagatgctcaggtgccgatgatgcaccggaccttcagccaaatgacttacagccatgatgagtacaacacttggcagcgggtggagattccattcgacaacagcggcaatctggccatcgtgctgccggccaaagggcatttcgacgagctggccggcaatgccgagaaactcggatgggcgttcggcacgtgttcgtcggcatcccctggcgaggacgcaatgggttgcaccgcggacagtctgcccggatggggcgtctccgtcaactcggccacggtgaacgtctcgctgccacgattcaccgtcgacagcatgttcgactcggaagccaccatcaaggcattcgaaaaactgggggtgaccgatgcgttcagtgcaggcgacgccgacttcaccaagatggtcgacaccgattcgcacggcgagaatctgtatatcggttcga

SEQ ID NO: 2780 - DNA, 17203 bp, Unknown
  R36_18m  MAG No. k141_17440
ccacgcttacggtgccatcatggacaacccgagcctgttcgtcccggccatcgtcggcgacggcgaggctgagaccggcccgctggctaccggctggcagtccaacaagctcgtgaacccgcgcaccgacggtatcgtgctgccgatcctgcacctcaacggctacaagatcgccaacccgaccatcctgtcccgcatctccgacgaagagctccacgagttcttccacggcatgggttacgagccctacgagttcgtcgctggcttcgatgatgaggaccacatgtccatccaccgccgcttcgccgagctgtgggagaccatctgggacgagatctgcgacatcaaggccgccgctcagaccgacaacgtgcaccgtccgttctacccgatgctgatcttccgcaccccgaagggctggacctgcccgaagtacatcgacggcaagaagaccgagggctcctggcgcgctcaccaggtgccgctggcttccgcccgcgacaccgaggcccacttcgaggtcctcaagaactggctcgagtcctacaagccggaagagctgttcgacgccaacggtgctgtcaaggacgacgtccttgccttcatgccgaagggcgagctgcgtatcggtgccaacccgaacgccaacggtggtgtgatccgcaacgacctgaagctgccgaacctcgaggactacgaggtcaaggaagtggctgagtacggccacggctggggccagctcgaggccacccgtaccctgggtgcctacactcgcgacatcatcaagaacaacccgcgcgacttccgcatcttcggaccggatgagaccgcttccaaccgtctgcaggcttcctacgaagtcaccaacaagcagtgggatgccggctacatctccgacgaggtcgacgagcacatgcacgtctccggccaggtcgttgagcagctgtccgagcaccagatggaaggcttcctcgaggcctacctgctgaccggtcgtcacggcatctggagctcctacgagtccttcgtccacgtgatcgactccatgctgaaccagcacgccaagtggcttgaggctaccgtccgcgagattccgtggcgcaagccgatcgcctccatgaacctgctggtctcctcccacgtctggcgtcaggaccacaacggcttctcccaccaggatccgggtgtcacctccgtcctgctgaacaagtgcttccacaacgaccacgtcatcggcatctacttcgccaccgatgcgaacatgctgctggccatcgccgagaagtgctacaagtccaccaacaagatcaacgccatcatcgccggcaagcagcccgctgccacctggctgaccctggacgaggctcgtgccgagctcgagaagggtgccgccgcttgggattgggcttccaccgccaagaacaacgatgaggccgaggtcgtgcttgccgccgccggcgatgtcccgactcaggagatcatggctgcttccgacaagctgaaggaactgggcgtcaagttcaaggttgtgaacgttgccgacctgctctccctgcagtccgccaaggagaacgacgaggctctgaccgacgaggagttcgccgacatcttcaccgccgacaagccggtgctgttcgcgtaccactcctacgctcacgacgtgcgtggcctgatctacgaccgtccgaaccacgacaacttcaacgtccacggctacgaggaggagggctccaccaccaccccgtacgacatggttcgtgtcaaccgcatcgaccgctacgagctgaccgctgaggccctgcgcatgatcgacgccgacaagtacgccgacaagatcgacgagctcgagaagttccgtgatgaggccttccagttcgccgtcgacaagggctacgaccacccggactacaccgactgggtgtactccggcgtgaacaccgacaagaagggtgccgtcaccgctaccgccgctaccgctggcgacaacgagtgataacacctccacggtgttgttagttcgctaacgccaaagggctcgggattcgtcccgagccctttgcttattcataagccccctctgacgaggaggctgtcatgcgaagcatgactgggggagagaaaagcggaagcgaaggcgagagccaagactgaaaacagcccataaattccccaccccaactaatccttaaggatgacaactccccatcaattcaatcctgcgcatgatggaaaccacgccattcctccataggcttggaaccagtatccgggcacgaggctcggagccagccatgggggagagcacatgcagaaggatcagcagcagaccgcaatcatacaaccgttggacgctaccgacaccgtggaatcaagtgtcgacgcccttgcccaaggcgaggcggagaacgcggaagtcgccgaattcaaccgattaatgcgcgaacgtgagacgcgcaagaaaaagcgcgtggtgcatcgcatcatcgccgtcgccgtcgtggcggtactgattatcggctttatggtggtgcacgcgattatcaccccgtcagatgggggcgtgtctccggtatccacggcaacggtggaacgtggccatttcgtcgaccaagtcagctccaccggttccatagaacccatcaactccaccgtcgtcgccccgcagatcgacggcaccatcggcgaagtcaaggtgcaggaaggcgcaaccgtcaacgccggcgacgtactgtttaccatcaacaacgacaagctcgatagcgacgtgaatcaggccgatctggctctgcgagcagcgaactcaaaccttaatgccgcccagcagcaggtgaaccaaatcaatgcgaccataggtcaggcacgtaatcaggatggtgaggaaggtcaagccgctgccgatgatgcggccggacagctgcccgctgcacaaagcggcgtggagagtgcgcaggtcgccgttcagcaagcacaagccacctatgacgaggcggtcgcccaagccaacaagcgtacggtcactgctccggtctcgggcacggtgctgaccatgagcgcggtgcccggtgccgccatcggagcttcctccgatggctcatccacttccgccggcgcagacggtaaaccattgtgtcagatcgccgacctgagtcagatgaaggtcaatgtcaacatcaatgagctggatatcactaaagtggccaaggaccagagcgccaaagtcacgttctccgcggtgccgggactgacgctcgatgccaaggtggataccatcgccagcaccacgtcgcagttggctgattcctcggcaggcgggcagagtggcaacggcggcgtgggatacgccgtgcgtctcatcattcccgcccctgatccgaaactgaagccgggcatgacggccagtgtgaaaatcaccatgcagagcattgacaacgctttgatggtgccgctcgccgccatcgtggatgagggtaaggagagcagcgcggtcatgctcgagaccaacgccgaaacccatgagttcaagcgggtgcgagtcacggtcaaagccaagaacaacaccaaagccgttgtggaaggcaatgtgagcaagggcgatgtcatcatgcttgatggcgcttcggctgccgacaatactggcgatgctgcttcttccacctcgcaaaccgcggcttcggacgaaagggcacgctgatatgttcccgtttcgttccgacgcgagccgggcaaatcgcggcaaacggcgtaatgagaccattgccgtgcccaccgccacagccaacgtcatcgaggttgaaaacatcaaccgcatcttcgagacaggcgacacctacacccatgtgctcaaaggcatcaccatgaacgtgcgccaaggcgagttcctcgccatcatgggaccatccggttccggcaaatccacgctgatgaacacgctgggcctgctcgaccgcccatcatccggcacctaccgcctgtgcggcatggacgtgcagaatctgagtgatgacgaacgctccgaactgcgcgggtggctcatcggcttcgtgttccaatccttcaatctgctgccgcgcaccagcgtgctgcgcaacgtgatgctgcccctggcctattccgactgcccggtgcgtgaacgggaaggtcgtgccatcaaagcactccaatcagtggcgttgagtccggaactgttcgaccgcaaaaccaatgaactctccggtggtcagatgcagcgcgtggccatcgccagagcgttggtacaggacccgccgctgattctcggcgacgagccgaccggcaacctggactccaaaaccggcgatgcggtgatgcacacgttcgaacagctcaagcagcaaggcaaaaccatcgtgctcatcacccacagccccgaagtggccgaacgcgccgaccgatgcctgcacatgcgtgacggcgtactgcgtgaagggatgtaccgatgagaacacgggatctgctggcggaaaccggctccgcactgagggcgaacaaaggcaaaagcgcactgaccattctcggcatcgtcatcggcattgccgcggtgattaccatgacctcactgatcggtggcattcgagactctctggtcggcgaactgggtatgaacgcggcgcgcacgatttcgatttacacggacgtcggcacccttgacgacgaacagatcactgcgatgcgcgaggaactgaccgactacgagtacttctcgccgacgaactatggtgccgcctcgtcaatcgccgcgcccggtaccaccgacaaggtgtcggcgagcatcaccggtgtcgacgagcatttcttcgatgtatccggagtgacgattggtcgtggacgggccttcacatcgagtgaagcaacgagtggtgcaatggtggtgattctcgacgggcagggcgtgcagaagctgttcggcagcgcggacattgacgccatcggcagaaccgtcacgcttgacggcaatgaagcaaccgttgtgggtgtggtcgagtcgtctggattgatgggcggcatgggcggcgacggcgtgaatatctatatgcctgccaccactgtggcgctgcggtttgcgtcctcgaacatgggatacatgcagatctacggactggccaaggacggggttgatatcgaccagctcacggaacagacgaagaccgttgtcgctcgcatcatgcgtatcccaaccgaacagatcgaccagaatctgtcggtcgtaagcgcccaatcctccatcgaccagctttccagcttcatgagcgcattccaggtgctggcgggttcggtggccggggtctcgttgctggtgggcggcatcggcattatgaacatgatgctcaccaacgttaccgaacgcatccgcgaaattggcctgcgccgggcattgggtgccactcggcgtgacgtgaccgcgcagttcctcgccgaatccattgcaatcacagtgcttggaggtcttatcggcacgttgatcggctacttgctgtcgttgggcgccgctggattggtgtccggcatcgccggtggcatgagtatcgcgccagcagtttccgtgcagtccatcggactggcagtgggcatctgcatcgctgtcggcgtgattttcggctactatccagctagacgcgcggcaaagctcgacccggtcgaggcgctacggcatcaataatcgcgtagcaccccgaaatgcagtagggcattgcgcacaccgtcgtggtccacgtcgtcggtgatgtaatcggcggcggcctttggctcggcggtcgcattgcccatcgcgaccccgatgccggcgtaggcgagcatatccgtgtcattgccgccatcgccgaaggccatggtctgcccgcgcgtgatgccgtaatgcgccatgaaccgctggatgccgcgcggcttgccgccatcggccggaatcagatccgtgaaatccggatgccaacgcaccccgcgcacattgctgcacagtcccaccagttcggcctccaactcgggtccgacaaagggactgatctggaaagtctcatgatccagcgcgcgggtgcgcgggtcctcaaaataccgggtcggtgcggttttgcccagtttgctccacgtggcgcgaagcagatcattggactggttgaagtacacgtaatccttctcgccgaaattgcacaccacatcggggtgacggtccagccagtcgagaatcacctcaatatcagcagtatccaaggcctgcgaggcaaagaagccggtgtcatcaaagcaatactgcccattgaacgccaccacgccatcgaacgtcaccggcatggtatccagcaccacgtgcatctgtgaaggcgcgcggcccgtgcaaatcagcaccttgacgcctgcggcctgcagccggtgaatcgcctcgattgtggaatccggcaccgtatgggtcgtgaaactggtgagcgtgccatcgatatcgaagaatacggctcggatatcggcattggcagtatcggtagtcatagcttccattgtcaaagcccctctcgacgtgctttccggcgtgttcggcacgcctatagcgggttatcaaacgcacgaatcccggccattgcatgcgcgccataaaagacacctatacggcaatcggccattttccgtcactttcgcggttcaagcgcgttatggtgttacccgacatcaattttggagagaggaaatccaatgacagcagcaacccagccggcaaccccggccgctcctaacaataacgagccggtgcgtgtgaaccacaccgcccgcaacgtcatcatcaccatcgtggtcgtggcgattatcgccgtggccgcgttcttcggctaccgcgcgtttgccggtgccaacgagtcgtccgccaagggcagcaagggcaacccggtcaagatcggcgtggtcggcgctaccaaccccgaatgggtcaagttcaagcaggacgccgagaaggccggcatctacgtcgacatcgtcgacttccaggactacacctccgaaaacccggcccttgactccggcgagctggacctcaacgaattccagcacctgctctacttggccaactacaacgtgagcaacaagaaggacctgcagcccatcggcggcaccgccatctacccgctcggcgtgtactccaccaaggtcaaggacatcaaggacctgaagcagggcgacaccgtcaccattccgaacgacgaaaccaaccaggcccgcgctatcggcgtgctcaaggccgccggtctcgtgacgctcaagggcgactggaccgccttctccactccggccgacatcgacgaagccaagagcaaggtcaaggtcaccccgctcaaggccgaacaggtggccaccaccctgaaggacccgaccatcgccgccggtgtgatcaacaacgactacgtggccgacgccggtctcaacccgaaggacgccatctaccaggatgacgccgaatccgaagaagctcgcccctacatcaacgtgtgggtggcccgcaaggcggacgtgaacaacgagacctacaagaagctcgtttccatctaccagcagaaggatgtgctcgacgccctgcaggagaactccggcggtaccgcggtgttcgccgacaagttcagcgccagcgagctgcaaggcttcctgtccgacattgagaaggacgccaaagcccagcagtgagccgtggctgatacgagtgcacgactaacctgtccatagccattaccaccaagcggagcgagtacccgagccaacaatcgggattcgctccgcttccgtgaccggacatcaacaaccagcatcagggagcactatgagcgaccccatcatcaccttcgaccatgtcgtgaaggaattcaaaacacgcggacgcggcgcgaacatcgcacgagccgtggatgacgtcagcctgaccatcgatcgcggcgacatcttcggcatcatcggctattccggtgcaggcaaatccacactggtccggcttatcaacgcgctcgaacgacccacctccggcactgtgaccgtgcttggcactgatatcacctctctgagtgagaccaagctgcggcccatccgccagaaaatcggcatgattttccagcagttcaacctgttctccaccaaaaccgtggcgcagaacatcgcctacccgctgcaactcgatcactggcgcaaggactatcaggatcgtcgcgtcaacgaacttctcgaattcgtgggccttagtgagcacgcaaacaaatacccctcgcagctgtccggcggccagaagcagcgcgtcggcatcgcccgcgcactggccactaatccggagattctgctcgccgacgaagccaccagcgcgctcgacccggaaaccaccaccgaagtgctggccttgctcaagcgtgtgaacgaggaattcggcatcaccattgtgcttatcacccatcagatgaacgtggtccagcagattgccggccgcgtggccgtaatgagcgccggacgcgtggtcgaatccggcgacgtatacgacgtgttcgccgcgccccagcagccggtgaccaagcgattcatcgccaccgccctgtccggcctgcccgaggaagaccgggtcgagcgattgcaccacgaatggtcgggccgcatcgtcaccgtgctcatccgccaaaaggacgtttccggcagccatggccacgaactcaaggcatccggacagaacatctccgaactcatcgccaaatacggcgtcgaatccagcctgctctacggcggcatcgacacggtcaaggggaccgccatcggtgccatcacctacgaattcaacgggcccggctggcacgtggacgaattcctgcgcgagctcgccgccaatagcgacgtcattgacttcggcaccgccgcaaagcccgtggcttacgccgacgcagttgccggacatgcctcctacgccgaagaccgcgcccatgacccactggcggccgatactgccaccgcgcccgctgtatccgccgccgcacatgaaggagacaacgcatgatcatcctcgccaactcgcgtagcgactggaacgtgctgcgcccactattgttcgaatccatcggccagaccctgaccatggtgctcgtcacccttgtcatcggcggattcctcggcctgatcctcggcgtggtgctctatggcacccgccccggcaacctgttcgagaacgcggtcgtctaccgcatccttgacatcatcgtcaacatcgtgcgcccgattccgttcatcattttcctggcagccatgcagccgctcaccatcgtcgtggtcggcacgtccatcggcaccgtggccgccatcttcccgatggtggtcatgtgcaccttcgccacttctcgtctggtcgaacagaatctcgtgccggtcgacccgggagtaatcgaggccgcgcgttcgatgggtgccggcaagctcaccatcatccgcaccgtactcatccccgaagccctggcaccgctgatcctggcctacgccttcctgttcatcggcgtgcttgacatgtctgccatggccggctacatcggcggtggcggtctcggtaacttcgccatcgcctacggctaccagaagttcgaccagaccgtcacctggacggccgtgatcatcatgatcgtactggtccaggtggtgcagggcatcgccaacgccatcgccaaacgactgctcaaacgccagcaataacaaggcatactgaccccatagatcgcggccctcgccaatatgaagcgagggccgcaatatattcttcgcgctactagaatcgggaaccatgagtgaacatatcgacatcgaccacgaactcatcaccatccgccactacctgcacgcccatccggagcgtagtttccgtgaattcgacaccagcatctatctgaccgaccagctcaaggcgcacggcatcgagatcctgcacaacccgctggagactggtgttgtggggctcattcagggcgaggccggtcccgggccgcgtatcgggctgcgcgccgacatcgacggcctgcccatcgtggaagactccggactggagttcagctccgtcaatgaaggcgtgatgcacggctgcggccacgacctgcacatgaccggtctgctcggtgccgccttctggctcgccgagcaccgtgacaagttcgccggctcaatcaagattctgttccagccgagtgaggagaccggccaaggcgctcgcgccatgatcgacgccggactcgtggatgacgtcgaagccattatcggcacgcacaacaaccccaactatgcgtccggccagctggccatcggcgtcgagccgatgatggccggctgcgtgaaattccgcgtgaccctccacgcccaaggcacccacgccggctacccgtacaagggcaccgggcccatcgaagcgctcgccagtattattctgagcctgcagaccatcgtgagccgcaacgtcacgcccttccacccgctggtgctgtccgttaccgaagtgcacggcggccatgtgtggaacgtggtgcccgccgaagccggattccaagggactgtgcgctatttccacaagtcggatggcaatctggtcggccgccgattcaaggaagtggtggaacacaccgccgaggcatacggtatcagcgccgatgtggtctgggatgatttccaagacccgctggtctccgatccaggtcttgccaaggccgtggcggcggatgtcaacgactacgcgcagctcgaaccgatacgtcagtcgatggcgggggaggacttctgcgaattcgccaaggtgacgttgccggtgttcgcgttcgtcgggtcaaacggccaggaaggttgcgccgactggcatagcccgcatttcgtgggtctcgacgaatccattcccaccttcgtcaacttctacgtcaacgccgccctgcgcgtgctcaacgagctgaggtaaatccttttttggctcccctctggaggctgaggcgttaggcagacagcccaatgggctgtctgcagccgaaagtgaggcgacagccgaaccagatatgcgcgggcctcgcccgtccataagtgcaggacgagctatcagcgaagctgactgaggggagtggcattcgttcattaggtcgattcatcgtccattaggtcggtgaacggcgatactggttgttggaatcgcgccattgcaacgactgatatcgcattgcagtgacctaatgaacgcaaaaacgacctaatgaatgacgccaagccggaagaacaggcaatccgacgccatacgcggctacactaagaagctatgacacagcttcgcttcgcactcgcccagatcgacacctgcgtcggcgcgctcgatgccaacgccgccaaagtgctcgactactcccgtaaagccgccgcagggaatgcccaagtggttgttttcccggaaatgaccctcaccggataccccatcgaagatctggccctgcgccgcaccttccgccaagccgcatgggacaaggccaacgaactcgccgcccagctcaacgacgacggcctcggcaatctgttcgtggtggttggcaccgtgggcactgatcgtaagacctccaagccgcgcaaccgactggtggtattgcatcagggcgtggtctgggccggctacgacaagcacttcctgcccaactacggcgtgttcgacgaattccgtatcttctccgccggcgaccgttccgtgaccctcgacgtggatggtgccaccatcggcgtggccatctgcgaggacatctggcaggatggtggcccggtggccgacctggccaccaagaacatcgacctgctgctcaccatcaacggctcgccgtatgaggaaggcaagaccaacacccgtttcgagctcgcccagcgtcgtgccgccgaagtcaacgccccggtcatctacctgaatcaggtcggcggtcaggacgacctggtcttcgacggtggcagcttcgtggtcgatgccgacggcacgcttatcgaacgcggcccgatgttcatggaaaacctgacgttctgggacttcgattccaccgccgaacatcaggtcaaggccgagatcgttccggaactcgacccggacgaagaggtatacactgcctgcgtgctcggcctcaaggactacatggccaagaaccacttcaccggcgtgacgctgggcctctcaggaggcatcgactccgcactggtagccgccatggcggccgacgcatgcggcggcgagaacgtctggggcatctccatgccctccatgtactcctccgatggttccaaagacgacgccgctgacctggcctccaacatcggtgcccattacgaggtccagcctattgagctattgttcaacgcctaccaacagcaacttgaccttgatggcgtctccgccgagaacctgcaggcccgcatccgcggtgtgatcgtgatggccagttccaattctcgcggcctgctcgccgtggccaccggcaacaagtcagagctcgcctgcggctactcaaccatctacggcgatgcggtcggcggctacgcacccatcaaggacctgctcaagacccgtgtctgggagatcagccgttggcgtaacaaggccgcggccgcaggcgtcggtatcggcgggctcaagatcgtgggcaacgaggacggcaacgccggcatcccgttgaaggacggcgtgatgattccggtctcatccatcgagaaggctccctcggccgagttgcgccccgggcagaaggactccgactccctgcccgaatacgcgctgctcgacaaggtgctcgctgcatacatcgagcacgcgcacggccgcgccgacctgttggccgacggcttcgaccaggccaccgtggacactgtgatgcgattggtggaccacgccgaatggaagcgccgccaatacccgttgggaccgaaggtcacggccctcgcgttcggccgcgaccgccgactgcccgtcaccaacgcgttcagggaataaacatatattgctcccgccagcgggagcaagtaataccgttgaggaggtaccaatgacagacgataacaagaagcagtggtatttcaacaccgtcaagaagcaggccgagctgggcatggtctcaccgattgaacagcgcatgggtccgtacaagaccaaggaagatgccgaacacgcctgggacatcgtggtggaccgcaacgccagatgggaggatgagaactggcgctggaagaactacggtgtgaaatccgcgcaagcgaacgatgaagactgacggccaaaacagacggatacggttctgctgtcaatctcaagaccgaaccgctcaccaagccgctcatacgaacatcacagtatgagcggtttcccatatctggagacgtgcaatagccccatcaatacctagaaaccattggaatggtagcgttcacaaaaaacaatgtgagatagctcactcccaatttcggcttttcccaagcaagtgccaactacactgttgaaccaagggttccgtgaagatgcgaaacctacaaccccatttaaggagtgacatgaccgcagtagaaaatgcagctgtctcccaagaggagctcgacgccaaggcatgggccggcttcaccgagggcaactggcagaaggatattgacgtccgcgacttcatccagaagaactacaccccgtacgagggcgacgagacattcctggctcctgccaccgagaagaccaagcacctgtggaagtacctcgacgacaactacctggccgtggagcgcaagcagcgcgtctacgacgtggacacccacaccccggctggcatcgatgccttcccggccggctacatcgactccccggaagtcgacaacgtgatcgtcggcttgcagaccgacgtgccctgcaagcgcgccatgatgccgaacggcggctggcgtatggtcgagcaggccatcaaggaagccggcaaggaaccggatccggagatcaagaagatcttcaccaagtaccgcaagacccacaatgacggcgtgttcggcgtctacaccaagaacatcaaggtcgcccgccacaacaagatcctcaccggtctgccggatgcctacggccgtggccgcatcatcggcgactaccgtcgtgttgccctgtacggtgtcaacaagctgatcgccttcaagaagcgcgacaaggactccatcccgtaccgcaacgacttcaccgagccggagatcgagcactggatccgcttccgcgaggagcacgacgagcagatcaaggctctgaagcagctcatcaacctcggcaacgagtacggcctggacctgtcccgccctgctcagaccgcccaggaagccgtgcagtggacctacatgggctacctggcctccatcaagtcccaggacggcgccgccatgtccttcggccgtaactccgccttcctcgactgcttcatcgagcgcgacctcgaggccggcaagatcaccgagaccgacgcccaggagctcatcgacaacatcgtcatgaagctgcgtatcgtccgcttcctgcgcaccaaggactacgacaacatcttctccggcgacccgtactgggcgacctggtccgacgccggcttcggcgacgatggccgtccgatggtcaccaagacctccttccgtctgctcaacaccctgacccttgagcacctcggacctggccctgagccgaacatcaccatcttctgggatccgaagctgccggaaggctacaagcgcttctgcgccaagatctccatcgacacctcggccatccagtacgagtccgacaaggaaattcgtagccactggggcgacgacgctgccatcgcatgctgcgtctccccgatgcgcgtgggcaagcagatgcagttcttcgccgcccgcgtgaactccgccaaggccctgctgtacgccatcaacggcggccgcgacgagatgaccggcatgcaggtcatcgacaagggcgtgatcgagccgattaccccggaggccgacggcaccctcgattacgagaaggtcaagaacaactacgagaaggccctcgaatggctgtccgagacctacgtgatggcgctgaacatcatccactacatgcacgataagtacgcgtacgagtccatcgagatggccctgcacgacaaggaagtgtaccgcaccctcggctgcggcatgtccggtctgtccatcgccgccgactccctcgccgccgtcaagtacgccaaggtctacccgatctacaacaaggacgcgaagaccctggaaggccacgagtacgagtacgttgagggcgccgacgacgacctgatcgtcggctaccgcaccgagggcgagttcccggtctacggcaacgacgacgaccgcgccgacgacatcgccaagtgggtcgtctccacggtcatgggccaggtcaagaggctcccggtctaccgcggcgccgtcccgacccagtccatcctgaccatcacctccaacgtggagtacggcaagaacaccggttccttcccgtcccgccacaagaagggcaccccgtacgccccgggcgccaacccggagaacggcatggactcgcacggcatgctgccgtccatgttctccgtcggcaagatcgactacaacgacgccctcgacggcatctcgctgaccaacaccatcacccccgatggcctgggccgcgatgaagccgagcgcatcggcaacctggtcggcatcctggacgcgggcaacggccacggcctctaccacgcgaacatcaacgttctgcgccgcgagaccatggaggacgccgtcgagcaccccgaaaagtacccgcacctgaccgtgcgcgtctccggctacgcggtgaacttcgtcaagctcaccaaggagcagcagctcgacgtcatctcccgtaccttccaccaaggtgccgtcgtcgactgatgaccaaccccgcgaaccgcggcaatgactaactgaaggggtggggcacggctccaccccttccttattttccacagactttcgcatcatttggaacaggaggacaactatgcccgcaacacccacgttccgcaccacgaccaggcatatgctcaaggaatcgaagacctatgcctcgcagactttgatgggcggcctttccggctttgaatccccaatcggactcgaccgacgtgaccgcctttccgccctgaaatccggcgatatcggcttcgtccactcttgggacatcaacacctccgtggatggaccgggcacccgcatgaccgtgttcatgtccggctgcccgctgcgctgccagtactgccagaacccggacacttggaagatgcgcgacggcaagcccgtctaccttgacgccatgatcaagaaggtcgatcgttacaaggacctgttcaaggccacgcatggcggtatcaccttctccggcggcgaatccatgatgcagcccgccttcgtctcgcgtgtgttccatgccgccaaggagatgggcgtgcacacctgcctcgatacgtccggcttcctcaacacgaattacaccgacgagatgctcgaggacatcgacctgtgtctgctcgacgtcaaatccggcgacgaggagacctatcacaaggtcaccggcggcaccttgcagcccaccatcgattttggccagcgactggccaaggccggcaagaagatctgggtacgatttgtgctcgtgccgggcctgaccgactccgaagagaacgtcgaaaacgtggcgaagatctgcgagtccttcggtgatgctgtcgaacacatcgacgtgctgggattccaccagcttggccgcccgaagtggcacgaactgcgcatcccatacccgctggagaaccagaagggacccaacgccgccacccgttcgcgggtggccaaccagttcaaggaccacggcttcaccgtgttttaaattgcagggccgaaccgcgcgtaaataccacgattcggcccgttcgcccataccctagagatatggccgacatctacgcatttcctatgggagcgtccaacgacggacgccccgtacgccctcagggtgtgccggatgaagtatgggcagctgtcgaatccgtcagcaccatgaagcgcatccatgacgtgcgctatcgggagattcccgtgccttccaccttggccgattatggtatcggcgtggaattcgaagcgggagagcgtgccctcggcgatgccttttccgccggtcttggca

SEQ ID NO: 2781 - DNA, 5634 bp, Unknown
  R36_18m  MAG No. k141_17469
cacgcatccaagggtctggaattcaagcacgtgtttctgatcggctgttcggaaggactcttgccgtacggttcgccggaaacgggggatgcgctggaagaggaacgccggcttatgtatgtgggcatcacccgagctgaggattcgctgcatttgtcgtatgcgcggaccaaggatggttatggagcgcaacacagacgcccatcacgatttttgtgacgggcgtcgttcatgcatactgaatgctcctgaacattcaggagcgggaattggccgaaggccggttgactatgcctgcgtatcctccgagttgccgttgccgccatcttctccgtcttcgccgagaagcttggacagttcggcatcccaatcgatatcgccggtcttgccatctgcggcagggtgggaggcggaaccgttggcatcggaagaggagcctgaaggggcgtcggatgacggagacgcgccatccgcgggcttgtcgctaggcagcgaaggcagcagatcgggatgcgaccacttggcgtcacggccttcagggccttcggcggcggtgatcatctcccacaatccggcggcctcgcgcatgcgcttggggcgcagctgcaaaccgagcagactttcgaacgtacgctcggcggggccacccatcgcgcgctcgcggcgcatcatctcacgcaactgttcgatatgaggcagatgggccataccggcgcgccacaccacgcaatccacccagccctcgaccatcgccagcagcgattccagcgaagccagcgcctcgcgctgttcgggagtgtcggggatgccgaccttggtgagattcaccgcgccggaaatcgactccggatccatcgacgtggcgtcacgcagctgttcctccatcgcatccagatcgatggagatgccgcgtgcgtacttgccgatgagcgcctcgaaacgcggcatcagccacggtaccgaggcatacaggcgggcgtgagccatttcctgcagggccaggaaggaaagcacttcagattcgggaattttctcggtggtctcgaatccggagagcgcagcctcgaacgcggcggcgtcggcggaagcatcggagccggagacttgggcggtaccgtcagttgccggagtatcgctgttgccggccgaagtgaagccaatgggattggcggaagcgtcggtggatgtggagaacggattgaccgagtcggttgaagtgccggccgtatcggcctcgggcgcaggagtctcaccgttcagcatcctcgcgtattcggtggcgttctgggcaatcagtccaccagccggattcttcagcaatgcgatgccctgatcgaaactgccatgcacttcatggctcagattgccggccgcatgccccaactgcatggcaaaggacgtgttgcccagcagcttcatcagctgggctggatctttcatgccgtcgggaatcggaatcggcaccggtccggcgaacatgccggcaatctcgccatcgccgaacgcgccgccaagacgctccgaaatcaccgaagccaaagcgtcgttcatcgactcggccacaggagctgcgaacttcgcccactggtcgatggtgccctccacccagccggcgcgggtcagcacatccggatcgccgggcgcgggattgaactcgcaggcggtatccagccacaggttcgcctcactcatcgcgcggcgagccgcctcgccatccacggcggacacgctggacgcggaaccggaggcgttggcctgctgcaaggcaatcgacttggcgagcttgacgttgatcggcccttcctcgacagtgcgctgcatatcgcccatcgtgttgagtccgccggcgctgaacgcggccatcatctgctggacttcggatggattgggcagtcggctggggtcctgactcatcagctgttcacggatctcctcaggcaactggctgatctgctgccaggccatctcgccctgaatggggccgaagcatttgatcagccactcgtgaatcgcgttgtcgtccatgcgtatccttctttgccgcggtgtgttaccccaagtgtagggtctgcccgggcctgttcgcttgtggccgagcattattttcggtttatgttcgttttcggccgatttcggccctccgcttacactgtagggtatgtttgcacgccacaggaatcaggaaccagacttcgtccaggagcagaagagcccgactgcggattcggaagcgggggatgggcgcatgccatcgttcgaagtgaagcatgattcgcgcctatctcgtggaatcagccgtgctcgggcctatgcggccgctcgtccgaaacgccatttcgtcggtgcattcgccgtgttgcttggtgtggtgattctgctgctgcccagcccgtacgtcatcgagatgcccggacccacccaagacgtgctgggcaaggtcgaggatggtgcggttatcgacatcaccggtaccggcgtgacgacgtataaggattccggcaagctgctgctgaccacggtgaacgcgtccggcgtgcccgggtacccgatcatcaacgcgcaggccgtctggggttgggccaatccgcaggtggaggtcatgccgcgtgaggccacggtaccggtgggccagagtgcggaccagtatcagaagaaagtcgaacaagacatggccggttcccaggattcggccagtgccgtcggtctggcgtatgccaaagcccatgcggacgaactgggcattgacgccagtgcattgcaacacgccaaggtgacgatgcacgtggacagcatcggcgggccgtccgcaggcatgatgtacacgctcggtctcatcgacaaactcacccccgccaacgagagcggcggcaagaccatcgccggcaccggcaccatagacaaggacggcaaagtcggcagaatcggcggcatagagctgaagatgcttggcgccaagcgcgatggcgccacatggttcctggctcccgcatcgaattgttcggatgtggccggccgcgtgccggatggtctgcgcgacgtcaaggtcgccacgctggacgaggcgtatcaggcgttggtggccatcggcaaggggcaggccgacgatttgcctcattgcgaggcctgacacgcgcggccagtcgttgtttctgatgagacgactcgcatgggtctgcccacaatgcggcgattttcggccgcgttaacgcatttgttcgcgaagacttgctaatgtgtcccctgtgaatcaaacggcatcacagaacgctgaagaatttggtttcgagcccggcgatatcgttcaggagtggctctgggacgacgatgtggacgattccattcgtgcccagattgaagagctcacgggcgaggatctcgtggacgaggactacgactccgctgtggacggcgtcatcgtatggtggcgcgacggcgatgatgaggacgaattgtccgatacgatcgttgacgcctacgcggtactgggcaatgacggcccgctgtggatactgactcccaagcccggccgcccgggtgccgccagctcctccaccgtgcagtccgccgcacagaccgccggtatgaacgccgccaccccgctgaccgtcagctcggactggaacggcattcgcctgcgcgcattcggcaggggccgctgataagcctcaatcaatacgcttgactttaagcgtgttgactggcgtcgcgtgctgcgtagtgctgctgggcgtgactgaatgtcatcgcgattgagcgctacggcacgcgtatgcgacaccacgtgtcgcgcagtgccggccatacgctattgttgtcatttgcgggcaattagctcagttggttagagcgccacctttacacggtggatgtcgggggttcgagtccctcattgcccaccaatccgcctcggcggaaacaagccgcttggccttgcgggagtaaggctgagcggcttttcttactcccgcagattccctcgtattccctcggtttcgcgggataatgtgggcaaaatgtgggcagaaatcgagcccgcgaagccctctgccacaacgcgaaatcggccccgtccggcagcagtcaagctctgtgcgagctgtctgcgatgccgggcggggccgaactatgtgtggtcatgcggcgaggtcgaggcgttgtttgatggcgctgacgccgatgagcgtgccggcgaggatgccgagcgcgttgagcgtggtcacgatggcgtccacgtggggccagccccatgcggcgccgaccgtgttgacgaacagggcgagtgcgggcaggacgatgaggccgagccatttgaggatgtcgtagacgcggctggggatgagccagtcgggcacgtcatgggtgacgtcggcggtttcgggccagtcgcccgtgtcggggccggggagtgtttcgccggtgtcggccggggttttgctgtcggtcatgtttgctccgatcaaaaaaggatgatgatggtgggtggtgccgccgtcggggtgacggcggcatcggttggtttagcggcaggtcaccacgtcgcccacgtagtagacgttgatgttgccgctggggaccgaacactgggagacgctgtagccgtgggaggtggcgaactcccacacggtgtcgccccactggagggtcttggagaccccgttggacggcgcggttgtggtgccgccgtaggtgacgacgtcgcccgcgtagtagcggttgatatcaccggagggcgtgtgccatgcggacagtggccatgcgttgtaggctacggcgagtccccagatggtctcgccccactgcatgacgtggctgatgccacccgtgttggtgtcggccgggggagtgttcggctgtgcgggcgcggccggtgtggccggtggcgtggagtcgccggcggggttggcgtacaggtcccactgccatgcgtcgccacggaagatgttgaggtcgatgggactccacgtgttgacgacaccggtgccgctgtactgtcgcatggcctcaccgtacgcgcctatcatccacggattggcctgatagccggtcgggctcatgttcgcgtactgggcgatccacaaaccgtaccggtcgcggatgtcctgcgggatggtgccggcgaccgggccggtgtacagcaatgggcgcacaccgccgctcaatcgttcgcactcactcaggaagcggcgtacccaatcccagttgccccatgcggggttatcatccatctcccaatccaacgccacgatgccgtgacgccaatagttgctggtgttgcggtagaagaattgggcttccgcctccgggttgccgcccatcgcgtagtgatacaagccgtatttcttgccgctggcctgcgcctgatagatcatgcggttggcgtccgtgttcacaccggagaccaaacagttgttgttgacctgtccggtgccccatgtggtgccgaccaccacgaagtccgcctgcatgttatacacgtccgcgccgcactgccagttgctcatgtccacgccctgcatgtccgcgtgcgcggtcgctggcgcgaacgcgagcagcacggcgacgagcgcggtcagcatcatgcccacgcgccggtgcaggcgtccgtgtttgtgtttgcttttgtcgaggatcttc

SEQ ID NO: 2782 - DNA, 22937 bp, Unknown
  R36_18m  MAG No. k141_17477
cccagccggccaccacgtccttcgggttaagcgtacgttcgccggactggcgcgggtcgccgatgagtccggtggcgccgccgaccagggcgattggatgatggcccgcaagctgcaggtgacgcatgttgatgagctgcacgaggttgccgatatgcaacgatgcagcagtggggtcgaagccgcaataataggtgatgggctcgccgttcagtgcttctgcgagtcgatcccggtccgtggactgggaaatcaacccgcgccattccagttcctcaagcagggtgttgaaacccgcttccttgaagtcggtgacgtgagccatagcttgtcgcttctccctatcgaattgtgaatgagactgcccaattgggcacagtcaagtttcgcagaacatggcgacagtgccgaacaccagccgagccgcgcgattcagtaaaacaccttattctagcggcgcgggcccataagttcgcgcaaagagtcgatgatgtcctgacgatccggcacctggaacttcgggaaggacttgagcatacgcttctgctgtgcgttgatgacgccattgacggcccagcgcagacgctcaaccgcatcctgcgaaagctcacgcatcctgtcggataccgcactggagccccgctgccacgtgccaccggcgcgtgccgccacatcctgcaccacctgagcgacggaatcgagcacctgctcgaatccgagcatgcccgtaaccgtgaccgccaagtcgatgacggtgatcagagccagtaccgtgaccagcgtatgcagcatcggcagcggaatcatatccgtgacccgctcgacatatggctgcgaaccaagtaccacgcccacgccgccgagaccgaaaatcaacgcgcccagcaggcagacgcggccttggaggttgaagcggaaattcgagtaatcccaccagcgggcgtggaacagctgctccatgacccacgaggttgtgtattcgagtatcgtggcgcccaccatcgaaatcaggaagatgatgatcgggttatgtacgttaccgagaatggcgacgccgagtatcgcgccggtgccgtagatcgggcacagcgggccgttgaggaaccctcggttgaccaagcggtgctgttggcaggagacgagaatggactcgtacgtccagccgacgaaactgtagaacagaaaccagaggaaataatgttcgagtgtggtgatcatcgacgggcttcgatctcggcgtagggcttcgcggcgggcaacgcgcgcttgttgaaccggtcgaacgagaaggtctcggcggtggcggagcatttgtccgccaaggtgaccagatagccttcgatatagcgcggcggcaccagggtcatcgggaacatgtggttctcgatgctgttgcgttcgatatcgttgagcttgaagtccttcagggcattgaccagggcggcgtggccatgggtgaagccatgccactggtgttcgccgttatcccagtcgtgccagtcgtacaggaagtaatcgtgcaggagggccgcgcgaatcagggatttgaggtcgacgcggtaccacaggtgcgcgcggtcggccatccacacagccaggcaggcgacacgcacggaatgttcgaacgtggtgacgttgccgtgctggtagcagcagcgttcgatctgcatgtggcgatgctcgatgacctcacggccgtgcttggcgaccaggcgttgaatctgcgttcgggtgagcagatgtcccacggtttcgaccctccgttcgggttggttcagtgcaatcccttgttgtgaattacgattacccgacgatattcaagaatccatcgagtaataccgtgaccgattgtagggcacacgtatgtccgtgcacactcatccaaaagaacgacaacgggaaccgttaatcgtggtgggtttcaagatagtcgagataaccctgaaaaccgccatcgaggcttgctacatcgtaaccgcgatcggcaaggatttcagctacttcctcgctccaccatccttgagcacaatagactacgacagttcgatctgtgggcacggttttgagcacatgggccagagggtcgagtggtgcattgatggcaccttcgaccgggtgggcggcgaagtcggctggttccctcaagtcgagcagcgtgaccgtattcgggtcgagcttggcaaattccgccggcgtgatgcggcggtacgatgcttcactgctctcatcgtcatcgaccgcattacgcaaagcaataggcatgttcttcccctctcgttccgatcttggctcccctcaaggaggggtgccacatagctctaaatcgcgcaagccggctgaatatagttggccggatcaatagcagtaatggtcggctgctcaccgcacaccgggcagtcgggcacatggttcggcaacggcacacggcggatgttcatggtcagggcatccacagtgagcatacgagccacgagcggctcccccacgccggcaatcagcttgacggcctcagtcgcctccagactgccgatcacaccgaccaccgcgcccagcacgccggcctccttgcaggtcggaatttcacctgcggcgggcatatcgcggaagatgcagcggtagcaggggccttcgcctgggatgacggtcatcacctggccggagaacccgaccacgcccgcatggatatacggcttgccggccagtacacatgcgtcattgatgaggaattttgcggcgaagttgtcggtggtatcgatcaccagatcgtacggttcgatgaggccggcgatgttgctggcatcgacgagctcgtagtaggtgtcgaccgtcacatctgggttgagcgcgcggatggccgtggccgcggattccactttgggcgctccgacacgtgcagtggtatggatgatctgacgttgcagattgctcatatccaccacatcgccgtccaccagtccgatatggccgacgccggccgccgccagatacagggcggccggagaaccaagaccgcccgctccaatgatgagcacgctggaggccaacaaccgcttctgccctttgacgcccagccccttcaaaatcagatggcgcgcgtaccgctccacctgttcatcagtcaatgccatgttttctccatgtttccagctcccctcagtccgctacgcggccagctcccctcagagaggggagctaataaaagtgtcagtgcaaatatcccgtagtcggactggacggcacggcctgtccctcggtcaccttgcccagaccggacagatacgccgcacgaccagcatcgatggcgtgcttgaacgcctcagccatcagcgggatattgccagcagaggcaacggccgtgtacgccatcaccgcatccgcacccatctccatggcgtcgcatgcctgactcgggcgtccgatgccggcatcgatgatgaccggcacatgcgcattggcgatgatgatttcgatgaagtcacgcatgcgcaggcccatattggagccgatcaacgaaccgagcggcataacggctgcggcaccggcctcctccagctggcgtgcggcaatcgggtccgggaacatgtagggcatgaccacgaagccttccttggccagcatttcggtggctcggatggtttcggcgttgtccggcaggaggtacttggtctcgtgttcaatttcgaccttgacgaagtcggtgtggcacacttcgcgtgccagtcgggcgatacgcacggcttcctcggcgttgcgcgcaccggaggtgttgggcagcaacgtgatgccttcgggaatgtagtcgagcacgctgttctcggtggtctgcgcgcggcgcagtgccatggtgacgatttgcgtgcctgcatgttcgaccgtggccttgatgaggttcaggtcgtagcggccggagcccagaatgaatcgcgactggaactcgtgaccgcccagggtcagcggcttgtcttccactggcagaatcggcgcggcggtgccgaccggattggtgacggcgggctgcggcggcagcggagtcgcctcaacagatgcttcagtaaccggattaatattgctcatagcttttcctttcatccaccctgtacaaactgcacaatttccatgacgcactggtcgtcgagcatggcgtcggcacgcttatcgcgcgggataatctcaccattgagttcgatggccacacgctcggcgcggaatccgtgcgcttcgagataatcggcgacgctgaccggcgtctcgagcgtgacctgctctccgttgacctgcataatatcctttcagatagtaaaaaagggtgcacgaaacgaaccgtaccttaagtggtgcgcccattcatgaacccaatcatgcgaccgttcgaccgctgtgatgtattggctccatcacgaccgtctcacggctgaattatgcaaacggaatgaaagctgtatcggagaacccggcaaatctgcaacaacgattccttacggcggcatgacccgcgtcaagttccccggtcgaagtctggcgacttcctctcagcctcacggctcccgttcgttacgatttctcagtgtatgccgttgcagtgacaacagcaaaatagagctccctctgacgagggagctctattgggactagaacgtgccgggggctttgtaggcggagccatccgacgtggatgcggggaagagcttgagttcttcgacctcggccttggcgtcggcgatctgctcgcgcacgcgaccgtaagcggtgccgcccttgccgttgcgggagtcgaccgaaccgtggctggagagcacttcgcgtactcccggagccttgtcggccggcaggaacgcggcgaaggtctcgatgaagtcattgtcggtcagatcccacagttcctggccgcggccttcggcgagcttgacgcaggcaccagagagctcgtgcgcatggcggaacggcacaccgttcttgacaagccattcggcgatgtcggtggccagcgcgaagccggtcggggcttcctcttcaagccgctcgctgtcgaagtgcatggtcttgaccatgccggtgaaggcgggcagcagcacttcgagcgtatcgacctggtcgaacacggcctccttgtcctcctgcaggtcgcgagcgtaggcggtgggcaggcccttcagggtggccagcagaccggtcagatcgccgatgagtcggccggacttgccgcgggcgagctcggcgatatccgggttcttcttctgcggcatgatggaggagccggtggaatagccgtcgtcgagcttgacgaaggcgaactcctgggtgttccagatgatgatctcctcggacaggcgggagatgtccacgccggtcatggcggccacgaacgcgaattcggccacgagatcacgtgcggcggtgccatcgatggagttgtcggtcacgcgggagaagccgagctcacgcgccacggcctccgggtcgaggccgagcgtgttgccggccagtgcgccggagccgtacggagaggcgttgatgcgcttgtcccagtcgatcagtcgctgcacgtcgcgaatcagcggccaagcgtgggccatgagctggtgcgcgagcagcacgggctgggcgtgctgcatgtgggtgcggcccggcatcacggtgcggccggccttttcgctctgctcgatcagggcgttgacgaggtcaagcaggagtccggcaatcgcacgggagtggcggcgcagccacatacgaatcaggcaggcgatctggtcgttgcgggagcgtccggcacgcagtttgccgccgagttcgtcgccggcaatgtcgatcagtccgcgttcgagggcggtggcctcgtcctcatcgtcttcgatgggggcgaaggagccgtcatccacatgacgctggagcgtgtcgagcgcatcctccatgcgctgcagctcgtcggcggtcaaaagtcccgcacggccgagagcacgggcgtgggcgcgggaaccggcgatatcgtcgtcggccaagcgccagtcgaactgcgtggacttggacagtcgggccaactccggagacggaccggatgtaaaacgaccaccccacagggccagatgttcgttgttctcagtcatgaaagctccttgaaaagtgaaaatagctgtgtttaagcgtagcaatgtgttcaaacatacagttgcccccgctggcgagggctgtcacatggagtgtgactgaggacagtcctttcaaagaccactcccagtcagctatgccgacagcctcgcagcgggggcgactgagtaagaattactcgacggtgttcttcgggacctcgatgccgttgccgaacttgacgtcgcgggctgcggccacgcgggacggcaggccgtagatgtcgatgaagccgttggaggacttctggtcgaaggtatcgccggaatcgtaggtggcgagcttgtagtcgtacagcgaggagtcggaacgacggccggtcaccacggcgcggccaccgtgcaggaccatgcgaatctcaccggacacgtacttctgggtgtcttcgatgaaggcgttgagcgactgggttgccggggagaaccactgcgcatcgtaaaccagctcgccccagcgcttgtcgatgtcgcgcttgatgcggtgctgttcgcgttcgaggcagcagttttcgagttcctggtgagcggtaatcagggccacggcacccggagcctcgtacagctcgcgggacttgatgccgaccaggcggtcctcgatgaggtcgatgcggccgatgccctgggctccggcgcggcggttcatctcttcgatggcctgcagcggggtgacgtcacgtccgtcgatcttgaccggcacaccttccttgaactcgatgacgacttcatcttcgaccggcgggaaggccgggtcgtcggtgtaggagtagcagtccttggtcgggccgttccacggatcctcgaggaagccggtctcaatggcgcggccccatacgttctggtcgatggagtacggggacttctcggtctgggtgatcggcagcttgtgctccttggcgaacgcgatctcgacgtcgcgggtcagggacaggtcgcgaatcgggctgatggccttcagcgtcgggtcgatggaggcgatggagacctcgaaacgaacctgatcgttacccttgccggtgcaaccgtgggagatggtgtcggcgccgaactggtgggcggcgcgcacgaggtgcttggagatcagcggacgggagatggcggagaccagcgggtagacgccttcgtacatggcgttggccttgagggccttcatgcaatattcgttggcgaactcgtcacgggcgtcgaccacgtaggattcgacggctccgcaggcgagggcgcgctgcttgatggtctcaaggctttcaccaccttggccgacatcgagggacacggccacgacgtccttgccggtgcgctccttcaggtacgagatggcgacggaggtgtcaagaccgccggagtaggccagaacaatgcgcttgttatctgccattggttccctttcattcaaggtctgaaaaaacaaactgatgcaagtatatacagaggactgtatatttatgcacggcgtgttggttatttggaagcgaggcttagtagccagtcggagcgggagacggcggtgtcgtcattggtgcaaatcaccatgacggtgtcgtctccggcgatggtgcccagcacgccttcgatcggctgcctgtcaatcaccgaggccacgtattgtgcggcaccggaaggcgtgtgcaccacaaccagatttccggcggcggccaccgaggtgaccagtccgttcagcacgcgggacatctgtgcctcaccgcgctcccctacatcctcaccttccgaagcaacgacgctgcgacccaccgtgtaggccaccgtgccgtccttcagccgggtcttcaccgcatgcatctcgtcaagatcgcggctcagggtcgcctgagtcaccgcaatgccctcgtcgataaggattttggacagctgtgattgcgaggtgatgatatgcgtggcgagcgcctgttctatggcactcagccgcgccgccctggtggcagggcgctgcagggacggaccggtttcactcatgcgagcaggctttcgtctccacgggccttgccggtcaaccaagtcagcaacgctttctgtgcgtgcagacggttctcggcctcatcccacaccacggactgcgggccgtcgatcacttcagcggtgacttccttgccgcggtaggcgggcaggcagtgctggaagagcgcatccggcttggccaatgccataagttcggtgttgacctggtaatcccagaacggcttggaacggatggcgtattcggcctcctcgcccatggagacccaggtgtcggtgaacacgcagtcggcgtccttcactgcttccttggcatcggtggtgaccaggatggagccgccggtctcggccgcgacgcgcttggcgtcggccacgatgtccgggcggggcaggtagccgtgggggccggccacgcgcacgtccatgccggccacggcaccgccgagcaggtaggagttagccatgttgttggccgcgtcaccgaggtaggcgatggtctggttcttcaggttgtcgacgccgcctcggtgctcggcgatggtctggaagtcggcgagaatctggcagggatggaagtcatcggtcagggcgttgaccaccggatgggtggagtacttggccatttcttcgacgcggtcctggccgaaggtgcgccacaccacgccgtaagccatgcggtcgagcacacgagcggtatcggccacgggctcgccacggcccagctgggagccggacttgtcgatgaccagtgggtagccgccaagctcggcaacgccgatggagaagctggaacgggtgcgggtggatggcttgtcgaatagtacggcgacggcctgcggaccggcgaacggctgcttgtagaagcggtcatggtggaacttgatggcaagttcgagcacctgcttctgctcctcatggttgaggtcgtcgtcacgcagcatgtggcgaagttctggggtcatgatgatctccttggatcggtgggtcggcagtgacggcgagaaatcagtcgtcgggcaggtccgtaggcacatccttgaggatggcaagtgcctgatccacgtcttgagcggttacaatcagcggcggtgcgaaacgcagcgcattgggagccaccgcgttgacgatgagcccgtgttcgaggcagtagttcatcaccgcgtgggagcagggatgcttgagctcgacggcgtccagcaaaccacggccgcgtacggaaacgaacagcggattaccggtggccataatgccatcgcgcagctgttcgccgcgagcttcggcgttggccaccagattctcgtcttcaatcacgccaagagtggcgagtcccgcagccgcacccagcggattgccggcaaaggtggagccgtgggaaccaggagtgaacagagccgcaagtttctcgccgaaagcgatcatgccgcccatcgggaatccgcctgccacgcccttggcgaaagtcaccatatccggcgtcacgccgccggacagatcgtcacgctggaatgcgaaccacttgccggtacgtccgataccggtctgtacttcatcgatgatgagcagcgcgtggttgatatcgcacagttcgcgcacgaacttgacgtaatcggcgcccaacggctgcacgccggcttcgccctggataagttccagaatcacagcagccaccggacccttgccatagcggccgagaccggtctgtgcaaaagcgtcgtgcagggcgaccttgtcgccggcgcgcacgaattcgatgttcggcaccagcggatcatacggcttgcggataccgggtttccatgtggcggacagcgcacccatcgtacggccatggaagccgtgagtcattgcgagaatgcgtgcgggcttgccgccgatggaaggcagggcaccaggcaaggtgcggccatacagcttggcaagcttgagggcagcttcattgccttcagcaccggagttgccgaagtagactttggagccttcaggtgcaccagccagcttgaccagtttggatgccagctcaatttgcggctcggacgcgaaatagttgctgatatgagccaccttggcagcctgatcggcaaccgctttgacccacttggggtgggcgtatccgagggaattgacggcgatgcctgccaggaaatcgaggtattcgttaccgtcaacatcccagatgtgggcaccttggccgtgatccatgacgcgcaacggcgtaccgaacacattcatgtggacctgagagtactctcccagccacttgctgtcttccgtacctagtttttcctcatgctcagtagccataagagctcctcatttccagtccttcatcgggcataaccatggtaccgatgcctgcggaggtgaatatctcgttcaaaatcgaatgcggcttgcgcccgtcgatgatatgggcttggggcacgccaccgtcgatggccctgacacaggcctccatcttgggtcgcataccggattccaggtccggcagcatatcgcgcaggttttccacaccgatccggccaatcagagaattcttgtccggccaatcggcgtacagaccatccacatcggtcaagataacaagcttgcgtgcgcccacagcggcagccaaagcggcggcggcggaatcggcgttcacgttgagcacttcagtggcatcttcttcgttcggagccacggaagagacgaccgggatacgaccggcggccaccagatcctcgactgccgaggcatcgacggaaaccacatcgccgaccaagccgatatcggtgggcttgccattgatgatgggcctgcgctgcatggccgagaacaggccgccgtcttcaccggacaggcctacggccagcgggccgtgcgcgttgatcaggccgaccagttcgcgtgacaccttgccggtcaggaccatgcgcaccacgtccatggcctcgggggtggtgaccctcaggccgcctttgaattcggatttgatgccgagggccttgagcatgtgggagatctgcgggccgccgccgtgcacgacgatcggatgcaggcccacctgacgcaggaagaccatgtcttcggcgaagcactgcttcagatggtcatcgaccatggcgttgccgccgtatttgacgacgatacgctggccggcgaactcctccagccatggcagcgcttcaataagcacttctgccttctgatcggcgcgcaaatcggtgtgcacgtcgaaatggaacccaggtcccttcaattctgtagccaatttttctcttttctgcgacgccggcgacgctatcgctgccggctgctacaaacagcccactgggctgtttgtcagctttcgtagtcggcgttgatgtggacgtattcgtgggtgaggtcgtcggtccagacggtggcctcggcgtccgagccggtgttcaggtcgatgtcgatgtggacttcgcgcggggtcatgtcgacctcgctgcggtcgcggccggcgccgccgttctcgcagatgcgcacgccgttgacgtccacggtcaccttgttcgaatcgtaaggcgcgacttcaggcggcacagtgcccagggagctgacgatgcggccccagttcggatcgttgccggagatggcgcacttgagcaggttcgaggcggcgacggcacgaccacaggcaagtgccgcgtcttcgctggtggcaccggtgacggtgatacggatgtcgtgggaggcaccttcgccgtcgccgatgatttggcgggacagggatgcgcaggcctcacgcaccagcttgttgaattcgtccttgtccggttcgacgccggaggcaccggaggcgagcagcaggaccgtgtcgttggtggacatgcagccgtccacgtcgatgcggttgaacgaatgttcggcggccacggcgagtgcggcctgcatctggccggcggagacgaccgcatcggtggtgatgacgcacagcatggtggccagctgcggggcaatcatgcccgagcccttgaccatgccgccgatcttccagccgttggagccggtcagttcgaccgtcttcggcttggtgtcggtggtcatgatggcgtgggaggcgtcggcgccggcttcggcggtggcggcaagagcctcatgggcgctcttggcaccagccagcacgttgtccaacggcagcagttcaccgatgagaccggtggagcagacagccacatcattcggttcggcgccgatgagaccggcgaccgtttccgcggtggtgacggactgggcgtaaccggcctcgccggtgcaggcgttggcaccgccggagttcagaatcacggccttgacgtgaccgtcggcgacgaccttacggctccactgcaccggggcggcacagaaacggttcgaggtgaacacgcctgcagccgcgtcgagcgggccgttgttgaccacgagggccaagtccttcttgccttcgacggatgaaataccagccgccacgccggcggcggagaaaccttgtgcaaatgtaacgctcacggtgctactccgatcttggtcaggcccgcgtcttccggcaggccgagtgcgatgttcagtgattggaccgcttgtccggcggtgccacggttgaggttgtctatggcggcaaaagcgtagatgcggccggccttgcggtcggcgacgacctgcaggtgggctgcgttggatccgatgatgttgccggtggcgggcagtgtgccctcgggcagcagcaccatgaagtcctggccttcataggccttggaccatacggcgcgaatctcctcatcgctcagtgccttggccttgtccgtcatgcgggcggacacggtggcgaggatgcctcgggacatgggggcgagaatcggcgtgaagccgagcgtgaattcgctggcttcggccgcgctcttgccggccgcgtgggcgaagttctgcagaatttcgggaatgtggcggtgcttgccgcccaccgaatacggcagggcggattgcagggcctcggcggcaagcaggttggtgcgcttgagattcttgccggcacccgagtatccgacgaccagatcggccacgatatcctgcgattcaaccagtccttcggcgatgccgggctggagggccagcgtggtggcggtgacgttgcagccagggcctgcgatgcgcttggtgccaggaagcgccgcgcgctggcgggtgtatgagccgtccgcggctttgccggtgatgagctcgggcatgccgtaggtccaatgctcatagaaatcgccgccgtagaactcatcccaagcggcctgctcttcgagacgatggtcggcgcccaaatccacaaccacggcattcggatcgagctgcgaggcgagcttgcccgaagcaccgtgcggcagtgcgaggatgataacgtcatgcccgttcagcacttcgggcgtggtatcttcgacgaccagattggccagttggggaatatgcggcatgtgcttggccatcgactcccccactgaggaatggcctgccacgcaggtgatgtcgaagtcggggtgcgcggccagaatgcgcagcgcttcaccgccggcatagcccgtggcaccggccacggccactgtatatttcgccatactcatctcttttcactgatgtgtcttgggatgagtatacgcgattatgcagactattgcatatttatgcagtgggtgtgttggtatgtgaacgctacttatgcggagatggagtcggaggaggagccggtgccgccggtgagttgctggagggcttcctggtagaggctcatggcgtcatagccattgaaggccatccagatgacggcgatggtgtacagcacgttgatcaccacggcggccacagccaaaccgaagcccttcatatggaaggtgcgcgtgcgccacattgccaccgcgcccatcagtgtcgagagcactggcaccgggaagaacagggcgaggataaaggagatgatcgcatacgaatcccagtgcccgtagagtgggttctggtttggatcgttcaggtcgatgccgtggtaataatgcggctggtgaggctgaccgttcggctgttgaccatacgactgcccctgcatgcccgggtacccgcccggatatgcgcccggaccggactgttggccgccttgagcatacggccagccgcccgcctgctgattgccgggccacgccggctgctgaccgtacggctggccggcctgctgggattgcgccgcgccaccgttgatgccagcggctgcggcggaatccttcttggtatccggctcgggagcgccataaatatacgggttgtaattcggcccgtattggccagacatagcaccatattcaggctgctggtactgcccgtatttcggcttgtcctgctccggttggctcatgacgctcctcgattcggatgatcggttgggtcaggcgcgcagctgggcgccgatttcggcggcctcagccacgatggccttgcggatggcgtcgctgtcttcggcggacagcgtcttgctcggcgaacggaacaccaccgcataggccagggacttcttgccctcgcccacctgttcgccggtgaacacgtcgaacagttcgatggattcgaggttcgcgccggcggccttgcgaatcacgttctcaagctggcctgcggtcacggtctcgtccacggtgaaggccaaatcctgcttgaccggcgggaacgtggagatcggcttggcctggacgggcttgccggtcagcgtggcgaacagcgcggtgaggttcagctcgaaggccgcggaatgggccgggaagccgagcgcctcgttgacgcgcgggtgcagttcaccaacccagccggtgaagacgtcgcccaccatgacgcgggcgacgcggccggggtgccattggacgggcacatcgtcggcggcgggctggtcgagttcgattgcggcaccgatacggccggcgatgcggcgcacggcctcgacggcgtcggaccagtcgaccgggcgcttgccgcccatccagccatcgtcctcggccagaccggtcaggatgccggccacatggtcgggctgttcgggcagaccggcgtcaagcgcggcgagctgttcgtcggtggggcgcacgccgccgggcagtgccgggatggcgggcgcgttcggatcccacaggtagacgtggccgagctcatacagggacacgttttcgatgccgcggcggatgttgcgctgcacggtggtggccagggtcggcagaatctcgcgacgcaggtacggacggtcgccgtagagcgggttggcgatctcgacgctgaccttcttggtggcttccgggtcgaagccgaaggccttgtaatcgtcgtcgcccacgaacgggtagctcagcgattcgaccatgccgaactcggcgagctcgtccgccacgcgacggcgacgctgctggtccggggtcaggcccaccagaccctcgaccggtgccggcggcacggtgatcggaatctggtcgtagccgaccagtcgggcgatttcctcgaccaggtcgcacggctcgttcaagtccggacgccagctcggcgcggttacggcgaactcgccgttgccgccgccggccaccgtgcagccaatgtcggtcaggatgtcggagatgcggttgatgtccacgtcgaggccggccacgcgggccacttcggaggccttgaagtggatgaccttggcgcgcggcgtgttgttcacgtcgttcgggtgttcgctgggctcgccgttgccgtacttggccatgagctcggcggccatctgggtggcggcgggctgcagcgcggtgtcgacgccacgttcgaagcggcgggaggcctcggatggaatcttgtggcgacgggccgaacgggcgatggtcacctgatcgaagtgcgctgcctccagaagaatgttcttggtgtcagcggtcacttcgccatacaggccgcccatcacaccggcaagaccgaggatgcgcgagccgcgttcgccgttcggcgaatcggtgataagcagatcttcgacgctcaggtcatgttccttgccgtccagggtggtgagtttctcaccctcgttggcgcggcgcacgacaatcgggccttcgagcttgtcgaggtcgtaggcgtgcatcggctggccgaggtcaagcatcacgtagttggtcacgtccacggccaaggagatggagcgcatgccggcgcgaatcaggcggcggcgcatccagttgggcgtgtgggcgttgggattgaagtccttgacgatacgcgcgtagtagcggtcgcaaccgggcacgccgtgaatcggattgttatcgtcgatttcaacatcgatgtccaccggggtgccgggctggtagtcagcaggttccggggccttctcgttcagtgccacggccggatcggtgtaggcggcaccggtggagtggtggtattcgcgggccacgccacggtaggacagcgtgtagccacggtccggggtgatgttgatctcaagcagaggctggtcgaggtgcagcaggtgcatggcgtcctgaccaggcttcagagcctcatattcagcctcggagaagccgtactgacgcagcagaatgatgccattgtggttgtcgcccagacccagctcacgttcggaggcacacatgccgttggagatgtggccgtaggtcttgcgcggctcgatcttgaagtcgccgggcagcacggcaccgggcagggtgacgacgaccttttcgccggccttcatgttgggcgcgccgcagatgatgccgcgcggcaccttgttgccgtcttcgtcggtctcgttccattcgtcgccgcagtccacgtggcaccagttgatggtcttgccgttcttctgcggttcgggggtggcgtcgaccacgtagccgaccacaatcgggccggtcacctgggaggagtggatctcctcttcctcaagacccaccttgacaaggtccttggcgagctgttcgtaggtcaggccttcgggaacctcgacatggtccttgagccaatcgatatcgatcataggcatggctgaatcactcccccatcacaaactgttcggcgaaacgcacgtcaccttcgaccaggtcgtgcatgtcgttgatgtcgctgcgcagcaggagcgtgcgctccatgccgacgccgaaggcgaaaccggtgtagacgtccgggtcgatgccggcggacttcagcacgttcgggttcaccatgccgcagccgccccactcgagccagccggggccgcccttcttgtcggggaaccacaggtcgagctcggcgctcggctcagtgaacgggaagtagctcgggcgcaggcgcgtcttggcttcagggccgaacatggcgacggcgagcttgtccagcacgcccttcaggtcggccatggtcaggtgcttgtcgacggcgagggcttcgcactggtggaacaccggagtatgggtggcgtccagctcatcggtgcggaacacacggcccggggacgcgatgtacagcggcacgccacgggtcaggagggcacggacctgatcggaggaggtctgcgtacgcaccaccatgttggagccgacgaaaccagcggcgtccttggcctgattgcccttgacgtagaaggtgtcctgcatctggcgggccggatggtccgggccgaagttcagggagtcgaagttgtaccattcggcttcgatttccggaccggaggagatctgccagcccatggagatgaagaagtcctcgacgtcttccatcagcttgggcagcgggtgacgggcgcccagaggcttgcggttcaccggcagcgtcatgtccacggtttcagcggcgagtgcggccttctcggcggcttccttgagctcgacctccttggggccataggcacggccgaagtcggcgcgcagcttgcccatgagcttgccggcttccttcttctggtcgacgggcagggagccaatggccttgctggccttggtcatcgccgaatcggcacctgcgtacgttgtcttgatggccttgagctcctccaggttggaggcgttctggattttctcgatgcccttggcaacctcagcggtcacctggtcggcgtcgaacaccatttgttctgccacgagaaccctttcgtctgatgttttctcagcgtttcacagcgtttttaccggtttcacattctttcaacatgacccgacatagacagcgacatcaacatcaccgcggccgaggtgccgaggttcagcgattcggccttgccgtacagcgggatggagacgatgcggccgcagcgtgtgaggatgtccggttccaagccacgcgcctcattgccgaacagcacggctttcggagcctcgaccgccgccttgtccgccagtactgcgggcaggctttccggcttgcattcttcggtgccgtatacgtcggcggcccagacgcccatattatggtcgcctgtccaggtgaagaattcgtcggtgctcatggcgagtaccggcagatggaacagggagcctgcggtggagcggatgaccttggggttcagcacgtccacgcagtcgtccacgaagattacggcgtcgcaaccggccgcatcggccgcacggatcacggtgccggcgttgcccgggtcgcgcacctgccagaaggcggcgatctgcgggccccggccgttcttgccaagttcgacgtcatcggcaccggcgtgcatggactcggcattgccgacggccacgatgccctgggcgtctggactgatgcggtgcatcacgtcgccggtgcagtagtgcacataaatcgtggcatcctgcgaggtttcgacgatcttctccaacgtggaggagatgatacgcggatgttccaacgcctgcgaaacctccacatagaggtcctgcaccacgtccggccgccaagtgacggcctcgcgcacggattgcgggccttcgataagaaaacggcccgaacgttcgcggcctttggcgcgggtcagatcggcgatgcggcgaacgcggtcggatttcggattatcaagaatctgggcgttgatgggcatagccactaccctactgccgggtcattacgtcagtcgtggctcgctcccgctggcggaggcatcgtaagcctttcagacaccttgaaaggcactgtgccagtctgtcgcctttcagacaccttgaaaggcgaagtgccaattcccggtgccgatggctacgcctatggaggccagcgggacagccagacagatgacgtagaagatccagtcgataggcttcagacgcgagatacgggcttgggagcgtggggcgctggagccgaagccgcgcgcttccatggcggtggcaagtttggtggcgcgccggatggaaagcaccagcagtccgaacgcttgggagagggcacgggcgatggcgttaccgtcgccaaggccgcgcgaacgctgggacaagccaagtgcgcgccaatcttcctgcagcagcgtaaacatgcgcaatccagccaacccgccgtatacgaatcgcggtgagaagtgcagaatctcaaccaaaccgtccgccaaatcagtgggatcgaggcccagggccaggatcacgccgggtacggcaatggccgccaccctgatagccgtggcgatggccagattaatggatccctcgctgatcacaatccagccaccctgccacaggatctcgcccgaggtacggccgtagagaaacacggagataaaactgccggcggcggcgatccataccggccaggtcttacggcatacggtccacggagccacgccaccaatccacagcagcacgaattcgatgccgagcgccgtggatgcggataccacatccagactgatgaacatcggaacgcacagcaacagcgcaccgatgatgcgactgaccgcgttgatgcgcgctatgaaccatgagggcgatgaggctttgaccggctccacgcgcgtttcctgcgggctgacggttaccacgtcactcatgcctcgcctcctcgaacatcacgcgtcgtgcgcccagcgcatccaccagcgcctcatcgtgcgtcaccatgaccacgcacgagccttggtcgcggatggcggcgatcagcttgaccatttcattccacgtactgaaatcctgtccgaatgtcggttcgtccatcaccaacactttgggtgcggcggccagcatggaggccacggacagtcgccgcttctccccgccagacaaggtatacgggttggctttggcgaagcgcgtgagattcatctgctcaagcatgcggtcggcggtccgataagcctcgtcttggctctgccccatcgacttggggccgatggcgacttcgtcacgcacgaaattggcagcgaactggtgttcgggctcctggaacaccatgccgatacggcccagcagttccttgcttttccagtcaatcggctcacgcccggcatgcgcgggcttgaggttgtcggcgatgagcaccttgccggcgataggcttgagtagcccggccaaggtcaaggccaaggtcgatttgcccgcgccgttcggacccatcagagccgttacttcgccgggatagaaatccagattgatgccaacgccaagagcggttccacggccaaagcttaagttctcggtgctgagcaccggcgcatcgtgcgcagactcctgcttcggtgagtaatcgggaatcgcacggcccggcacccacgcgccaccggcggccaacacgtcgcccatctcggcgaacacctcgtccggcttgccgtcggcgatgaccgcgcccgtgggcgaacttgcatcgggtcggccgagcacgatcacgcgatcgaccagatcgagccatacatcgatatgatgttcgaccacaaccatggtctgcccggtggcctcgatgacctttttgaccgcgtcatgcacttcgaccacgccttcggggtcgaggttggcggtcggttcgtccaacaacagcagaccgggcttcatagccagcacgccggccaacgcgagacgttggcgctgaccgccggacagatggcgggtggaccgatccagttcgagtccgccgagtcccaccatatccaatgattcgcgcactcgctgccgaatctcctcgcgcggcacgttgaggttctcgcagccgaaggccgcgtcatcgcccagtcgttcaagaatgatctgcgagtccgggtcctgaagcaccagtcccacgcggcctcgcgcctcgcgcgcatcgacgccatcgatggtgagcgagccctcctgctcgccttcctcatcgccgccaagtacgcctgcgagaccggccatcatcgtgcttttgcccgcccccgaagcaccgagcagcaacacacgttcacctggccggatggtgaaatcgacggcacacaacgcgaagtccttacgcgtggcgtgccgccatccccagccgctggcctctaccgcagccggattaacctgcatcagacgcgcgccttgctgcggccggattcaaagcgttccagagcgccggtggcggcgagcgcacgagacaagtaccagaccaccacgccggcgatcacgacgccggagatgatggagccaaccagataccaagtgacgcgcaggccgttccagcccgggttggtggcccagtagtaggcccagcagcccacgccggcgagcgcaccggacaggatggtggtgccgatgttccacttcttccaggcgaagacggcgaaggcgatttcggcacccagaccctggaggatgccgacgatcagcgagccgccgacgccccactggttgcccagcgtaagctcgaggaaggcggcgagggtttcggcaaacagtgcggcaccgggcttgcgcacgatgattgcggcgagcgggccggcgaacagccagaatccgttgagcagaccctcgaaaccgggggtcacgccttcaaacagggccagcggggcggagcagacaatgtcccagccccagaaaatgacgccggatgcgacggcgatgattgcggcgacgacgatatcgacgacgcgccacttgtaattggctttggccacagcttcagtcatgaatgtgcctttcttctgctcgtacgcaggccgaacatacatggatatatgtacgcacatgatgcacatgttcgtggccacgcgcgggttggttcaggcacgggtgggtaagagcgacatttccgtgcgccggcattatccggtcacgttccatcggtcgagactatgagtctcctctcagccgcccaacggcagctcccgtgtcaactcccgactataaagcaagccgccgtcaaaggcaatagccacatccgtgacctacctgacggcagctcgccaccattaccgatgcggttcggttacttgccgagcttgtccagcagcaaagcctcggtgatcacgttgttcttgaggccgggcagggagatggactcattggggctgtgggcgttggccttcgggtcttcggggccggtgaccagcacctgagcgttggggaaaatgcgctgcagttcggggatgaacggaatggagccgccctcgcccttgttgatgggctcaacgccgaaggcctcggtcatggcttccagcgcgtctttggtggccacggcggtcgggtccatggcccagcccatgccgttttcgccgcgttcgacagtgaccttggcaccgaacggcgcgtgggattcgaggaatgcagccagtgcttcctgcgcttcttcagggcgctgggtgggcgcggtgcgcagcgacagacggaagcgggtctccggggcgatcacgttgaaggatccctcgaccgggtgggcgtcgaagccgatcacggtcacggacggcttggtccacaggcgtgaggccag

SEQ ID NO: 2783 - DNA, 14488 bp, Unknown
  R36_18m  MAG No. k141_17584
gcgcgcggtagccttaatgtatggatgcagacaagccggcgcaacgcaaatcctatgcagggaacaccaccctcgaaatcttcgaggtgctgtggcgtcacagctactttggacatggcctgaccgtgcggcaaatactcgatgaacttgcccgtaaacaccagctggaagatccaagcgagctgccgaccgagaaaaccatacgaaatcagctcaaaaagcttaccgccacggaatttctcggcagacatatcgggcatctcaccgaaagcgaccttgccggcatcgaatgcaagaatccacaacccggctggtatcttgacgcattcctatccaccgccgaaatgcgactgctactcgacagcctcaccttgtctcgcatcagcctcgacaccatggacgatctcatcggtaaaatccgcgaactcgcaggtgccgctgggcaagcagtaggttaccttgagcacgtggccacctacacgcatatcaacggcgagttcctatccaccatcgaccaactgaatcaggccattgaagaaggccacggcgtaaccttccaataccgtgattacggcccggacggcaccctgataccgcataaaagccgtacgggcgcaggtcgaattacctacaccgccgacccttaccagatggtgtacaagaacggacggtattacctcatctgccatctacatggcgaggataatctccgcattttcgtggtcaaccgaatcgccaacgtcagcgccaaaggcaggaacggcacagttccactggaaaaaccagcgccggctgattttgacgcagtgaacttcatgcgtcaccgcccgtatcccgtagccgatgccccgattcgcatccgcatggccgtacgagacgaatccatgctcaacaatgtgttcgaatggttcgacgaccctcagatcaaacattcgccggacggcacacagttcgaagtcatcgtcgatgctcccgaacgcgccgtgttctggtgggcattgcagtattcctgggatggccgcgtagtgattcttgagcccgattcgctcaagcgcaaactctatgatgccgggcgtcgcatggccacagcctatgctcccgaatgatgcagcatcacatcgcacacctccttgccgagttgttcaccagcgaatttcaccggagaacctatcatcccatcgccaatcacgttcggtaattttttaccgaacaactcgatttcaagccattccacgaactatggcccccgcctagccgtacttgacgctaaggtggaaccatcacatgccgcgatgcacatgcaacgcaaacgcaacgatatgtaaggagcaactatgagcgaagagcgtaccgcatggggatggggtctggccagcgtagacgccgccggcaccaccctagacgtctggtaccccgaactgaatctcggtgaggcaccggccgaggccgatcgtccaaaccacaatttcggcactctggctcacgatgaagccgacgcccgtggcatccgccgcgtgccggtattcgtcgtcagccagttggacgagccgatcagcaacgccgcggacgcttacctgaaactccatctgatgagcatgcgcatggccaagccgaacacgctgaaccttgacggcatcttcgcccaactcgccaatgtggtgtggaccaactacggtcctttcgccgttgaggacttcacactacgcaaggccgatgtcgaacgcgcctccaccgaagccgctctcgctttcgctgctcaggccggactgcctgccgcagctcctgccaccaccgtcaacgtgttcggtgtggataaattcccgcgcatgatcgattacgtagtgcccaccggcgtgcgtatcggcgacgccgaccgcgtgcgcctcggcgcttacttgtcttccggcaccaccgtgatgcacgccggattcgtgaacttcaatgccggcacgctcggcgtctccatggtcgaaggccgcgtttcgcaaggtgtggtcgtgggcgacggttccgatatcggcggcggtgcctccatcatgggcaccctctccggcggcggcaagctgcgcaactccatcggcgagcactcgctgctcggcgccaacgccggtatcggcatctccctcggcgataactgcaccgtcgaagccggtctgtacatcaccgccggcaccaagatcagcatctgggacaaggccaaggccgcagccggcgagccgctcgaagtcgtcaagggtgctgagctctccggcaaagacaacatcctgttcatccgcaactcggtgaatggacgtatcgaagcccgctaccgcaaggtgggaattgagctcaacgccaagctgcacaagaactgaaattgaaataatggagcgttatcttcgttgctcctcggtcgacgtacttccgtacgccttccctcggtacgcttcgataccgcacacattatttcaatttcagaactagccctgctcgttcttatgcagccgtcgcagcatagccggtttgcgctgtacatatagaaagcgcctcactggatctccagcgaggcgctttctcaaaccaacaatcaccgctcgtccatcggcatgaaatcgcgctcgaccggaccggtgtagacctggcgtgggcggccgatcttggtgttcgggtcggccagcatctcacggtactgcgcaatccaaccgggaatgcggcccagtgcgaacagcgtggtgaacatggccggatcgaagccgatcgcccgataaatcaagcccgtgtagaaatcgacgttcggatacaggttgcgcgatacgaaatactcgtcgttcaacgcaatatcctcaagctcggtggccacatcgaacaacgcacgctcgtcggacggcagtttctgcgtatcctcgcgctccatgatcttctcaagatacttcttggcaatcgccgcacgcggatcatacgacttgtatacacggtggccaaggccggaaatcttctggccatcctccttggcatcacgcacgaactcggccacagacttaccggaatcacgaatcgccttcaattggcgtagtacggcctcattcgcgccaccgtgcaacggtccggacagggcattgacgccagcggccaccgccgaatacaggttggcgtgggcggaaccggcgatacgcaccaccgaggtcgagcagttctgctcatggtcggcatgaataatcaacaaacgacccaaagcatgcacatacagcgggtcggattcaaacggctcgtacggcacagcgaagcacatgcgcaggaagtcgtccacatagccgcgcgcgtaatcggggtacagcatcggctcatcgcgacgacggcggaagatgtacgacacaatcgtacgggccttggccatgatgatcttggcggcctcatcaagctggtcgttgtcagaaatatcggtggtgtccgggtagaacgtggccagcgcattgatggcggaggcaagcacgctcatcgggtgagcggagcgcgggaacgaacccatgaaggtacggaagtcttcgccaaccatcgtcttgtggttgatgtccgcgcagaactgctcatactcagccctgctcggcagctcgccgtggcgcagcagccacgccacttccagaaaatcggagttctcgcacaactgctcgatggggtagccacggtagcgcaggatcgaatgcttgccgtcgatgtaggtgattttcgattcgcactgtgcggtggtgaggaatccggggtcgagcgttacccagccgtcattgcgcagcttggaaacgacgatgccatccggccctgcactagccttcaccacgggcaggttgaacttgttcgaatcgacatcaagttgtgccgttgccattcgcgcaccttcctcttcatgaaccacttaccccaaacattaacgttcacgcgttcgcgaacgctagtgttcggtactttatgtcttctgtgttaccgccggcagacaccggtcgatacacgaaagccgaagtgcgctcatgctatcaaagcaaacgcacttcggcttgttacgtctcgaattcgcgggaaaaccgcaaacatatagacggttgatgagatgccgatcgcccatcacaggccaatcaggcacccgccatacgccaaacgccaatcagaggttggtgcgatcggtgaagatgatcgggccgttctcggtgatggcgatggtgtgctcggagtgggcaccgcgcgagccgtcggaggcacgcagggtccagccgtccttcggatcctggaagatctcgtcggtggtcttgaggaaccatggttcgatggcgatgaccaggccttcgcgcagcttgtagccgtggtgggcgcggccgtcgttcggtacgtgcgggtcgccgtgcatgatgtggcccacgccgtgaccgccgaactcgaggttgatcgggtagccgtattcgcgcgcgatgtcgccaatggtgttggagatgtcgccgagacggttgccgggcttggccacgtcgatggcggcggcgagcgcttcctcagtgcacttgatgatgcgcaggtcttcggggtccgggtctttgccgaccacgaagctgacggcggaatcggccacccagccatccacggagatggcgagatcgagggagacgaggtcgccgtccttcaggctgtaatcgtacggcacaccgtgcagcacggcgtcgttgacggaggtgcagatgtagtgggcgaacgggccggtgccgaagtcaggagcgtagtcaacatagcaggattcggcgcccttgcggtccacgatcttcttgtggacgaactcgtcgatttcgagcagattggtgcccaccttggtggtctcctgcagttccttcagaatgccgccgacgaaacggccggccggcttcatttcctcgatttcacgaggggtcttcaattcgatcatgaggttctttctaccttgttgagacttgttctcaactctagcccagcccggggtcaaccgccagcgagccccaccggcggcggccataagaaagcgcccggcaggttcacaacctgcacgggcgctttggattgattgtccggagattgattgtctggagcgcgagattacttgcgacgcttgccgaaagtgaacgcgcgaatcactgaagtaatccccatcaccaccatggcacatccgccgaagataatcatgaatacggcggagctcagcgggctcatcagcaccacgaagccggcgataatcgagatgatggcataggcgatggcccagccggagcgcgggatgcgccatgattcgactagagccatcacgccttccataatccaaccgaaaccgaccatcagggtgatgagtaatgccaaggtctgaccggtcataccgtagtttcgtacgactacgacgcctccgaaggtcagcagaatgccgacgaacacgtccagcacacgccagccgcccggcagacccggctccacgagagcgctgacgatgcgcaccacgccggaaatcacgaaatacacgccgagcaacaatgcggccaaagccagcgtcttgttcggcaccaacaacagcgcagcgcccaaggcgatggcggccacgcccaccacgccgtaaatgatgcgaatcttggtcttggccttttccggcagccattcctcgatcaggcggaatggactgaaattgccgacataccagttggtctgctgccagccgggttgactttgatcgccccatgaaccattcggctgcccgtccgcttggctattcgattggccgtccgcctggtaccgccgaccgtccggaccccatgctggctggccgttcgggccatagttcggattgtaggcgtacgggccgtagtacgggttctggttcggtccgccttgtggctggccgttctgcgcctgctgattctgagtgtcttgcgctcccggcgcaccttgcggaggatattggccgccatgattgctgtcatacgcgccatactgcggttggcccggttggcccgccggattcggctggctcggctggctctggttgggctggcccgtctggccattccactgaccctcgtttggattgctcatcgtaactccttaactcaaggtccatattcaggttccacataccatgttaggcaagttacctaatttgaaccatcactacagttaggcaatccgtctagttcactgacagcgcaatacccataacgcaatatctgcatcaccaacgcttctcccccgccgcgattaggcttagggccatgaccaacgaaaccgaaacgctgacgtcgggcatcgacccggcatcgttctcctccgtcatcaagccgaccaatgacctgttccgctacgtgaatggtccatggatcgacacctaccgcctacccgacgatcgttcgcgctacggctccttcgacaagctcgccgaagacgccgaaaaccaagtgcgcgacatcctcgacgccgacgactgcccggccaccaaatcgcaggctctgtatcattcgttcctgaacaccgacgccatcgaggccgccggccttgacccgatccgcgatgagcttgacctcatcgattccgccatcgacaaggccgctctcacgcgcgtgctcggcaccatcaacccagccggcggccccgacctgttcggcttggccgtttacggcgaccccggcgacccggaccgcaatatcgcccaccttgagcaggccggcctttgcctgccggacgaagcctactatcgtgaggaccactacgtccccgtgcgcgaagcatacgtggcaatggtcgccacccagctggtgaacgccgggtacgcgcccgccgccgaatccaacggtggcgatgaactgccggccaacaccggcgatgacgagagcaatgctcccaccacggttcccagcgaagccgcacttgatatggcccgacacttccttgccgtggaaaccaagatcgccgccaatcattgggacaatgtggccacgcgcgattcggtgaagacctacaaccccaccgattacgccgatttggccgccacgctgaagaacttcgatctcgcttcctggatcgacgcctggcagaccgcctatgacgccaccgaggccgccaaggctcagtcgatcgatttcaagtctgtgttcgcgcgcgtcattgtgcacgagccgagcttcctcactggtcttgatgcgttctgggccgaggccgatctggccgaccttaagctgtgggcccgtgttcacatgattctgggcttcgcctcctccctgtctcgcgacttcgacaccaccaactttgacttctacggcaaggtgctctccggtgccaagaagcagcgcgatcgttggaagcgcgcggtgagcctggtcaacggcgtctgcggtgaagatgtgggccgcgagtatgtgcgcctgcacttccccgaaagctcgaaacgccgcatggaagagctggtcgccaatctgattgacgcctaccgcgtgtccatcgccaattccgattggctgggcgaagacaccaaggccaaggctctggagaagatctccaagttcacgccaaagatcggctacaccaaccactggcgcgattactcggcactgagtgtctccgcggatgcgctgcccgccgagaacgccaaggccgcgaacctgtacgagaccggctaccagctggccaaggtcggcaaggcggtcgacaaggacgaatggctgatgaatccgcagacggtgaacgcctactacgagccgagcatgaacgtcatcgtgttcccggccgcgattctgcagcccccgttcttcgacccgaaggccgaggatgcggcgaattatggcggtatcggcgcagtgatcggacacgagatcggccatggcttcgacgatcagggttcgcagtatgacggcgacggcaagctcaacaactggtggaccgacgaggatcgcaagaacttcgaggcccgcaccggcgcattgatcgcccagtacaacagctttgtgccgctgcagctggccgagaagtacgctgacgaacctgataaggcgccgcacgtgaacggcgcgctgaccatcggcgagaacatcggcgatttgggcggcgtgaacatcgcgctcaaggcgtatgcattcgcgctcggcaaggcggcaggtaagcccgacgccgaagaagacggctcccccgccgccatcaaggcactgctcgataccgcccccgaaatggacggattcaccggcctgcagcgcttcttcctgagctacgcctccatctggcgcaccaagaaccgcgacgagctggccgaacagtacctgcagatcgacccgcattctccggccgaattccgcaccaacggcatcgccagcaacgtggacctcttctacgatgcctttggcgtgaccgaaggcgacgccatgtggctcgcacccaaggaccgtgtacgcatctggtaatccccgttatgtaagagaaaaccgctgtgcttgcctcgattacaggcgaacacagcggtttttcatgatgtatggttggcactcagaattcggattcgccgggatcggaagattcggcgaaaccgtcgacgtaggtttgttgggctgcggactgtggctgattagcgccagcgtccggttgcgacatgacggcatcggccatggacgcagccgctgactcggttgatggcgacggcgattggccggaatcggaggtgaccccaaattcgacggggccagattccgacgaggtcgcatacgggtccatacccacaccggatgcggcaccgtccacactatattgcgttggcctcatgtgcggtgacgatgctcgttgcccgtttccgacatccatgccttcggcggcaccgttggcattgccgttaccgttgccaccattgcctccgttcccattaccggcacgctgtggcttgatcagcgacgtggtgccgaaggtcaggtcatgcccaatgttggtggcttcgagaacggttctactgcgcggttcgccttgctcattggtccactgctcggtgatgagtgagccgaccacaatgatgcggtcaccgcggcgaaccgaactggcggcgttcacggccaaagcacggaacgctttgacgcccacccatgcggttccgtaatcctcccattgtctggtagtcgggttgagtcgactgcgggtgctgcccatacggaatgtcagcacgcggaaactctcagttccgcctagtgtcggatcaccggccacaaagccggtgacggtcactgctgcttgttgatttgccatgatcggtcctttcctcggcctgctggcctgttgtttggatgtggaccgccggagcctgtctccggcttcattgccggcttgcacgccccagcggtacctccactgtgaggcatgacgtttgaagtgcacaagggcaactggcaaatgtggatactgtgacgcagttgaaattttaagaatgtggataagtttcggttatccacaacaaagcgccattctgcgactgggcagaatggcgcttgatgcgattaacgccgaggctgagtaagtgggactcagctgagggcggcgaagcgctcggcgagcgcgtcggcggcttcggcggcgggcacggcgaccttgttttcgccgttgcggtcgcgcagttcgatggtgccgtcgttgacgtaatcgcggccgaccacggcgaccagcggcacgccgatcagctcggcatccttgaacttgacgcccggagacaccttcttgcggtcatcgtaaataacctcaaggcccttggcctcaagctcggcgaccagcttctcggcaccttcaaacgccacggcgtccttgccggtggccaccacgtgcacggcagccggggcaatcacggacggccaagccaagccggcttcgtcgtggtgtgtttcggcgatgcaggccagcacgcgggaaacgccgatgccatagcagcccatccacaccggcacggccttgccgttctggtcgagcaccttcaggtccagtgccttggagtacttgagacccagctggaacacctgaccgatttccacaccacgctcgaagctcaacggaccggaaccgtccgggctcatgtcgccgtggcgaacctcaacggcttccaccacgccgtcggccttgaagtcacggccgtacaccaggttgtagtagtcgacctcgttctcatcggcaccagtgaaccaagcggaacccttgaccacgtgcgcgtcgaccaggtagcgaaccgggttcttcacgccagcagcctcggcctgcgggccaagcaccatcggtccgatgtagcctggcaccagttcggggtgctgcttcaggtcttcttcagtggcctcctcaagctcggcgggagcgaactgggcttccagtcgcttcatatccaccgtacggtcgccgggcacgccgacgacaatcacttcacgccacggctcgtcatgctcttcatcctcagggtgcttgacggtaatcaccacgttcttgaggatgtcggaagcctgccattcacggccatcagtacgcgggtggtcggcgttggcacgctcaatcatgttatcgatggtcttagcatccggggtggcttccttggaagcggcgggagtggcggaagcatcgatttccggcagctccggagtgctcagggcctccacattccatgccttgccggaaggtgccagcgcgaaggtatcttcgccgatcggcatcggagccaggaattcctcggatgcggagccgcccatcgggccggacatggcgaacacaggtacgtacttcaggtcgaggcgctggaagatgcgctcgtaggcgccgcgctcgtcatagtaggccttgcgcatgccttcttcatcgatggtgaaggagtaggcgtccttcatgatgaattcacgaccacggatcaggccggcacgcggacggaactcgtcgcggtacttggtctggatctggtacagggtgacgggcaggtctttgtaagaggagtacatgtccttgaccagaagggtgaacatctcctcgtgggtgggggccagcaggtaatcggcctcgtggcgatccttcaaacggaagatgttgtcgccgtactcctcccagcgatgggtggcctcgtagggttcgcgcggcagcagggccgggaagtgcacttcctgggcgccgatgccgttgatctcctcgcggatgatggcctcgatcttgttcagcacgcgcagaccgagcggcagccaggtccagataccgggtgcggccttgcggatatagccggcgcgctgcagcagcttggccgaatcgacatcggcatcagcggggtcctcgcgcagggtgcgcaggaacatggttgacatacgaagggtattggaagtcatgtgttccaagatattcgcgtgaaccgacaagcccgcctgctattcgcactattccggccttcatcttggcattcggactcattcgtacaacaatgatggctagaagggtaggagggcacgatgacgcagccgaccgagcaacaggggaatcagccggaacccgcggagcaaccggtgtatcaaccggcccagcatgggccccgcaattttctgctgcaaccccgcaattcccaacggcagttccgcgacaaccggtatcgcaacagccaatggccatgccaccatttgcgcaatcgcctatgtcggtcccggaacaagcggcctgtccggagcggccgcgctgattgtgggtgtgcgtttgctgcaagcaccgttgatctacggcacggtgattcttatcgtcagcacggtgactgtgctgtggccatggcgggccgaattctcccgccactaccggtgggtgtggcttgctttgggcggcatcattctgattgtggcagccgcgcgctatgaggcgagcctcaaatcgatgaggacgatcgccgcgcgtattggcgatctgcgctaaatcgcgcgggcgacctgaggcagattaccaacgtccggcgatagcagtcctgcatacggggcagtgcccattgccactgtatccggcagataaacggttggcaatgattcgataccaatcgcgttccacgagcttggccctgcattcagggtttgggcaatatgtggtatcgccttcacgatcatgcacgttgccggtgtacacataattgagtccctcttcgagggcgatgcctcgggcgcgggtcagagtctcgtgcggggtgggcgttacgtccatcatgcggtaactggagtggaatgcggaaaagtgcagcggcacgtccgggcccaagtgctcgcgtatccatgtacattcagcatgcagctgggcgtcgtcatcgttgagtccagggatgagtagcgtggtgagctccacccacacgtgttcgccttctggtgtgcgtgcctcgttgaccgcatagtcgatggtttcgagcacatcggccagatgcgtgccggtcactttccaataaaattcttcggtgaagcctttgagatcgatgttggcggcgtccatggcggcgtagaagtcgggccgggcttcggcgctcatgtatccggcagtcacggcgatgggatgaatgccgagcgctcggcaggcttcggccgtgtcgatggcatattcggcgaacacgatcggatcgttataggtgaacgccaccgaatcgatgccccggtcggccgcgacctgcgcgattttctccggactggcttccacgccgagccggtcgaaactgcgggctttggcaatatcccaattctggcagaatcggcaaccggaattgcagccagccgtgccgaaactcagcacgctggaaccggggtggaagtggttgagcggcttcttttccactgggtccacggcgaagccggagctgcggccgtaggtgtcggagacgatgaggccgtcgtggttcgagcgcacgaaacagaagccgcgttggccgggcttgaggacgcagcggcgcgggcatagttcgcagcgagcgcggttggtaccgtcgtggaattgcgtttgccagcgggctatggcggggttacgaacatctgtgactgacgccgtatgaccgcacgattcccggtgaccaccctctgattctcggtgaccaccctccgtcgcttcgcgccacctcccgccagcgggaggggacatggttgctgcgttagtgctcggcataggcggtcacctcgtagcgttgacagtcgatttcgccatcgttccagtcgtaggacgggcggataccggctttggcgagcaggtgagcgacgaaatcgtgcggattgggcagctcatcccacacttgtggcaggaatgtggcgctgcggccacgacggtcggcgagaatcagaccgtctttgccggggcgtaatacttcctcaagttcagtgcgcgaacgtaccgggcgttcgacgttgctgccgtcccgtttgacggcgtcggtctgaggtccggattgcagcgatgccagagtcgcggtcttcgagccggtatcgcgcgaatcggtgtcacaggagttcacggtaatcggctcgggctcgcccaagacggatacctccacgttgagcaacgggtattccgcggcggtgaccgggttgaaacgtgggtcacgggtggcggcgtccaccgcatgtgcagctatgtccttgccgagcgagcggtgggcggccagcgaaccgatgcacccgcgtagccggccaccctcggtcagggtaacgaaacaggcaccggactcgttcagccatgggtttgcggcaagaatggacgcggtcgaatcggcggctgttggatgttcaatatgcaaccgttcccggatagcggcacgggcgagtttcagcagcacatcaccatgggctgttcccgattcgcctaagtcatctgcaccggctggagcatctgcttctggtttggattcccacgcggcaaacgagacatatcccactaccggctcgtcggcgtctcgcattgcggggcgaggttggccggcaagcgccaccacgccgtcgtcgccggaagtggaacagccgagctcgaagagcttcatgtccttgcggccttttaacacatccagaaggccgttgatcgggtatgcgccacaggcccggcgagggtgaatcggcagatgcaaagccgcaatgtccgcaatggtctggtcatccaacgcgcgggcgacttcgtgcggatgatagtgcgagagatccgaactaatcacgatgacggtttccgggccaccccacaaagcacgcaacacatcacccgcctcttgtggcgtggcatcgcccgcgttcaacggcacaatagtgaggtctgggccgagcacggtttgcaggaacggaatctgcacttctaccgcatgttcttgtgcgtgggttgggccattgacgatcattgcgggagccgacgcgcccggacgggcatgtgtaccggagcgcaatggctcattgacagacaggcccagagccttacgctcggctgcaatgtctaccggcacagtgcccagcggcgtttcaaacgccgctgccgtggaacaggcgacgcctcgcacggccac

SEQ ID NO: 2784 - DNA, 12561 bp, Unknown
  R36_18m  MAG No. k141_17730
gtggctgccacgtggatgcgcggcgtgcgctatgtaaactgcccgacctcgctgctggccatggtcgatgcctccaccggtggcaaaaccggcatcaacaccccgcagggcaagaacctcgtcggctcgttctacacgcctgccggtgtgctggccgacaccaagacgctggctacgctgcccaatgacatcttcatcgaggggctcggcgaagtcgtcaaatccggtttcatccgcgaccccgaaatcctgcatatcctcgaagaccacgcagctgaactgcgcgctttcgacggctctacattcctcggctcgccgctcgaagacgtggttgccgagctcattgagcgcacggtaaaggtcaaggcctaccacgtctcctccgatttgaaggagaagggtctgcgtgaattcctcaactacgggcacacgatgggccatgccatcgaaaagctcgagcacttccgctggaggcatggcaatgcggtggccgtcggtatggtgtatgccgccgagctggcccatctgatcggttacatcgatcaggatctggttgactatcaccgttcgttgctcgcttcgctgggtctgccgacgtcgtggaatggcagctcgttcgacgacgtgctcgcattgatgcatcgcgacaagaaagcccgtggcaacgaactgcgtttcgtggtcctcgacgagattggtcacgtcgtacacctcgacaacccgcccgccgaagccgtagaagaagcattccgtcgtatccagcagtaattgaacggccgtaggccgtgccgttcgccatcccctcagaaaaagtacttggctcccctctaacggaggtgccccggagtcggatttaccttctacctccctctgatgagggaggtgccccgaaggggcggagggagagaagcacaaacaaaaggagtcccaatgaccaaagtcattgttgtcaatggccctaacctcggacgtctcggcgtccgccagcccgacgtctacggtcgtcaagacctcgacaccctgcgcaagctctgcgccgaatggggcaaggacctcggcctcgaagtcgaggtgcgccagaccgacgacgaagccgaaatggtgcactggatgcaccaagccgccgacgagaaaaccccggtggtcatgaatcccgccgccttcacgcactattcgtatgctctcgccgacgccgcgcacatggtcattgatgagaacctgccgcttatggaagtccatatttccaacccgtccgcccgcgacgagttccgcaagcgttccgtaatcagccctgtggccaccggcaccatcaccggcatgggtttctacggctacaagctcgcgctcgatgctgtggcgcacttgctgagcgaatagaaccaagccctccagccaatcacgggtagcagtcgacgttgcgcccgggattcctgttccgacgaatcggaccagaatcctcgtcctggtgcgccctatggacctgaagtgcgccgtgtattcgaccatatgctggccaaggcagaacgagatgggctgcctacgcacgactacaccggccacgtcatgaacacgccgggtcatacacggatgatagagtggaattccatggttagaagaacacatggtaattctcaagaacacgtcaccaagcatattttcgtcactggcggcgttgtctcctctctcggcaagggcctgaccgcatcttcgctcggtcgtttgctgcgcagccgcggtatccatgttctgcagcaaaagctcgatccgtacatcaacgtcgacccgggcaccatgaacccgttccagcatggtgaggtctacgtgaccgaagacggtgccgaaaccgatctcgacatcggccactacgagcgtttcctcgacgtcttcctgagccagaaggccaacgtcaccaccggtcagatctatcaggaagtgctgcgcaaggagcgcgccggcgaatacctcggccagtgcgtgcaggtcatcccgcacatcaccaacgaaatcaagtctcgtatgcgcgcccaggcttccgatgacgtggatgtgatcatcaccgaaatcggtggtaccgtcggcgacatcgagtcccagcccttccttgaggccgcccgcgaagtgcgtcgcgatctcggcccggacaactgcatgttcgtgcacgtttccctggtgccgtacatttccgccgcccacgagctcaagaccaagcccacccagcactccgtgatgatgctgcgtcagctcggcatctccccggacgccctcgtgttgcgttccgaccgcccgctcaaccagtccatcaaagacaagatctccctgatgtgcgacgtcgatgccgaaggtgtggtcaactgcgtggatgcgccgagcatctacgatgtaccgaagatcctgttcgaagagggccttgatgcttacgtggtgcgtgagctcggcctgccgttccacgatgtcgattgggatgaatgggcagacctgcttgagcgcgtccaccaccccaagcacgaggtcaacatcgccatcgtcggcaagtacatcgatctgccggacgcctacctgtctgtcaccgaggccatcaaggccggcggctttgccaactgggccaaggtcaacgtcaagtgggttgcggccgaccgttgcgaaaccaccgaaggtgcggccgccgctctcgacaacgtcgacggcatcgtgatccccggcggctttggcatccgcggcatcgatggcaagatcggcgccctgaagttcgcccgtgaaaccaagctgcccgcccttggcctgtgccttggtctgcagtccatggtcatcgaatactcccgccacgtgctgggcattgaagacgcgaactcttccgagttcgagcccgattgcgccaacccggtgatcgccaccatggaagagcagaaggacatcgtggccggcaagggcgacatgggccacaccatgcgtcttggctcctacccggccgagctggaggaaggctcgctggtcgccgaactgtacggcaccacgcatgtcaccgagcgccaccgccaccgttacgaagtcaacgtggcctacaaggatcgtctgcgtgaaggcggcctgcgcatctccggccagagcccggacggcgagctcaccgagttcgtggaactgccgcaggacgtgcacccgttctatgtggccacccaggctcacccggagttcaagtctcgcccgaccaagccgcacccgctgttcgccggtctggtcaaggccgcgctcggccatcaggcggcccgctgaccgtggatcccgcgcggtcggtccgcgcacgatgaaggcgtgacggcacggcatctcaggatgcttcgccgccacgccttcgccgtttggcgccatccgtgatgccgcatggcccgatggcgcccgcatgtaatcaagcccacagccaatatgcgtcagggcagctagtgtttgcacttgggttctgctaggttttcataggattaagtgtgatacaaggaaggcaggatggtgaccgaaaacacagcaccaaacgccgccgctgacgtggagatgagccagtatgtggctgatcgtacccgcgtcaacgaggacaagatcaagaaggatgacgagatcatcagccagttcggcgactacaactatggttggcatgattctgatgccgccggcgaagccgcaaaacgaggcattgatgagaacgtcgtacgcgcgatcagcgccgacaaaggcgagccgcagtggatgctcgacatgcgtctgcgtggattcaaggcgttcctcgaaaagcccatgcccgattggggtgtggatctctccggcttcaacgccgacgacttcaagtactacgtcaagccgatcgagaagcaggcgaagtcgtgggaggagctgccggacgacattcgcaacacctacgatcgccttggcatcccggaggcggagaagaaccgcctcgtctccggcgtggctgcccagtacgagtccgaggtgatctacaactccattcgtgaggacctgaagaagcagggtgtgatcttcgtcgacacggacaccgctgtgcgcgaataccctgaactcgtcaagaagtacttcggcaccgtcgtgcctccggaagacaacaagttcggcgccctcaacaccgcggcatggtccggcggctcgttcgtatacgtgccgaagggcgtgcacgtggacatcccgttgcaggcatacttccgcatcaacaccccggccatgggtcagttcgaacgtacgctgatcatcgcggacgaaggctcctacgtgcactacgtggaaggctgcaccgccccgatctggtccgaggactcgctgcacgccgccatcgtcgagatcatcgtcgaaaagcacgcccgcgtgcgctacaccaccgtgcagaactggtcgaacaacgtctacaacctcgtcacccagcgtgcctacgtgcgtgagggcggcacgatggagtgggtggatggcaacatcggttccaaggccaccatgaagtacccggcctgcatcctcgccgaaccgtacgccaaggcatccaccatgtccctcggcttcgccggcaagggccagtaccaggacacgggcgcgaagatgattcacttggcaccgcacaccagctccaccatcgttgccaagtccatctcgcgcggcggcggccgctccgcctaccgcggtctggtcaaaatcgtcaagggcgcgtacggttcgtccaactcgaccgtgtgcgatgccctgctggtcgacgacttctcccgctccgatacctacccgcacgtcgacgttcgcgaagacgacgtctcgatggcccacgaagccaccgtttccaagatctccgaagaccagctcttctacctgatgagccgaggactcacggaggaagaggcgcgaggcatgatcgtgcgcggcttcgtcgaaccgatcagccgcgagctgccgatggaatacgcgcttgaactcaacagacttgtggaacttcagatggaaggatcggtgggctgattccgatgaccgacaacacaacacccgtcaaggaaatcaagattccggtcgccgaccccaacgacccgtacgcgattccggccgccatgccgtcctccgtggaccatgccgtgcgctcgttcaacgcaggcgactacccggagcccagccgcaagcaggacgaatggcgctacacgcctatcgagcgcatcaacgagttcttcaccgtgttcaagccttccggcgaaacgcagatcgaagtctccatgattgacggctcgccgttggccgaaggcgtgaagctcagccagatcaagctcggtgagggcctgtccggcactgtgtccaagcccaacgaccgcgtctccgcagtcgaatgggaatccggccacaccgcaaccattctggaactgtcaggtgagatctcccagcccgtgctcgtcaaggtgcacggcgcgggggaggacctcgacgccttccatctggtgatcgccgccgccgacaaggctcatgcggacgtcgtcgtggaacacgacggtgacgcacgactggccgaaggcgtggaaatcaccaccggcaaggactcgcacgtctccaccacgttcgttcaggaatgggccaaaaccgccaagcatgtggccaaccaccgcatccacgtcggcgaaggcgcatccctgcgccactccgtcgtgaccttgggcggcgacatcgtccgcatccgcatggatcaggacttcggcggcgaacagggcgacctcaacatgctcggcatctacttcgtggaccccggcgagcacatcgaacaccgcacgatggtggtacacaaccaccccgactgcaagtcccgcgtggtctacaagggcgcgcttgacggcaagggcgcgcactccacttgggtgggcaacgcgctcatccagcccaccgcccccggcaccgactcctacgagctcaaccgcaacctggtcctgaccccgggcgccatcgccgattccgagccgaacctcgaaatcgaaaacggcaacatcatcggtgccggtcacgcctcttcggtgggccgcttcgacgacgaggaactgttctacctcgaatcccgcggcatccccgaaaccgacgcccgcaagctcgtggtgcgcggcttcttcggcgaactcgtcgaggagatcggcattcccgccatctccgaacatctgatgaccgtgattgaccgccgactggcccgtggcgaaaacgacgccatggcacaggtcctcgaagacaagtaagaacagcatttttaggagcacaacaatgtcaacactcgaaatcaaggacctgcacgtccacgtcgaaaccaaggaaggcatcaagccgatcctgaagggtgccaccctgaccgtccactccggcgaaacccacgccatcatgggccccaacggttccggcaagtccactctcgcctacacgttggccggccaccccaagtacgtggtcgactccggcgaggccctcctcgacggcaaggacatcctcaagatgactccggacgagcgcgccaaggccggcctgttcctggccatgcaatacccggtcgaagtaccgggcgtgtccatgaccaacttcttgcgcaccgccaagaccgaaatcgacggcgaggctcccggtattcgccagtgggccaaggacctgtccgcagccatgaagcgcctcaagatggacccgaagttcgcctcccgttccgtgaacgaaggcttctccggcggtgaaaagaagcgcgccgaagtgctgcagctcgaactgctgaagccgaagttcgccatccttgacgaaaccgactccggcttggacgtggacgccctgcgcatcgtgtccgaaggcgtgaaccgcgccaaggaagccaaccagttcggcatcctcatggtcacgcactacacccgtatcttgaagtacatcaagccggacatcgtgcacgtgttcgccgacggccacttcgtcaagaccggcggccctgagctggccgacgaactcgaagagaacggctacgaccagtacctgcccgaaggcgccgactccgagtccgcactggcctgagtccgtgaccgtgggagtctgacatgccctattctcgacacgctccgggccgctaggccaagtctttacggtcacgaacaggccatgtcagactcccactcgtttcgtacaattgttacgtaagtaggggaacataatggttgattttaaggagattcggggcgagttcccgattctgaatcaggagattcacgggcacccgctcgtgtacctggattccgcggccacctcgcagaagccgaatgcggtgatcgacgccgaggcggatttttatcgtacgattaacgccggtgtgcaccgcggtgcccacgagctggcggcccgtagtaccatggccttcgaagaggcccgtgccaaggtcgccaagctcgttggcgcgaatacggccgaaggtgaagaggaggtcgtcgtcaccggtggtgccacggccggactgaacctgctcgccaccgcgttcggcaatgcgtcgctgggccgggggggagaagccgccaagcgttttgccctgaagccgggcgatgagatcgtcgtctcgcgcgcggaacatcattcggtgctgctgccgttccaggagctggcctaccgtaccggtgccaccttcaagtggatcgacctgaccgaggacggccgtgtgcgtacggacaacctcgacgaagtcatcaccgaacgcaccaaggtcgtggccgtcacccacgtgggcaacaccacgggtgccatcaccaacatcgcccctatcatcaagcgtgcgcatgaagtaggttcgatcttcatcttggacgcttgccagtccgtaccgcacctcaaagtcgatttccatgcgcttgatgtggacttcgctgcctggagcgcgcacaagatgtacggtcctaccggcgtcggtttcctgtacggtaagcgcgaactgctcgaagccctgccgccggccaacttcggcggctccatggtcgaactcgcctacatggaccacgaagcccaatacatggcccctccggcccgcttcgaggccggcacccagccggtcgcccaagtggtggccgcaggcgtcgccgccgaatggatgatgaacatcgggctcgagaacatcgaggcccatgagaagaccatcgccgccgaactgctgaagctcggcgacattgatggcattcgcatcctcggaccgcgcgaaaacgtggaccgcatcggtaccgtggcgttcgacgtggccggcgtgcacccgcacgatgtgggccagttcatcgacgcccagggcatcgcgattcgcgtgggacaccactgcgcccagccggtgcaccgccacttcggcctatacgcatccaaccgtgcctcctccggtgtctacaattcggtcgaagatgcccaagcgttggtcgaagcggccaagggcatccgtaagttctttggagtggagtaaaacagaacaccatgaacgaattcggtatgagcggggatgacctcgaacagatgtaccaagaggtcatcctcgaggcgtcaaaacatccgcatggcaaggaatcctttgcgcccaacgcggcggtcgaacagtccgcggacgcggcggccaatgtcaccgtgcaagccagccacgaatactgcacgcccggtgaatcgcaccagttcaacccgacctgtggcgacgaggcgaccatccatgtcgaagtctccgatgacgaaccgcacaccatcaagcgattggtgtgggacggccacggctgctccatttcgcaggccagcctgtcggtgatggtcgatctggtggacggcaaaaccgtggacgaggccatgggtctggaacagacattccacaagctgatggaatcgcgcggtgcaggtctggacgacgagaacctggaagaaaagctcggcgacgccgtggtattccaaggcgtgtcgaaataccctatgcgcatcaaatgcgctctgctaggctgggaagggctgaaggactccatcgccaaagccctcgctgcaaagaactgaggaaatatgtccaacgataatttggttcccgaaccacagccgtccgttttcgatgccgtcaacggcgtcctgcaggacgaggaggccgctcgccgcgtgatggccaacccggccttggccaagggcttcccgaacggacgcccgatcgagcactctgctgcgtccggcgatgacacctgtgcgtgtggcggtcaccatggcaaatgcggttgccgggatgacgaacagtccgatggcagcgagattccgatcaaggcgattgacgatatcggccgcgccactgccgaagacgtgcgcgaggcactgcatcaggtgattgatccggagcttggcatcgacgtgatcgatttgggtctggtctacggcattgagatcgatgagctaggccgcgccattattacgatgacgctgaccacgccggcctgcccgctgaccgaccttatcgaggacgaatgcgcatccacgctggccggtctggtcgaggagttccgcatcgactggacgtgggacccgcgctggaccatggagcgcatcacgcccgaaggccgcgaccagctcgccgcccttggcttcaacttcgacaacatgccaaagtactgatagcgcttagtaagctccctctgatgagggagctctatacgagaaaagccccgcatgatgcggggcttttccaagtctggactggtcaatcagtcatcgacgatggtgttcttcgggacaaccgtgatgccatccggcgtgacggtgaagccacgggccagatcgtgctcggtatcgatgccgacagtggagttttcggtcaggaccacgttcttgtcgagaatcgccttgtacacgcgggcgcggcggttgatgattacaccgtcgaacagcacggaatcgacgatctgtgcccacgagtggatacgcacattgggggagagcacggagtggtgcacttcaccgccggagacgatcacaccgggggagacgatcgaatcggtggcgtggcccagacggtcgcggccggcgtgcacgaacttggccggcggcaggttgccggacatcgtgtaaatcggccaatcctggttgtacaggttgaactcgggcacataggcgatcagatccatgtgcgcatcgtagaactgcttaatcgtaccgacgtcgcgccagtaagcgtgatcagtgaccgtggaacccggaatctcgttcgagttgaagtcgtagacgccggcctcgttgcgggaagcgaagtacggggcgatgtcgccgcccatgtcatgcttggtgtcggcagccttctcatcgagagccagagcctcgaacagggccttggtgttggcaacgtagttacccatggaagccagaatctggttcggattgtccggcagaccggtggtggtggccggcttctcctggaagttcctgatcatgttcgggtgatcgggatcgacctcaattacaccgaactggttcgattcctcgatgggctggcggataccggccacggtgaactcggcgccggactcgatgtgctgctgtaccatctgctcgaagtccatgcggtagacgtgatcggcgcccacgatcaccacgatgtccggctggacgtcctcgatgatgttgatggtctggtagatggcgtcggcggagccgaggtaccagtgcttgccgagacgctgctgcgcgggcacaggggagacgtacgagccaagcagcggggagaaacgccagacctgggagatgtggcggtcaagcgagtgagacttgtactgggtgagcaccacgacctgacggtacccggagttcaccagattgctcaacgggaaatcgatcagacgatacacaccaccgaagggaacggcgggcttcgcgcgatcgcgggttaacggcatcaggcgggtcccctcaccacctgcaagcacaatcgacagaatcttgggattcttggccatcgtaactgtcctctctgttactgagcgtctttcgacaccgcactgctgggccggatgcttccttgcattcggtttacatagttaataattgcagaaaaattcgaacatgcaaggctttcccccccgcgtgccgtgaacttgcgatgaacagtttcgtagatttgtttaaggatccggccttttcggagcgcgtgcgattccttagcgtgtcgcgtagaacgccactgcgctggatgccgccacgttcagactatccacgccgtggctcatcggaatcttcacggtcaaatcggcgcgggcaatcgtatggtgggacaggccgtcgccctcggtgccgaagatcagcgcgagcttgtcgatatgcgtcggatcttcggcaggcgcgtgcagacggcgtgtcagctcgtccaacgaaatcgaacgatcctccaatgccatggccacggtggtgaagcccagcgacttcaactcgtcgatgccctggaacggccagtaatgcttgttttcggtaccgtcgtcgttgaacccggtgatacgggtccacggaatctggaatacggtgcccatcgacacacgagcggctcgtcggtacagcggatcaccgcaggagggtgtggccagcacggcatccacatcgagcgcggccgccgaacgcatcagtgcgcccacattggtgtggtccacgatgttttccattactgccacgcggcgggcgctcctgcagacctcggctacggagggcagcggccagcgtcgcatcgcgcatagggcgccgcgatgcagacgatagccggtcagtcgcttgagctgctcaggtgaggccacgtagacgggaatgtccgtgccccagcgcccgtcgatgaagtcgaaggtgtctttcataccctccagccaaggttcctcgaccagcagtgacagcggttcgcggtcagcggccagcgcgcggtcgataaccttgggggactcggcgatgaacacgcccttggctggttccaagcgattgcgcaactgcatttcggtgaggctcacatacgcttcgacgcgcgggtcgtcaacggtgtccagcgtgatgaactgcattggtggcctttcgtgtgtgcagataacgaaaaaccccttgcaatgcaaggggtttatctgtgcccgagacgggacttgaacccgtacgcccgtataaaataggcactagcacctcaagctagcgcgtctaccattccgccacccgggcaggtgtcgtttggacaacgagtaaatagcttagcatgaaattacagggatgcaattcgcgcgtgtgcccggcgtgtcgcgtgtagccttgaagtcatgactgatgccctttttcttttcgacccgcaggtcgacgacgtcccggtgaacagcgacgaactccacgccggctggaagctaaccctgcccgctcacatcaagcgccatgccgtgcaggccatgcgactcaaggcaggggacagcctgcaactttccgacggcaacggcttgagaatccaggcagtgatggccgatcctgaagccggacttgctgaagttgtggaagtggggcgcgaacccgagccgctcacccgtttggcgctgattcaggcattggcgaaaa

SEQ ID NO: 2785 - DNA, 14921 bp, Unknown
  R36_18m  MAG No. k141_17739
atcaaggtgttcgccatctgcgcgttcatcgtcatcggatcgctcgccatcttcggcgtcatcccggtcgccggctaccaacatgccccgatgttcgtcaatctcatcaaggacggcgtcttccccaacggcttcatgccggtgttcgccacgattctgaccgtcaacttcgcgttctccggcaccgaactcatcggcgtgaccgccggtgagacgagggacccacaaaccgccgtgccgaaagccatccacaccaccctgtggcgtctggtgctcttcttcatcggctcgatcaccgtgatgtgcgcgctgatcccgtggcgccaggccggcgtgggcgaaagcccgttcgtgctcgtcttcaacagcatcggcatcccctatgcgggcgacatcatgaatttcgtggtgctgacggccgtgctttccgcctcgaattccggcctgtacgcctccacgcgcatggtgtggtcgatgggcaacgaaggcatgattccgcgctggttcgccaaaacgaaccgtcgcggcgtgccgatgctcgccttgtgcgccgcgatggccggtggcctgctggcgctcctgtcttccgtgatcgccgcctcgactgtgtacctggtgctggtggcgctttccggcctgtccgccgtggtggtgtggatcgccatcgcctactgccagatcgtgttccgtcgccgttggctggagtccggccattccaccagcgaactcaaataccgcacgcccggctatccgtacgtgtcttgggcggcgttcatcctgtgcaccgcatcgttcgtattggtggttttcgacgtggagcaacggttcgcgctcgtggccgagctcgtgttcatcgtggcctgctatggggcgtatttcctgcaacagtgggtacgcaagcgcaaaaaggcgaccgaggccgacgacctcgatacgctttgggtcgcgcgcgactgaacggctcgcgacctaccggcgcaccgctattcacgccgtgaacgtgcactgatccaacgcaatgccagacccagcaaatccacaccgccacgattgcccatgatgtgggtttgagcgcggccggggagaacggcagcacctgcaggccaatgatgattaagccggcggccagcagcgaagctgagatgaccataccgaacttcttccagtcaaggccttcgcttgcctcttcggcactctgcggaatcgtgtcgaaaccggtgtagaagagcggcgtcatcaccagcactccgggcagaaacgacccgaccatggtaaccgcgccggacgtcgagccgatcggcagcagaaacacggcgcccagcacgaaggcgatcatcgcctcgaccgggccaccgccgacgatcatccagtcaccgaccagcagcacccatacggtgccgatgattgcgccgaatcccatggtgaagtagttccacaggctcagcgatctgaccatgccgccgtcgtcgccgctgccatcggcactactgtcgccgttgccgttgttaccatcctcgtgcacaggaatagcggcactgggcaggccagtcgattccaccaaactggccgtcatcgtgcttgacgggctgaatgccgtggatgcggcgaccatgaccgagcctcctttaattcggactgactgtgatgataacgccgttcacgatatgccgtattatgaacgcagtgagagcccgcttcaccggccctattcggctcatgaataaacttcgcctatctgcggcactgaacacatgaccataatgtgatacacgtcacttcctgaaatacgtagtcgttatggaatcacccgcacgtttcccgtatcggagctgtacgatagctgtgagacaggggggtcgtcagatttcggggggagggttccggaaacggtccgactgcaggatgcaccgggccgtgcgacacatgtcaacttgcgtattcacgccaaactcaattgagcaagccgattctcgtaaatggccagaagcggaacaacgccacaccttggatatcgtcgtatggcactagcccattgttgccgtcgtcaagatggtatcgagaatctctggaattggagcgattatcaccaagcacgaacacgttgccgtcagtaacggttacggaaaaaggactgtcgcttggattcacgccggacttaagataagcgctttcatcaatgggtttgccgttgaccgtgatgggctccccggatcccttgcaggtgacggtatcgccgggcagaccgatgacacgtttgattaggtaacgattgctgtcgattatcgacatcagattggtgggaagctgctccccctccatccagtctgcgggatctttgaacacgatgatgtcgccacggtgcagtgcaaagagtctcggagtcaatcgcgaggcaaatacgcggtcgccgatttgcaacgtgtcttccatgctacgggatggaatcacatagacgttgaacacgaaggtgcgtcccagcaacacgaccagcatcaccgcgatcaccgtcagcagatagccgcgaatttcactccaaacggagggctttcgcgcatgtctcctcgactgtccacgcgcttttttgctatgacgccccaccatcatatcctttccgaccggtaacgcaacaccatagtcctcaaaccatgccgttacctacgcccatgtttgagctcagctgtcacaccagcggttcgcgcacgtctagttcacaggcgatgccggtttccttgcgggcccattcggccgcctgcagtgcggcgatgttccataatgcgcacggcactccgccaaggtccggatgcgatgcccagaatgtgaggtcatcagcgtatgcggtgatgaccgattcttccgtgactggcatgatcgtgtggtacagacggtccgcaagcgtggccacgaattcgttggccgcggcgaacgtgtcgataagatgctgttcggcggtcaccggcgggccgaccagctcccaggattcgacgtccgtggcgctccaatgcgcggcttcgccgtccacatcgcgttgcaaagagacgaacagcctggcgaactcatccgaagtcagtcccgtaacccggcgtcgggttgacaattcaatcggagtcatcagataccgttcctttcgcttcgttcattccgttgtctcgctggtttgatttgctgccaaccggtacaaagcctatctcgcacacctcacgatagcccaaaccaccggcatggccatgattgccagccctacgaccagtgaccatgaggagccggcgattccggtcagattggtcatggcggcggagacgtcatacatgccatgagccacgatcagcggtgtaatcatgcccatacggcggtacagcagcacggcgagcactgcaatcagcacacgcggtggcgtgccgccggcacaatgtcctatcgagcatcgccgcatgattcgtgcggtccacaatcgaggcagcatcggtttccattcggttcatgcggccagactatcgcccgttcttgccgattgcctgtaagcaggttcggatagactggcgcgagaacaatgcgagaaagaggcaagaatgacccggaaacggtcacaacagcacgacgcacaacgcaaaccgtcctggcgcgtacgctggaagaccatgagccgagccgtagacatggaaatccgcgaacacaaaagctcattcgcggtctatgtggtgctgcgcatgctggtgctcgccatggcaatactccagttctttaacggcgactacgaaaatgtgttcctgtgcatcctgacgttgctgttgctgttggcgccggcgttcatccaggtgcagttccgcatcgagctgccttcggtgctggaagtcatcgtgctggtgttcgtgttctcgtccgagattcttggcgagatcagttcgttctatgagatcttcccgttctgggacacggtgttgcacacgatgaacggcttcctcgccgcggcgatcggcttctcgctggtcgacctgctcaaccggtccgaccgggtgaagttcgagctttcgcccctgtatctggcgatcgtctccttctgcttctccatgaccatcggcgtgatctgggagttcttcgaattcggcatggaccagttgttcggattcgacatgcagaaagacgccatcgtgcattccatcagctcggtgatgctcgaccccacgcacaccaaccatgcgattcgcatcaacgacatcacccaggtcacggtcaatggccaagacttgggcctcggcggctacctcgacatcggtctgatcgacacgatggaggatcttatcgtcaacttcatcggcgcggtcgtgttctccgtgttcggcttcctgtacgtgaagaaccgcggcaagaaaaactccatcatcagtcggttcgtgccgcgccgcaagtccgccgactgcgattatctgcgactggtgatcgatggcgggagcgcggctgatgccaaggccaaagccggcggtgccaacgctgacgatagtgctaacgccagtgcggccggcaccgattcagctgatgcagccggagccaaagccggcaatgccgacgccgctccgaccgtcaccgccaagccctgagtacgctctacagcactttcgaagcgtcgaaacggtagtgcccggtgaccgtcatgtgcttcttgaaggcgaagtagtcgttttcgcgctgccgctgcgccatgttgtgaatcacgtacggtgcacgccccgcgatcggccggcggatagccgccctgatagtagccggaatcgtaagccggatggttttcggcgtccttgcgcgcacccgccacgatatccgcgtaatcgtccacaccattgtcattgaaatcgaccgaactggcgactctcgaatacttgcggtccgcctcgccttgtgattcgatgattcatgaacgtattcgggtcacactgtgatcgtccgacccaccgcccgcacctcccaatccgcccggtgcttgaacttgtgggactttggcggtatcgcgaccgcagcatcgccatgctcatctccagccatcagctcaacgaattgcaggagttgtgcgggcgattcctgttcatcaaaggcggccggcttgcggacgaattcgccggcgaacagaagcggatcacggttatcgagcttggccggccgctcggtgtcgcgaaacgtgcggcggtcgcagctttggatccggccgccgtcattcatactgattctgccggccgtgaacctgttcaactccgatttcatgaaagtcagcggaaagaccggttcggtgagtgtgctggatttcctcgctggcgagttcgtcgtacagaacatgctgatgctgccgatggtggtcatggcctatctggtggctggtgccatctatacgcccgtggcctccggccgcatgttcctgtacaaggatctggaccgcgccacgatcatcaatgcgaaaatccttgccctgtttggtatctacgccgtgtacgtggcattgcagacggtggtgacggtcgctctctacatcctgtacatcgcgcgcttcgactacgcttccggcacactgctgccggccgcaggtgcggacatcgcttcggatgtggcctccatcgccggcatcctgtgcgccggtgtggtgactatactggtggtggccgcccttgccacccggttctcgaccggcagtacgagagcgcggaccacaccgtgcacctcgatgtgaaggtggacgaggacacggtgtggcttaacagacagcaattggcattgctgtttggccgcgatatcaaaacaatcggcaagcatatcggcaatgcattgagggaagagctcaatggattttcagttgtcgcaaaatttgcgacaactgcatctgacggtaagacataccaagtcgagcattacaacttggatatgatcctgtcggtcggataccgcgtcaaatccaaggaaggcatctaatttccggcgatgggccaactcagttctgaagcagcatctcgttgatggttacaccatcaatcacaagcggcttgacgcacttcacgccgtcgtcaaggtgctatcgaggtccaccgaaccggaaattgctggcaccgcagagatcttggaacgatatttgccgagtcttgtgctgcttaacgactatgacacaggcaatgtccctatacccaagggcgacgagtcccagtgggtcttgacctatgaggacgcgatgctgttcatccggtcgatgccgttctacacgcaatccgatctgttcgggagggaacgcaacggttcgttccaaggaatcgtcgcaggactctgccagacgttcggaggcgaagaactgtaccgttccacccgggagaaagccgcgaacctgctgtatcaagttgtcaaggatcacccgttctccgacggcaataaacgttgtgccgccgcactgttcgtgtatttcctgaacggaaacagtatactgggcgacgatgactcccctgcttgtggagggtaacgccttggcggcgatgacgctgatgattgcgctgtccgcacctgcggggaaggacacgatgatcgccttggtcgagaacttccttatacggcatgaatcgcaggagatcaattgagagaccgtcaatgaagggtgcacatcaatcacgttctagcattgcgcgactatctgtacgagtcgtctgaacgatctgctgggagtgctcttcgcggaaaaccaacagcagaccggaggccgcatccactatgtgttgttcaacccttgggccgtacgcagcaatgaggcattgaacagtttcgattcgccactgatgaagctgctggcgcgtgccatttacgccattgtgggcgtcagcgtcgaggaggcgattgcccccatcacccacttgatcgacaacccgccgcacaccgcgctgtcagcgttcatcaagaccaaacccgtcgatctcactatgaacaccttcgacaggggcaaggcggtccggttggacgatatcaccaaaagctgctgaatcgctagctgtcatagcacaaggccttagacagaacacccagaaatcgaacgggtagatggatcgcgtctccccttgacttccggcaagcacacgccaatcatggggcgtatgggtattgcaatcaaacgtatatatgaagagccgactgcgtcggatgggtatcgggtgctggtggatcgcctgtggcctcgcggcatgacgaaagagcgtgcggcgttggacctgtggctgaaggacgtcgctccctctcccctcctgcgcaaatggttcggccatgaccccgccaaattcgcggaattccgcatgcgttacatcgccgagctcgacgccaatgccgccgtggacaatctgcgccacatctgcgcggagcatcccgacgtgaccctgctctatgccgccaaggacccgcacatcaatcacgccctcgtactgcgcgattatcttaactgaatattgactcaggacgaccgtcgtttcagtccatctgctagattctcgccgattttcgtatctttgaatcgaagtgcacagtcgtcactccttggattgccaagtaaagggatgcctccaaaccaaatcaatccgtcatcgattatggcaaaatcggaacacgattcgacggtccggacaatgcacccaatagcacgcagccgattaatattccgttctattcgtgttctggttgccaccgcagcagtcgccggcaaacggacataaacttcgatgagcgctttcctgtcggccagtcggagcaattcatcgtcaattgcgctgagtccctgttgtgatacatattcagccgagataatcagggaacgtgcgcaaccggcaatatccttgcggagtatctctgcataattcgtggctgtaacgataccgccttcgaataatccgtcagaccgggtgtcgagcaacgcatccgcagcatcttcgccctgcgtcgcggccgtcatgcaagcgcgcaacgcttccgcctttgcactgagcatgtccattttctcagtatggtcaggatttaccgaatatccttgatttgcgtatgccttcagccgttttcgatacatgacagcggataaaggcacggtcacgtcgatgtaatcatagacacgaacctcggtcttgccatcattctcgcgatgaagtcgccctacatattgcgagagagtaccctcaaacgagaccggagcggcaagcagaagcgtgtcgaaacgcttctgatcgaatccttctccgatatagctacccgtagccactacagtcaggctctcattattcggcaccaaggatagatcatgcatttttttggttattcgctgtttgcggtggggcgggcatgggttagtgtttcgggttcgatttcctgtcagaaaaaataatcgagtgcgggattacggccggtaaggctcctgctgtggatgcggatgcgcgtcagccttacggtgatgctttcccaaaacgcggattatacgaggtgtgggacggcacgcggattcggccgttttccgcccgccgtcccacagcgctcgctatgaacggttgtgcataatcatggagctgcagcgagaatcggcgttattccgcggtttctacagtcgtcggtgtgggacgctacggacgttaaacggttgacttgtctgccatcccgcgctcttgagggacggcgcggacgacaaacgattgactcgtctgccgtcccacagatattgggatgtgtgcggctgcctgctgtctatagcgggtgtcggtcaccccccaccgatcgccccccaccggtcaccaccctgcttggcggaaatacgcaactcgactttctgtaggcatcatggcggcatggcgacggcggacagtcgaagagatccccatgatgcctcaacagccatcgcccacacacatcacagctatcaaccgcaaatatcaagaggccgaaaatctatgagacaagcaaccccggaaagcctcagaccctacaaatggctttattgcaagggtatatgccggttcaaactccactaatagaacaaatagaacagccggcttaggtacggcgcggcaaatggcgcaaaccggccgcgatagtagtagcgtggtgcataccagtacaaccatgcgaggagaacagccatgatcaatgaggaatacaaggccatgcttggcggcaagtccgtgattcgcgggctgagcgagtacgccacgagccgcggtgctgaaatcggctaccagaacgtgttcgattacagccttggcaatccctcggtgccggctccgaaatccttcaccgacgccatggtcgacctctacgaaaacggcgatccggcggccatccacggctactccccctcgctcggcatcccgtccgtcaaggacgcgatcaccgaaaacctcaacgaacgtttcggcatggcatacaccggcaaccacatcttcccgaccacgggcgcggcgggcgcgctgtcccacgcgatgcgcgcggtgaccaagccgggcgacgagatcatcaccttcgccccctacttccccgaataccagccgtacgtcaagggcaccggcgccaagctgaccatcgtgccggccgacaccgagaacttccaaatcaacttcgacgcgttcgaggccgcgcttaacccgaacgtgcaggtcgtgctcatcaacaccccgaacaacccgtccggcgcggtgtattcggcggacacgctcaagcgtctggccgcgatcctgaccgccaagcaggccgagtacggccacgacatcttcctgatcagcgacgaaccttaccgcgaaatcgtgttcgacggagccacccagccctacccggccagcttctatgcgaactcgctgacctgctactcgtggtcgaagtcgctgagcctgccgggcgaacgcatcggctacgtcgcggtgaaccccgcagccaccgacgccgacctgctcgtgccgatgatgggccaaatctcgcgcggcaccggccacaactgcccgccgagctcgatccagctgggcgtagccaaagtcatcgaccagaccgccgacctcaacgtctacgagacgaacatgaacctgctctacgatgcgctcaccggcatcggcttcgacgtggtgcgccccggcggcacgttctacatcttccccaaggcgttagaggacgacgccgtggcgttctgcatgaaggccaaggaatacgacctgatcctcgtgccgtccgacagcttcggcgtgcccggatacttccgcatggcctactgcatcgacaccgagaaagtcaagcgttcgatccccgtgctcgaaaagttcgcccacgaggtgtacggcctgtaaacacgggccgcaagtaacaaacacaagaaaggggttgccatggaatacaccgaagacgccgatcgtcgcgaactgctgctgcacagcgcctatgactccgatacggtccgggccatggagcgacccctgctggacaaaggcgtgccgctgatgcgcatggccgcccaggccgcggcccacatggcggccggtatgctggacgacgaggatctggcgctggaggacacgtcgatcgtgctgctggccggggccggagacaatggtggcgatggtctgttcgcggccgccgcgctggcccaggagggcgcgaacgtcactgccatcgccgtgggccggtcgctgcatgaggccggattcgccgcgctcgtgcgcgccggcggcaaggtgctggtgcttgacccggcagccgatattcccggctgcgcgtccgggttttcctccggtgaggccggtgagcgattgcagaccgccatcgccgtggccaggaaatcgcatctgatcatcgacgcgatgaccggcatcggcattcaaggctcgctacgcggcattcccgccgcgctcgcctccgcccttggtctcgacggcgagtctcccgatgagcccgccctgccgaaccgtgagtcgtcaggcgattttccgctggtacttgctgtggatacgccatccggcgtcggtgtgaacgatggttctctgcccggcccgtacattccggccacggtcacggtcacgttcggcgcgatgaagccgtgcgcggtgctgccgcccgccacgttcgcctgcggccgtatcgagttgttcgatttcggattcgatatcgacgacaaggatccggacgtcgaggtggtggataattcgttcgcgtccgacgcggtccgtctcccccggttcgaggattccaaatattcccggggcgtggttggtctggtgaccggctcgcagcgctaccccggtgccgccgtgctcaccaccagcgccgccgcccgcgcgaacaccggcatggtccggtatctgggcccggagcgcgcgcagaacatggtgctcaccgcactgccggaagccgtgatcggcaagggacatgtgcagtcctgggtcgtggggtccggcgtgcccgaggctagcgtcgagggcgccgacggcgatatgcagcgggacaccatcgccgcattgctcaagcattacgcgctcggcagcgaggatgagaacaaggacgcctacgacatgccgccaatcgtggtggatgccggcgcactcgacctgctgccggagcgtgtgcccggccaggtggtgatcacgccacatgccggcgagatggcgaaactgctcaaccggttcgaaaccgccgccagcaccgcggagcatgccgattcgcacgagccgtacaccgccgacgacgtgcggttgaacccgttggccagcgcgaagcgcgcccacgagctcaccggtgccaccgtattgctgaagggcgcggtgaccatcgtggtggatgaggaccatgtctatgcgtcgggcagtgcgccggcctggctgggcaccgccggcgcgggcgacgtactggccggtctgaccggcgccctactcgcccagcaggatgacgtggccaccacgggcgagaccgtggcctcggccgcctacctgcatggcctggcggcggcgatcgcctccgaatccgagcagcagggctggcaggagccggaactgatcggccgcgagcatcgccagcgcttcatgacgctcggccacccaatcgtggccggcgacgtgatccacgccatccccgaagccatcgccgacgtcatcgcataaccttgttgacctccctctgacgagggaggtgtctcggcaaagccgagacggagggagagaaacataagcctcaaactccacataccccgacctatacacaaaccccgtacactaaatcgcagaccccacccaacgacccaaacacacaaggaaccatcatggccaactcccccatcaccgacgtgattttcgacttctgcggcgtgctgctggactggaacacccgcgcatgccttgaaggccgattccccgatgaaatcgtggaacgcatctgcgccgacgacgacccctgcggcttcttccactacgaggaccgcatggacgccggcgaggatttcgcggacatctacccggatgtggtacgcgaacaaggccaggaactcgccgacatcttcaagttctacatcggccactacgcggacgcgctgccccgcacgctgccgggcatggtcgaactgctggcggatttgaaggcccacggctacggcgtatggggtctgaccaactggtcgcatgagaccttccacctggccttcgagaagtacccgcgcctcgaacagctgctgcagggcaccgtggtctccggcgtggagaagatgcacaagccgaacgccgacatctacgagctggtcctgacccgcttcggtctcacggccgagcgctgcgtgttcttcgacgacaccgccaagaacatcgtcggcgccaacgaggtcggcatccacagcatcctcttcgagaacgcgtcgcaggcgcgcgaatcgctcgccgaactcggcgtacgcctgtaagtcgccaaatattgcgtcgcggcagttgaagtctatggacccgtccttgacgacggtgaccggccgtttggcgaccggccgtttggcgaccggcatgtcgcactgttcggtgagcacttcaacgacgcggcacgcggcaccatgcgcagaatcatcatgaaggcgttctggatgttcatcacgtcggcgccgagcctggtcatcaggcttggcgtggagaagcggtcgatgctggagaaggagaaggtctggatggcatcgtactggtcctgcctcaggttaccaatgtggcgcatatcccgttacacagcgtccgcgatatgcgaggcatctcatattgtgtcgccatagtggattgatgaggttataaacccgtgtggcgaccatccctagcgatataaatagactttatgacactgctgcagctgaaatacatcgtcaagatcgtcgagtgcggctcgatgaacgaggcctcccatgccctgtacgtctcccagccggccctgagctcgtcggtcaaggaattggagaacgagctgggcatcgagattttcacccgctcctcgcagggcatcgccctgaccgtggacggcgcggaattcctgacctacgcccgccaggtgctcgaccaggccgacctgctcgaagagcgctacaagcacgccaaaccgcgcaagcagctgtgccaggtctccacccagcactacatgttcgccgtcgaggctttcgtggagatgatcaactccattaagtccgacgaatacgagttcacgatccgtgagacccgtacacgtgacatcatcaaccaggtggcgaacatgcagtccgagatcggcatcatctacctgtccgacttcaataaggacgtgatcggcaaactcctgcgcgagaaacaccttgaattccatccgctcttccgcgcccccctgcacgtgttcatctcacgggacaacccattggccgccaagaagatcatcaccatggaggatctgaagccctatccgttcatccagtacgaacagggcgaggaaggctcgttctacttctatgaggaggcggtctggccggaatactcccccaagcagatcaacgtgaccgaccgcgccacgattctgaacttcatcatcggcctcaacggctacacggtgtgcaccggcatcgacaacggcgacctcaacaacgagaagatcgtcaccgtgccgctcgacaccgacgaaacgatgttggtcggctggatcacgaacgagcgttccaagctctccaaggccgccgaaacctacctcaccaagctcaagtccgtagtcgccgatcacggctacaagctcattgattaggagtaagtaaaacaggcatggtcagcagtgagatatactgcgattaagccaaccccgctggggaaatggaagtaagagccggcccctgagtatctcaggggccggctcttgcgctattgagactgactggcaaaaccagtttgatggcctccggctacttggccgagattaccgacgtggcggctgtcgtggcgaagcctttgagcacttcaatcatcacgtcgcgatcttcgacatcaatgttgcgggccgcggcgagcataatcggcagtgactgtgtcaaatgcgaagtgaggtcgccgaatgtgtcgtatccgccagcctcgaagatggcaaacaggttttcgatgaacttgcggcgatgctcgtcgtcgtattttgccatccatccgttgagcgtgcgtgccaggtatcgcgcgctacttgtcagtccatcagcctgtacgaattggccatgatcgacttgccagtgcaatgcgaaatgctgcatgatgctggcaccgtcgctgctgaccaccgtatagccgtcttccacatgctcacgagtctcaaacagcatgccgatgatcgacgatcccggtaccgatttatggattttcggcgcaatgcgcgcgtacccatcctcatcgaagaacgcctcatcgaagcctggaccatcgtgcgaatacacggccgtgatacgtccc

SEQ ID NO: 2786 - DNA, 7326 bp, Unknown
  R36_18m  MAG No. k141_17841
cgcagccgacccgcacttcaacctcaccccgaccgaaaagtcgtgggtgctgtccatcggcttcgtcggcatggccatcggcgcggcggtgggcggcttcatcgccgaccgcgtgggccgcaaaaccgtgttcaccgccacgctgatcatcttcggcatcgccaacggcgccatggcgctgtcctggtcgctcggcatgctgctcggcgcccgactgatcatcggactgggcttgggcgcggaactaccggtcgcctccacgctggtctccgagttttcgccgaccaaacagcgcggccgcatgaccgtgctgctggaatcgttctgggccgtcggctggatcatcgccgccataatcggctacttcgtgatcccgaacaccggtgactggggctggcgctgggcgctggccatcggcgcgctgccactgctctacgcgattgtcacccgtgtacacatcccagaatccgtgcgattcctcgaagccaagggtcgcgaagacgaagccgaaaaggccgtgcgctacttcgaggaagccgggggagtggccccggtaacctctcccaagggcaagccgctgccgaagatcaagacgcgcgaactgttcggctccaagtacctggcccgcaccatcgccatctgggccacgtggttcttcgtgaacttctcctactacggcgcgttcacatggatgccgtcgctgctcgccgaccagttcggctccctgaccaagtcattcggctacacgctcgccatctccatcgcccagctgcccggttacttcctggccgcctggctggtggaggtctggggccgccgcaagacgctgagcatcttcctggccgtctccgccgtggccgccttcgcgttctcgcaggccggatcagcggccctcgtgctcgtgttcggcatgctgctgtccgcctccaacctcggtgcgtggggcgtgttgtacgccgtgaccccggaaatctacccgacccgcctgcgtggcgcggccgccggtgccgccgccgcggtgggccgcatcgccgccatcatcgcgccgctcctcatgccgtggttcctgaccctgtccggcggcaacaaggccgtggccttcatcatcttcgccgccgccttcatcctcgcctgcatagcagccctctgcttgcccgagcgcaaaggcctcaatctcgaagactgattacacttcagccttcgctactaaagtggcccacaccaatgtgtgggccactttttgtcttatagctcccgaatgacacggcaagggttgccgtatgtcactgatcaatcgagggaacgacgggtgagattgcgcggtggttttgtgaccagccacgccaccagcagtccggttaccactacgccgaatgccagcgccgcctgcaatccccagatcggcacggtttccagccaatgaccgtccacaccgatcctgcggttccatgccacatgcagccatcccaacgccacgccggataccacgcccactggcgcgccggccagcagaatcaccgcagcctgcgtcaggccgtaacgtctgaggaatcggggtggcgcgcccacggcgaccatcgtggccatgtcgcgctgggcctgcgtgcgggccagcagcagtgaaacgagcgtggccatcagtgccagcaatgccaacaggccaatgggcaccaatgccatattgtcaccccacggcaggcgattcccgtcagtgctcgtggatgccagcggcagattttcgattgcataagctgaggccttctttacggtaacgggggagttgccaccggcgaagtctagatactcacccagatactgcaattgtttgatgccgagcgcctgtgctgttgccgggctcatcaccagcgggtacgcgccgcgcacgtagatggccttgcgcttctcgatatgtgtggcctgagattcgtttgcaattgccggattcggcgaaatggccacacgcaccatacctcccgcgtcgattgtgccggcatcgccgaccaccacaccgcccgcatcaagcacctgtgccgcctcatccgcgttcgggaagccggacaaacgcatcgcattgccatccataatgagattcacgccgcggaaactcggcagtatattcgaatacgttggctgatgggatcggtctatcggcacacaacgtatcggaacgtttggatacagggccgaagcggcatcctggcccacccatgtggacgtgtccggttgctcttggatcgttgggttatcacaagtgtgaccggccgggagcaatgcagcggcatacatgtagccgtgttcggcgttcaacttgtcggaatcgacttcggtcgtatcattgagttttgaccatcgcttgacatcctcggtgtacaccgggtaatgagcgcgtatcggcgtctctttgccaagccggcgtatcgcatccgacaccacagcacggtcgaactcattgctgacatgcacgtcggccccaatggccatccccgacggtccatacgtcatcgtcatcgtggaatttcgctggtccgccaccatggagccggtgattaccagtgtgtacgaggcgatgcacatggtaatcagcaccgcgcatgccgccggaacgaaccgtcgatgatgctcggctgcatccctgagtgccaggcgtgcgccgatgttcagttgggaacccgctttgccgcaccaccgtgcaaaagtgcgaatcgacaacgcaagccctatgacagccaacaaaatcgtggcaacaagcagagccatatgcgtttcggttccggccggaaccgcgcccggattgtgatcggccagcgtgggtaatggcaatgtcagactgagcgcggcgcatacgatggagaccaagaccagaatcggaccaaccgcaacacggagcagtctcaaaggattacggcgaagcttcgtatccacgccattcgcggattcaccgtagccgatttcctctcttgtcgggcaatccttcaacgcatcgactggatgcatacgcgccacatgccgagccggcgcaatcgtcgcggcaaatccaatgatgattgccgtgacaatacccatcggcagcgagccccacgagaatccgtgcaggatctccagcggcgtggatccacgcaatgcgcctatcgcagggccggccgccaaggtaagcgcgaatcccaatgccgagcccagcacgccaccgatggcgccgataacgaggccttgcgaggaaatgattcgactgaggtcacgtggtgcagcaccggatgcggccgcgagcccaagcacacgacgtgactgatctgccgacaccgtaaacgcgggcgtgaccagaaacagtaccagcaacatacccaccagcatggtgatgaccacggtgaccatgtggttcaacatggtagccgcatcgatctgcatcgggtagagctgcgatgcgggcggatagccgtcagtcagcacatggcgggaaatgacgatggcctgcaacaggttcatgctgcgggtgtgcgcccacgtgaccggctctggaccgaccaccaaataatggccatccacaccgacgccatcagattccaatatggctgacatccagccttccaagccccatgccgcggcttcggattcatcggtcagcccgctgactgtccaagcacgctgagtgtcggccaccgcctcgccgatgcgcccgtccaggctcatccagccatcgaacggcggagcgacgaacgtcaccgtgctaccgagagaagcgccgagattatccgccaatgtgcggctgatgacaatctgcgtattattctgcggcgccgaacccttgaccagcttcggcaacattcgttgcaatgcctcaggtgaagcctcggtcatggtcgcggtggaggccgcgttcagatcaatgtcgttcccgcttttcacgtcgatcccagccttggtctgttcgccgggttgcaacgcggtgccggtgatggcgatgagttcgggcgactgccaatacgggagcagccgatcctgttgcggcagaatcttcgcaagctcggcggccgaggccggctgctgggagggatcgtcctgccacgtgccgccgctttcgggtgactgccggaacggttggccggtgcggggcctggcggtggcggtgatgaccgcctgcgtatcagccgggattgtcgccagcgcacgcgatctggtgggcggtatggtggtggtcataccgatggaggccaccattgcggcgattggcagcattaccagcagcaaggacagtagggtgcgggccttgtgccgtagtgcgtcgcgccagccgagtcgcagcgcggcccgataccggttgcaacgtgcgccaaggcttggcctagcggcatggggaatttgggcagagcgaccgacggtggcattggcaagattattgagggctgcgcgtgccatcatgctcccctttcctcaaggttgagcaaatcatccatattgctggagccggtttcatcgatgatacggccgtccttcaaaaacaccgtgcggtcggcccaggcggcgaagcgaggctcatgagtgaccagcagtacggccgcgccgcgatctgcgcgggtgcgcaacacttcgagaatcgtcatgccggcattggaatccagagctccggtcggctcgtcggccagtagtagacggtgtgggccgaccagtgcgcgggcaatcgccacacgttgcgcctggccgccggacatgtcttcaggtcggcgatcagccatatcggctactcccacttcattgagggattgcatcgcggcctcacgtgccttgcggggattccagccatccaattccaaggggaacgacacgttctcggctgcgctcagggaaggcagcagattgaaatcctgaaacacgtagcctatcgatttgcggcggatggccgcgcgttcggccactgacagtgtggccagatcgcggccttcgaccagcacgtgcccctgcgtgggcacatcgagcccgcccgcaagattgagcaaagtggatttgccggaaccactggggcccatgatggccacgaattcacccgggcgaagcgtgagattggcgtgactgagcgcggtgacacgacgtgcatctttgccgtgaacgcgagtgacgtcgtgtaattccagcgcgcatggggaggattgcgggagagaagaaagaacgggagaagtcatgatgtgctcctatgcactattgaatggtggcggtgagtgcggctgagcttgccgtgagaggtgccgaaacggggtgctgcgccagttgtgctcgcagctgggtctcatccacggtatcgagccagcgcaattccgcttcagtgatgaaaatatggtggtcgagtactagacgtgtggcgagttcggtgggcggtgtttgccggcgcagtcgggtgatgtcgtgcagcagttgctgcaaagcgtggcgttggtgttggatgagttcggaaacatcgaggccgggtatttccacggcgacggccagcttcatcaccagttcgtcgcgtccgcgttgttccggggtaatgggggagcgccaccatcggtcaagctcttgggcgccggaattggtcaatcgccataatggtgcggccgctgcggtgccgacatcattggatccgctagtagtcggcgcggtctcttcaatcagtccgtcgcggttcaaccgctgcagcgtagtggaaacttgccccatattgagcggccaagtcagaccgatggtgcggtcgaagtccttcttaagctgataggcgctggccgggcctcgctccaacagtgctaatagcgcttctctgattgccataccgcatcccctttgcatagacggtttgccttgggcgaaggttactgagtaactatcgttggatatcaggttactcagtaactacccatgacggtgctgtactcagggatgattcaggggagattcaggggatacacttggcgcccctcagttgcccacggcgacagctcccctcagggaggggagtcgagagtgtggaatacaaaaagtctcgcaagccagatgacatgtgactaattctcagaaagccgggcccgttgtgtgtcaaggtgtgccagtaacatcgtgacggtttgtgtgtaggtacaggttgatatccaagagcaagtactcgagaacgcaagtaccgaacgattacgcaagaaaatcagtattaagagaggtttcgatggcggttcgtggagatatccgtaatgtggcgattgtggctcacgtcgatcacggcaagaccaccctggtcaatgccatgcttcagcagtcgcacgtgttttccgagcgtgaggaagtgccggatcgtgtgatggattccaacgatctggaacgcgagaagggtatcaccatcctcgccaagaacacggccgtggaatacaccggtccgctggccgccaagtacggccacccggagggcatcaccctcaacatcatcgatacccccggccacgccgacttcggcggcgaggtcgagcgcggcatctccatggtcgacggcgtcgtgctgctcgtggacgcctccgaaggcccgctgccgcagacccgattcgtgctgcgcaaggccctggaggccaagctgccggtcatcctgtgcgtgaacaaggtcgaccgccccgacgcccgtatcgaagaggtcgtcggcgaaacctccgacctgctgctcggcctggccgacgacgtgcagcacgagggcatcgacctgaacctcgaccagctgctggagatgccggtcatctactgcgccgccaaggccggctacgcctccgtgaaccagcccgccgacggtggcctgccggacaacgacaacctcgagccgctgttcgaaaccatcatctccaccatcccggcccccgaatacgaggagggcgccccgctgcaggctcacgtggccaacatcgactcctccgacttcctcggccgactcggtctggtccgtatctacaacggcacccttgagaagggcaagacctacggcctgtcccgtgtggacggctccctcgagaacttccgcgtctccgaactgctgcgcacccagggcctcgagcgtatcccggtcgaatccgcaggccccggcgacatcgtggccgttgccggcgttaacgacatcatgatcggcgagaccatcgtcgaccccaacgacccgaagccgctgccgctcatccacgtggacgatccggccatctccatgaccttcggcaccaacgactccccgctggccggcaccgagggcaaggaccacaagctcaccgcccgcatgatcaaggaccgtctggaccgcgagctcatcggtaacgtgtccatcaaggtgctgcccaccgaccg

SEQ ID NO: 2787 - DNA, 3846 bp, Unknown
  R36_18m  MAG No. k141_17913
aggtcggcgaccatggtctggacctgacggtgctcctgccagttcaggcaatcccaatcgatggaggcgtcgtgatcccactcgccccactgggccagctcgttgcccatgaaggagagcttcttgcccgggtgagcccactgataggcgaacatcgaacgcacgccggctagcttctgccagccatcgcccggcatcttgccgtacagggagcccttgccgtacacgacttcgtcgtggctgatgggcaatacgtagtgttcggagtaggcgtacaccatggagaaggtgatttcgttgtggtgccacttgcggttgatgggctcctcgtgcagatactcgagggtgtcgtgcatccatcccatgttccacttcataccgaagccgatgccgccggcggaggtgggggcggtgatgcccggccatgcggtggactcctcggcgatcatcatgacgccggggttgttcttgtacgcggtggcggtggcttccttgaggaagtcgatggcctccaggttttcgcgtccgccgtagatgttcggacgccaatggccgggttcgcggctgtagtcgaggtagagcatggagctgacggcatccacgcgcagcgcatcgacatgcaggtcctcgagccagaacagggcgttggccaccaggaagttgcgtacttcgcggcgtccgaagttgaacacataggtgccccattcggggtgttcgccgcgcagcgggtccgggtcctcgtacagcggggtgccgtcgaagcggccgagtgcgaaggcatccttcgggaagtgggcgggcacccagtccatgatcacgccgatgccggcctgatggaactgatcgaccaggtaacggaagtcgtcgggggagccgaggcgggaatccaccgcatagtagccggtgacctgatagccccaggagccggagaacgggtgctgtgccagtggcatgaactccacgtgggtgaagccttcctgcttgacatagtccacgagctgcttggccaggtcgcggtaggtcagtccctgcttccagctgccggcgtgcacctcatagatggagaccgggccatcatgcgggttggtggtgcggcggtgctgcatccaggcgtcatcgttccactcgtaggtggattcggtgacgatggaggcggtgttcggcggaacctcgtgctgacgctccatcgggtcagccttcatctcccacgtgtaattggcgttcaggatctggaacttgtaggtctcgcccgcgccgatgccggggatgaagatctcccacacgccggaggagccgagctcgcgcatggcatgacgacggccatcccaggcgttgaagttaccgaccacgcgcacggcatgggcgttcggggcccacacggagaacgcggtgcctaccacctgctcgccgggcgtgccgtccacgccgcccatcggatcgtcatagcgcagcacatgcgcgccaagcgcctcccagagcttctcgtgacggccctcgccgaacagataggtgtccatgtcgccgactgtgggcatataacggtatgggtcgtcttcaatgagcactgcgccgctttcccactcggtcctgacgcggtagtcgggaatcgtgggctgcttcttggtgccggaagccggcacggtagtcacgaacacgccgttgtattcgtgggtcatcgggtattcgccatcctgggtgaggatggtcacggacttggcaagcggacgcagcacacggattgtggcggtgtcggcatgcttgccgatgccgagatgcccgccgagaactccgtgggggttgtagaattcagcattgctcaccgcatcgaggtcgccttgggcgacaggcacggtgacggtatcttccttgatcttcgtttctttagccatgacccaaagtctacgtgcgttggagtcgaaaacgctacattggcgcgtcgaaaatggcgaattcttgcccttttcggtgtgtcttcgtggttgtgagcgctctcataggggcggtccaggccgcatggcataattattcgagtttttgtgtgtaagccgtcagttctcggagggtacatgtcttacaaagtcggcgatatggtcgtctatccgcgtcatggtgcagcgaaggtggaggccattaccgagcggacggtcaagggagtgacgcgcgaatatctgcagctgtccgtactctcttccgatggtttggtcatcaacgttcccgtggacaatgccaggaaggtcggcgtgcgtgacatcgtctccgcatccgaagtggccaaggtgttcggcatcctgcggaccccgatcatcgagaaagagatgaactggtctcgccgttacaagctgaacgtcgaaaagatcgccaccggtgacgtcaacaagatcgccgaagtggttcgcgatctcgcccagcgcgatgtcgacgagcacggcctgtccgcaggcgagaagcgtatgctcaccaaggcccgcgccattctgacttctgagatcgccttgtccgagaagatcgacgaggcggaagcccagcgtctgctcgacgtgaacctgggctacgagcccgctcaacccggtgacgacaagcatcacaccgccgagcccgaagaggccgcggccgatactttggctcgtgtcgaagccgagaagaagtccaagaagaagtgatttgattgttttgaggccccggtcgtgtccttatgcgatgcgccggggcttcgtgattcataatcgtttgctgccgttcatctgggcaatgccatcgaagggaactgcatggggtctgcaggagtgctgatagggcaaggttttgacgctcaccgttttgcgcctgccggttcaggccgtgaactgtggattgccgggctctactggccggtgcctgattcatgcagcgaggccgatgccgccaaatacgagggtatcgaaggcgattccgatggcgatgtggccgcgcacgccctgattgacgcgttgcttgccgccgcccgattgggagacattggttcactgttcggtgtcggtgcggacgcgcatggtgccggaaggcatggcatcgatatgctgcaagaagttgtggcgcatctggcatccaacgggtatacgccggcatcggcctcggtggcgatcatcggcaaccgcccgaaaatcggcacacgccgtgctgaagccgaagccgccctgtctgcggcggttggttgcccggtatcggttaccgccaccaccaccgaccatatgggattcactggccgcggcgaaggcatcgccgccatcgccaatgccttggtggagaagatataacaaagcccccgctatgaatttgccagcgggggcaagaaaaatgaatgagattacttccgcactgtctccacggccttggcgatagcccagaacagggtggaaagcgtcacgataatgaagctcgggggggcggggaacatcgccgacagcacgagtccggcccaaatcgacaccaggcacagcacgctggcgatcaccatcgccttgaatggggagccggccagaatattggcggtggccgcaggcgtgatcaccagcgcgaaaatcagcaaggtgcccactgccggcacggcaatggtgattacaccggccataatcgccataaacgccacgttcatcagcccgatcggcacacccttggcctgtgccacctgctcatccaacgagctgaacagcagcgggcggtagatgatggccaacaatgccagcagcaatacgtcgaacacggcgaagccgatgatctggccggtggtgatggtcaggatcgagccgaagaggatcgactgcatctgctgggaggcggaactcgacaatcgcgcgaagaacagaccca

SEQ ID NO: 2788 - DNA, 4214 bp, Unknown
  R36_18m  MAG No. k141_17937
agcgcgtcggggcgttccttggcgatgatctgctcgagaatcggcgtggcgatcggctcgatgtacgtggcgtcggccatctcggggtcggtcatgatggtggccgggttcgagttgacgaggatgacgcggatgccttcctccttgaggacgcggcatgcctgggtgcccgagtaatcgaactccgcggcctgaccgatcacgatcgggccggagccgatgaccatcacggatttgatgtcggtgcgcttcggcatatcacttaccttccttggagttgttcttcataagttcgcagaaacggtcgaacaggtaggccgcatcgtgcgggcctgctgcggcctccgggtggtactgcacggagaatgcggggatgtccacgcactgcaggccttcgaccacgtcatcgttcagatcgatgtgggagacgagcaccttgccgtacttgccgttttcaaacggcgcgtcgacctgcttgccgatcggggcgtcgaccgcgaagccgtggttgtgggcggtgacctcgaccttgccggtggtcagatccttgaccggctggttgatgccgcggtggccgaacttgagcttgtaggtgccgaagccgagcgcgcggccgagcagctggttgccaaagcagatgccgaagaacgggtagccggcgtcaagtacctggcgcagcagctcgatttcgggaccggcctgttccgggtcgcccggaccgttggagaagaagacgccgtccgggttcaggttctcgatttcggcgaaggtgatggtggagggcaccacgtgcacgcggcagccgcgttcggccatgcggtgcggggtcatgcccttgatgccgaggtccacggcggccacggtgtacagcggctccttgccttcgtactcaccgcatggctcgatggtgtaggcctgcttggtggacacttcgtcgtacaggctcaggccctgcatctgcggtgtgttcttgacgtcttcgagcagctgctcgatggtcttgagcgcgccggtggcctggtcggtcagggcgtcgccggagaagatgccggcgcgcatcacgcctgcggaacgcaggtgacgcaccagcttgcgggtgtcgatgtggctcaggccgacgatgccgttcttggcgaggtcgtcatcaaggctgccttcggcacgccagttgctcacgttcggagagggatcacgcacgatgtatccggcaacccagatgcgggaggactcagggtcttcgctgttgacgccggtatcgccgatgtgcgggaacgtctgcacaacgatctggcgatcgtagctcggatcggtgagcgtctcctggtatccggtcataccggtggcgaagacgatctcaccggtcgtctcaccgagggcgccgtacggctcccccacatatacctgtccgtcttccaaaacgaggactgcatcgtccttgtcatacatcggaattgcgatggtcccggactcgttctggctcaccaaaacccccttatgtttttcgggtattcgtaccaaggttaacggccagcgcagactcacacgccgttgggcgcaaagtctcaccccgctggcggggctgtcggcaaggtgccgacttgagaatgtgtggcgacacaagtgtccgcccatgaaaaagcctcccgaatggggaggctgaacaacaaatgactaatcgaccgtcggctgaatctcagcggacggggcagtgggctcgtcggatgcaccggacgaatcgggcgaatcggaaacatcgccctcatcggtcggctcggatgcggcggcatcggaatcggacgattcctcatcggcctcttctgccgcggactccggtgccggtgctgcgttcttggcggtgcacactgcagacagcaggccatggatgaaagcgggcgaatcgtcatcgcacagggtcttggccaatgccagagcctcgtcgatggcgaccttgtccggcacatcatcgttgaacagaatctcccaagcggcgatacgcagaatgttgcgatcgaccacgcccatacggcggaccttccaacccgtggagtgttcgtccagggtcatgtcgatctgacgacggtgctcggccacgcccttgacgatttcaatggcatagtcgggaagcggggtctgggcaccgggatgtgcgatgcgctcgtcaagcagggcgagaatatcctgacttttttcgtcggcttcgtacagggtgttcagagcccttttgcgcgcggtggaacgtgccatactgctgctgtcctagtcctttatacggtcggtcgtctgttgaggatgcggagatcagttgttctcgcggccggtgtaggaaccatcctcggtgttgatcttgacgcggtcgccctcattgatgaacagcgggacctgaatctcggctccggtctcaacggtggccggcttggtgccggcgttggagcggttgccctgcaggcccggctcggtgtgggtgatggtcaggaccacggagcccggcaggtcaacgctcagcggggtgccgtcgtggaaggagaccaggcagtcggtgccttcgagcatgaacttggccttgtcgcccacgagggtcttcggaaccatgatctggtcgtaggtggtcatgtccatgaacacgaagttgtcgccgtcctcgtaggagtactggagggtgcggttgtcgacggtctcgaattccatcttcatgcctgcgttgaaggtcttgtcgacgatcttgccggagagcacgttcttgatggtggtgcgtacgaaggcgggacccttgcccggcttgacgtgctggaacttcatgacggtccacagctggccgtccaggttcaggacggatccgttcttgatgtcgttagtagtctgtgccacgttattcacctatttcaaattcaaactagcttaggcaaagcccaaaaattgccttggctattatgccacaccgggtatacaggaagtgaacgctggggtttcccacgtggcccccgactagactggatgaatatgcgatccttcttcgaagccatatccgtatcctgcgtcatccccgcgcgatcgccggcggatgacgaacgcacggtgttcgacaacctgtccttcagcatggaacgcggcgacatcatcgatctggtgggtccgtccggctccggcaaatcgagtctgctgaccgcatgcgcccgactcaacccgcacgcacacggcacgttcgtcctcgacggcgtgggcagcgacgaattcagcgcgcagcaatggcggcgggacgtctcctatctgccgcaaaaaccgatcctgaccggcaaggacgtggccgaggcgatccgcctgccctggacgctcgcgattcgcggcaaggggggcagggccgagcagctgctgcccgacgagcgcatccgcacgacgttggacgcgatgggctgcgaggacatcgacctggcgcgcgcgccacatgacctgtcgggcggtcaggcggcgcgcgtggcgttggcccgcacgctgctcaccgacccgaaggtgctgctggccgatgaggcggacgccggactcgacgacgacaacgcatccaaagtggccgcgatcatggcggacgcggccgcacacggcatggcgatcatccgcatccgacaccgtccgccggacggacgcgccacccgcacgctgatgctcgatgcgggacggctcaccgatctgacgcgggacaaggaggtgcaaccatgaacggcgcctacgacatcgacacctggggtcttgttctggcgttgggcatggtggccgtggcggccatcgtcagcgaactcatgcacatgggcatcggcaggaccctgatgtggtcggcatgccgcgccctcgtgcagctgtgcgccatgggattcatcatcagctacgtgattcgttcgaacagcgtgtggatggtgttcgccctgatggcggtcatgctggtcgcggcggtgcagatcgtgatatcccgcgcgcgcggcctccccaaaggtcgtgccggaccgatcttcctgagcctggtcatcacgatgctgctcatgctggcgttggtcaccgagctcatcgtgcgcccgcacccgtggtatgcgccccagctggtggtgccgctgaccggcatgctgctgggcaacaccgtttccgcgcttgctgtcgggctgagccgattctatgaaagcatggaggaacgccgcgacgaggtggatatgatgctggccttgggggcgacg

SEQ ID NO: 2789 - DNA, 2558 bp, Unknown
  R36_18m  MAG No. k141_18087
ggcgaaggcccggccgagctcgcggagcgcatcgacaacatcagccacagcatgtgcacgctcgaaaacccactgtggtactcgcaccgccgcgccgcgctcgccaacaaaacacacgaaggccgcctcctcgccctcatcgtgcgtgactaaacggagaatgcgggcacattccgtggagaagatgtgatgcagttcacggacggccagccctcaccctacggtggtgcctatgactgagagagatttcgatacccccgtcgagacgcctaccgtccagccggcccccgctcagggcgccaaaccggcacaaaccgtgccggtggtggccgtggtgctggccgccggcttcggtacgcgcttcgaccccgacaatcccaagcagcttgtctccgtgggcggcaagcccatcgtgtgctggagcattgatgcctttgaacattgcgatcgcgtcagcgacatcgtggtggtggtcaatcccaaggtgcgcggtgaagtggaaacgttggttggcgagatgggctacaccaaggtccgcgtcatcattgacggcggtgacgaacgtgtggacagtaccgccgccgcgctcgacatgctggctacggctggcattccggacgatgccaagattctgatccatgacgccgtccgtccgttcgtggaacagtccgccatcgacggttcgattgatgcgctcgaccagttcacggccgcgaccgtggcctacacctcaaccgacaccgtgctgttgaccgaggatctgggcgatttgaaagtggtcaagtcggtgccggaccgcccgaacaccttccgcgcgcagaccccgcaatccttccgcttcgcgacgattcgtcacgcttacgatctggctgccgccgacccggacttccatcccaccgacgacacgcgcgttgtggtcgattatctgcctgatgaacccgtcgccattgtctccggtgcggaaaccaacctgaagatcaccacgctggaggatattcccacagctgagcgtatcgccgaggagattctcggtcgtgatcccaaggaagaggcccgcgcccgcatgcacgccctgctggcccaagcggccggccagatgcatcgctagactggcattatgcgtgaactcaatgttgtgatctccggcttcgaccactatgacggcgtggaggtcaatcccgccgtcgaagtgcccaaggccatcgccgagcaggggttgggcgtctcctctgctccggacgatccgttggagcaggtcgccgtcaccgtccatgccgtcagcatcccggtgagcttcgccaaagcctggcccacgctgaaagagacgattgaggccaccaagcccaatatcgtcatcgccaccgggctcaagcacgcagcccgaggcgtgatgcttgaacgatgcgccaccaacctgatggacgcgatcaagccggacgcggacaacgtgaccccacgccgcgaacccatcgatcccaatggcccggccgcctattggacccgcctgccgttgcgctcgatcctgaatgatttcacggacgattcgattccggccaccctgagctcggacgcaggcacgttcgtatgtaattcgctgttctacaacttgctgaactggaccgccacccaggagcgggtgctgggcggattcgtcagcttcccgccggtcgtgccggcggattccagccagcatggtctgccactcgaccagcagatcgccgctggccgtgatgtggtgcgcgaagccgtgcgctactatctcaagccctccagctccgacatcctcatcgcctagcacgctgtgcgccacgccggaatagaacatggttcgcacgcattgtaacgattgcgcgtcactcaacgcccagcgctagtgcgatgcgctacagtgcttcaaggatgtgccaagagctttatgcgtgtgcgaaaggaataaacagcgatggtggatcgtttcccggtggtgctgcgaggatatgacaaggagaaggttgatgctgccttcgacgctactcaggagagtatgaagcgtgcgcagcagacgttggccagcatgcgtgagcagattgcggcggatgacgaccgtattctgcaactgcaggcccaacttcaggaagagaagaacaagaagccggaaggcaacagcttcgcttccttgggagcgaacgcccagcagatgcttgcctccgccgaacagacgagtaccgaactgctggaacgcgccaagcaggacgcgtcctccatccgtaccacggctcaggctcaggccgaaacactgatcaacaacgccaagctggatgcccagcatattgttgacgacgccaatgccaaggccgcctcgattctgacgaacgccagcaatcaagccgaatcagtgaccacctccgccaacgaggatgccgcacaactgcgctccgaaactgccaagaccatcaccgaacagcgtcagaccgtcgagcttgagctcagcaacgcgcgcgaagagcacaccaagaagatggcttccgaacgctccactcaagagcgcgaaatcgccgacatgaaggcggaggcgaccc

SEQ ID NO: 2790 - DNA, 13559 bp, Unknown
  R36_18m  MAG No. k141_18122
gcttcgacaaactcgccggccgggtctcccccaaattcgccctgttcctcggcttggcgatcatgctcaccatcggcccctgctttgcgattccgcgtacggcgaccacctcgttcgaaatgatggtggcgcctttcgtgccgtcctcctacggctggctggcccaactcatctactcgctcgtgttcttcacactggcgttcctgttcgcccagcatcccgaaaaactctccaaagtgctcggccgattcatgggaccgttgctgctggtgctgattgccgtcctgttcatcgcctgcctaatccacggtatcggtaccccggccaaaccgatgggcgactactccacaaaccagattgcacgtggcttcctcgacggctaccagaccatggatctgctcgccgcgctctatttcggcatcgtgatttccgcgaatatccgcacccagcaggtcgatgacgaatcgcaagtgcagaaggagaccgcgtatgccggactcggcaccggtgtgctgctgatcgtgatctacggcgcactgagctacgtgggcgtggtgtccggtgccatcgccaccatcgatcccgccaaagacacgggcgcgaccgtgctcaccaatctcacctcgtccctgttcggcgcgttcggtaccgcgttcctcggtatcgtcttcgtcatcgcctgcctcaacgtatgcaccggactgatcggtacctgcgccacctacttccacactcggttccagaccgttgcagggagaacgttgagctaccgcacctggcaggtcatcttcaccgtgttcagtttcatcgtgtccaacgccgggctaagcgcgatcatcaaggtttccgtgccggtgttgtccgcactgtatccgatcgccatcgtgctggtgctgctggcgctgacccacaagtcgctcggcgcgcgattcccgcatgtctacttctggaccgtgctgctggtgggcatcgactccttcgccacctgcatctccagcctgatcaccgtcttcggcggctccatcggctggctggacacgacgctggccatgctgcccttgcagcaataccagctcggctgggtggtcccggctatcctcggtgttgccattggtatcgccgatgctccgcgacggtagttcttcccggtctgtgccggagtctggcggtcggtcggtgatggcggttgttgcgacgctcagcggtgccggtgtatcgttcgcaccactatatgagcgcatttggggcggcatgatgctgcatccgaactgtccggcgattggcagaatgacctactatctctcgggccaagcaactgacgattatggagtctgcgtcacctcaccactgtggtttatgacggtgactgcgctgagtgttgtcgcgattctctgtctgaccgttgcgggagtacagggcttttcgcgccatcggctctgttcccgttgccctgttctggtcaggtctcacgttctttacctacagctacaacactggtagacacaccgatttctgcccagcgctatcggcaactgacaatgcaggtcttgtcgcttattgcatcggccgtgaagctttgggactgctgaccgtcgtgttgtgcgtgctgccattgttctccctgctttcggcgattatggccatcacgttggctgcgcacgacgcgacaccaccggcataaaatctccttcatatcacgaaacaacgggcacccgttttgcgaggcattctatccgtcccgtgtttcgcaacgcatgagacggcacatccattgaatcaggagtctagaccatatctcgccgaatcttgcggtaggtggcatagaacaggaagccggccacgatgccggaggtggcgtcggagatgggttcggcgatgaagatgccgttgacgccgatccagtgcggcagcagcagcgcgagcggcacgagcaggatgatcttgcggaagacggccaagaacaccgactgtttggcctggcccatgccgacgagtgcgcattgcgcgcccatctggatgccgaagataccccagccgcagacgaaaatcggcatcatgcgggtcacgatgtcgatgaccgtctgttccgaggtgaaccatgaggcgaagaagccggggaatgtggcgagcacgttcgcggcggccgctcccctgacgccccatccgaacacgaaaatgaacacggggtcaagaaggatggatatgccggtgccgatgagtacggagaccatggccacagtggtttcgccaactgcagcagcacggtgagggtcagggctatggcgatgaggaacgcggcgctggtgccgaggatgcgttcggctttcttgaagttgccgcgcccaagttcaatggaggcgcgaggcgcgccgcctgcgccgatcagcgaggcgaaggcggtgacggccagcagaatcgggaagcagatgcccacgccggtcatcgccgcgttgcccacttcggggatgtgcccgatgaacagtcggtcgatgatcgtgtacgaggcgttcgccgcctgcgccacgatggtggggaccgacatggtcagggccagacggggcaccggtttggtgcccagcccggcatcgatcgtgttcgcctgtaccaaggatcagctctgccagtagtagctgaagaagtcggcgagctcccccatggtttcgtgcagcatgcccatgcgcggcaggtacaccacgcggaagtggtcggggcgatgccagttgaacgcgccgccgtggctgatgaggatgtgcttgtcatgcagcaggtcgagcgcgaactgctcgtccgagtggatgttgaagcgtttgacgtcgatcttcgggaagatgtagaacgcggccttcggcttgacggcggtgatgccgggaatctggttgagcatgtcgtaaacgaggtcacgctggtcgtgcacgcggccgcccggcacgatgtagtcgttgacgctctggtggccgccgagcgcggtctgcaccacggactgggcgggcacgttcgagcacatgcgcatgttggcgagcatgttgaggccctcgatgtagtccttggcgatacgcttgttgccggacaggatcatccagccgatgcggtagccggcgatcatgtgcgatttcgacaggccggagaaggtcacgcagaacaggtccggggccatcgaggcgatggagatgtgctgcaggccgtccatgacgaggcgatcgtagatttcgtcggagaagatgatgagctggtgttcacgcgcgatgtcgacgatctgctggagcacttcctttgggtaaagtgcgccggtggggttgttcgggttgatgatgacaatcgccttggtgttgctggtgatcttggagcggatgtcatcgatgtccggataccattcggactgttcgtcgcacaggtagtgcacggcggtgccgccggccaggttcacgcaggcggtccacagcgggtagtccggggagggcacgagcacttcgtcgccggtgtcgagcagcgcggacatggacaggttgatgagctcgctgacgccgttgccggtgtagatgtcgtcgatggtgacgttcgggatgttcttcagctgcgcgtactgcatgatggccttgcgcgcggagaacaggcccttggacggcgagtagccttcggtgtcggtgagctggtgggccatgtcatagacgacttcgtccggcgtgcggaagccgaagggtgctggattgccgatgttcaatttcaggatgtgggtgccgttggcctccatgcgcatcgcctcgtcggcgaccgggccgcgcacgtcgtagagcacgttgtcgagcttgtgcgatttgccgaaggtacggcggcggcccacgggaatctcgctgtccgtcaggggcttggcggtgcccgtggcaagcggcgtggcggcgtgttcgccgtccgtgacgctgttggaagcgtccgagttcaattgcggggtggattcctcgccgcgcagccagttcgcgtcgacgtccagttcgctggccaggaattcgagcacgtcttcgcggggcatggtcttgccggccacgtattggctgatatggctcttgcccatctttacgccacgatgttcggcggcgtgcaccaaatcgacctgcttcaatcccctactgttcatcgcattgcgcagacgttccgcaaacaccgatacgctcatatccttatgcctccaaccgggagttcaatttatcttttgaacaacagttcaaagcatactcccggttcaacacaagttcaattttggcgtgttctcgagtctcgaccggttcaacccaactgcgcttcaatccattgggcgacgccgtcctcgttgttgggcgggcagatctcgtcggcgatagacaacaccttggggttcgcgttggccacggccacaccccggccggattcgctcatcatgttgatatcgatgaggtcgtcgccgaaggcggcggtctgttcgagcggcacgtccagtcgttcgcacagcaggtgcagcgcatgctccttgttggcctgcgggttcatgagcatccacatcacgccttcgctaatggagatgtcgaagtccggcggaatcagcgcacacagctcgttccactgttcaggctcggggaagatggtgatcttatccgccacgccttcgggcacgtcgtggaagttcgtgtattggaaggcctgtgttttccaatacacgcgcacatcgaagttggtgtagcgcacgtcgttcatcacgatgccgagcttcaggccgggcatgcgatcgagcaggaacagacagacttcgcaggcacgccgtgaggagaagccaatcttgatcaaatggttctcatcggccggcgtggcacctgaggtgagcaggtcgaagtcggagtgggccgggtcgaaatcgatgagggcaccgttcagatagattacggcgtccaccggcagtttttcggcgaactggagaccggtactcaccggccgcgcggtggcgatggcgaatttcagtccggcatcgtgcgcgcggttgatggtgtcgatgctgcgctgggtgatgaaccggtcctcgaatacctcggcgtcgtgcagcaacgtaccgtcgaggtcggcgaccagcagtcggggttgtttcggtgtgatggcgtcgagaatcacagcagcccctcgcagtgttcacgcacgagttcggcggaatggtgcaatttggcctgctcgtcctcgctcagatcgagttcgacgatctcgttggcaccattggcgcgcagttcagtggggacgccgaggaacacgtcatgttcgccgtattcgccgttcagcagggtggagacgggtacgatgcggcgttcgtcccacaggatggtctgcacgatgccggccacggtggaggcgatgccgaagttggtaccgcccttggccgcgacgatctcatcgccacgggtgcgggtcttctcttcgatttcggtggtggacacggaggcgaaacggtcttggttgtcggccaggaagcgggcgaatggcttgccgccgagcgagacggtggaccatgcggtgaactgggagtcgccgtgctcgcccatcacgaagccgcccacgttacgcgggtcgaggccggtctcttcgccgatgatggtcttgagacgcgaggtgtcgagcgcggtgccggtgcccagcacctgggtgcgcggcaggccggaacgtttccaggcataccaggccatcacatcgaccgggttggagaccatgacgatcacgccgtcgaagccggaggccatgacgttgtcgaccacttcgcccacaaggcccacggtgaagccgagttcggccatgcggttggagttggccggcggcttgcggcccacggtgatgacgacgatgtccgcgtccttgcagtcggcgtagtcgccggcgcgcaccttgacgtggcggtcctggaattcgctgccgtcatcgaggtcgcgggcctcccccagggctttggcggcggagcggtcgatgagcacgagctcattgcacaggccgtgcgtgacgatgccgaaggcggcggtggcaccgacctggccagtgccgacgataacgactttgttgcggttcatagtgaccatggtgatgtcctttcgtaatactcgatagaacgcatacgacccatgaccgacggtaacggtcatgggtcgcgagcgacaagtctatatggcgtgcaagccgatcagccgaggttgaacttggtcatcatgtcgaggccgatgatcaatgccacccacaccagagcgatgataacggtccaacggttcaggttcttttcggcgacaccggaagtaccggcgttctgggtcagaccgccgccgaacatgtcggacaaaccgccgcccttgcccttgtgcataaggatgagcagggtcagcacgaagctgagcagcacgacgatgacttgcagcgtgatcttaagagcggtcacagggtacctccggattgattggactgttgaccagcatagcgcacacacgggaaaaccgtggtattagttccgtgatttcgtggatttcagtgccagtcgagcgattttggcgagttcctcaacatccagggccgcccctccgatcaggaagccgtcaacgtcgggctgggaaatgagttccgccgcatttttcgaggtgaccgatccgccgtacaggatacgtacgctatcggataccttcgtgccaaaagtggtcttcaaatcgttgcggatggcgtttgcggcatcctgggcggattgcggagtggccaccatgccggtgccaatggcccagacaggttcgtaggccacgatgagttcggcggcttgttcttcgttgagatcgcgggtgacgtctcgtacctggcccacggcgaaatcgagttcaatgccttgacgtcgttcctcgaagctttcgccgacgcacaaaatcggctgcatgccggcggcgagcacggcacgtacctgatcgacgatattggcgtcatcttcaggatggtatttgcggcgttcggagtggccgacgatgacgtacgagcagccgagatgggcgatcatgtccgcggacacatcgccggtgaaggcaccttgggtggtcacggaaacggattgtgcgccgtaggcgacatggagcttgtcggcttcgaccagcacctgtacgctgcgcaatgacgtgaacgaggggaaaagcgcgacttcgcagcgtttgaagtcaaagcgagcgtcatgcaacagccataccagcttctgcacgaagtaagtggcttcaagatggtcgaaattcatcttccagttgccggccaccaacggaatgcgtttggacgccatatgtttcccctctaaaaaatacgtagctcccctcaaggaggggagctagaaaatggattactcaagcaccttcagaccagggagctccttgccttcgaggaactcgagggaagcgccgccaccggtggagatgtgggagaagccgtcctccgggaagccgaggttacgcacggcggaggcggagtcgccgccaccgacgatggtgaacgcaccggctgcggtggcgtcgaccagaccctgggccacggccttggtgccggaggcgaactcaggaacctcgaacacgcccatcgggccgttccacacgacggtcttggagtcgacgatcttgtcgtggaagagcttctgggactccgggccaatgtccagacccatcttgtcggccgggatggcgtcggcggcaacgacttccggagcaaccggggtgtcaccggccgggaagccggcgttcacggcgacgtcggtcggcagcacgagctcaacgccgttcttctcggcggtctcgatgtagcccttgaccttctcaagctggtcctcttcaagcagggaggtgccgacctcgtagcccttggccttgaggaaggtgaacaccatgccgccgccgatgaccagacggttggccttgtcgagcaggttctcgatgacgccgagcttgtcggagaccttggaaccgccgagcaccacggtgaacggacgctccgggttctcggtggccttggacagggccttgacttccttctcgaccagcaggcctgcggcggccggcagatcggcggcaacgtcgtagttggagccctgggcgcggtggaccacgccgaagccatcggaaacgaaggcctcgccgagagcggcgatcttcttggcgtaagcggcgcgttcgtcggcgtccttagaggtctcctccgggttgaagcgaacgttctcaagcagcacaacatcgccatcgttcatggcggcgaccttggcctgagcgtcctcgccgtaggtgtccttggccagcggcacgttggtgccgagcagctcgccgaggcgggcggcaaccggggccaggctcagctcaggaacgaccttgcccttcgggcggccaaggtgggccatgaggatgaccttggcgccttcttcgcgcagggtcttgatggtcggcagagcagccttgattcgaccgtcatcggtgatggtggtgccgtccagcggaacattgaaatcagcgcgaaccagaacgcgcttgcccttgagatctccaaggtccttgagtgtcttcatgaatatcctttccttgacgaatcgcacgtcaaagtggccaattttgccactttgcatattacaggcattccggaacaaaacaccgcattcgcctactgactgaatgcggtgtttcgttacgtcgttgtcgggttacttgccttcggctgcgcgagccttctccgttttctcggcaagctgaagcagtcggcgaattcggccggcaatcgcatccttggtgatttgcggttcggcgatcttgccaagctcctcgaggctcttgtccacgtgatcgatgcgcagctggccggcctgacggaggttgtccggaatgttatcgccgagcacttcgaaggcatgctgcactttttcgctggcttcggcggcagccttggcggaacggcgcatattggcgtcatcgaagttggccagacggttggccttgccgcgggcctcgccgtcggagcgcttgccggtccattcgcgggccgaacgggtggcgcccatgagcttgagcatgcgttcgatggcgtcgggatccttgagggtcacgcgctcggagctgcgcagcgtgcgatgcttggcctggatgccgagacgacgggccacgccacacagggccatggcggcctcttccgtggggcaagcgatttccaggaagctggccttaccgggatcggataggaagccacgggccatgaaggcgccgcgccatgctgctttgatttgggcgatggatccgttgaccacttcagacggcagtccacggacctgctgcttgcggcggtcgaccagtccggtctgcaaagccaaggccactacgttgcgggtgacgagcaccacgtaggtctcgacagggccgttcggggtctgacgggtgaggtggttgacctcggcttcatgcccgaacgtgttcctcaacgtgttcttcagccattctgcaacgtcaagcgaggtgaatacggcttggataacgtatgtattctgtaccggtcgaagaccgccgccaaaacggatcatggccgcagcttgggccttgatcgcggctggcgaatcgccttcaaaggccgccaactcgcttttgacatcgtccagaagagccaagatctacctcctacagtcccgttcttctcaatgcttcaggcgcttcgtgccgttatctgctgtcatacggtcggaagccatcggctttctgtgatacctaatctggtggacaagcgaacccgtttgatacgtattatgggctttgctttctcgcagtgtggtcaccgaacgcttgcccgatgaccgctcgacgcctgcttacgatgagtgacgcttatgctgttctctcgcggaaacggttacgttgagcccatgtgcgcgtaagcggcgagccagctcttcgctcatcgccaccgaccggtgctgaccaccggtgcagccgacggcgatggttacatagtgcttgtcttcctgggcgtatccttccaacgcaatctcgatagctttctcataagcgtcgagaaattccttggctcccttgctggaaagcacgtagtcggcgaccggcttgtcgtgcccggtaagctcgcgcaggttgggaacccagaacgggttgggcagaaaacgcacatcggccacgaaatcggcgtcgatgggcatgccgtatttgaagccgaagctgaagatgtgtaccgccacggtggtggggccggaaccgagcatcgtctcgtagagtttggtggacagctggtggatgctcagggagctggtgtcaatgacccagtcggctcgctccttgaggtcttccagcaggtgacgttcctcaaggatgccgtcgatcagtcggttgccgtgctgcagcgggtgcgggcggcgcacggattcatagcgcttgatgagcacttcgttgctggcgtcgaggaacagaatatgggttttgacgccgagatcatccagatggccgagcacggcggccagctcgtcgaaatagctggagcgcacgtcgatgacggcggcaagcttgtggacgcccgaccccgatccggaaccggaggtggtcatcatgtcgacaagcgggataagcagtttgggaggcaggttgtcgaccacataccatcccatgtcttccacgcagtcagcggcatgagagcggcctgcgccggacataccggtgatgagcagcacctcgaaggcatcaagcggggtcggctggttgtccggagtcgatgtggatgtcgcggaattcgccggcgcattcgtggcggccgcctcgccggtatcgcggttcgttgtctgttgattcattacagcgcctcctcaagagctttgcgcatcgcgatctccagctggtcgtcttcggtggtggtgtcctgcagacgctggtcggcatcgctgggcgggtcgtcatcccagataccggtcatcagcaatacctgtacgagagcttggtacagcagcatttcttcgccgccgatggcgtgaccgccatgagcgcgccaggcttccatgagcttggtggggcgtggatcgtagaccacgtccagcagcagtccggagaatggctcggttccggcattggtgagggcatccgcgacgttgtcggccgcatgtccgggaatcgtgttgatgacataggtggcgttgcgggctgcctcgagcagggcctgatcgtcgcctaattcgatttcgctgtacgggttatgcacgttgacgaacttttcggccactggtttaagcccggtgtttttcccagggtggcggtcggcgacgatgatatggccgatttcgggcatcatgcagcatgcggccaacgccgaagtggcggtgttgccattgccgaggatcagcgcggcgccgcttctcgatgcggtgtggtgttcgccgagttcgcgattggcgtggtcgaaggcgagttggatgccgatgacatcggtgttgtacagcttgatgcccggcttgccgttcggccaagcgggatcatcggcagccacgctccagtcgaataccgcggtattcgccaccttcagttccttggcccacagattttccggaacaccgtacggttggatggtcttcttcaacggcatggtcaggctcaagccagcccacgtcgagccaaggcctttgaggaaagcgtcgaggtcgtcttcccccacctcgtgcttgtcgtacagccaatcgtcgagtttcagcgaacgataagccgcgttgtggagcacgggtgacaatgagtgcgcgacgggtttgccgagtacagcgcaacgatgattggccatatcccctccttgatgtctgtttccatgctagccgacactttgcttcgaatatgtcaaccacaggccccgcaaccgaaaattcactctgggctgctggaccgggccggctcactgctcgtgcagcgcgttgtacagcgctttggctttggcgtggccgatgcctttgaccttctcgaagtcctcgacactggcttcgcgcatggctttgaccgagccgaagtggttgagcagccgcttctggtagctttcgccgatgccgggaatctcgtcgagcgcgctgcgcagggcgcctttgcgccgctgttggcggtggtaggtgatggcgaagcggtgggattcgtcgcgtacacgctgcagcagatacatgccttcggactggcgtttgaggatgatcggatagtcgtcgtccggcacccacacctcttccaagcgtttggccagtccgcagacggccacgtcgatcacgccacagtcctcaagcgccttggcggcggccatgacctgtggcttaccgccgtcgaccaccaccaggttcggcgtgtaggcaaagtgatgccggtttgtgttctgctggacgatgtcgggcgaggactcccgtgcatcgttctgcactccgaccggcaccgcgtgccccttgccactgatgtcggaaccgccctcaccattgtcgttaccgttcgcaacgattgtctccgccgccacggcagtggtcatcttgccggcggccgaggccgcgcgctgttccgcgtcgatgctttcgccggagtcgccggcgatgttgccgtgcctgaagcggcgggtgagcgtctcgtaaagcgcggacagatcatccaccgcgcctttgccgtccttgcctcggacggcgaagcgtcggtattcggatttcttggcgatcgcgtcttcgaacaccaccatggaggccacttggaaggcaccgcccacagtgttcgaaatgtcgtagcattcgatgcgcagcggggcttgcgcgagtcccaatgccttggccacatcgttcatggcctgggtgcgtgcgcccatgtcggagatgcggctcatcttgctgcgttgcagtgcttggctggcgttctcgttggcgcggtccataagctgcttcttgtcgcctcgcgaggccacgcggatggtcaccgcgcccccgcgcagattggtcagccagccttcgagttcctcgcggcgggccggttcgacgggcacgatgatttcgcgcggtaccggtgcgatgggtgccagcaggtccgcgcgtccggtggtctcctgacgggtgttgcgttctcgggtggcctgggcgcgtgccacagcgtccgtggccgtgatggtctgtgtggagccgatggcctcgcgattggtggagatggtcgcggccgactgggggtgattgtccccggcggagtccgaatacacctgcaccagaaggtcggccatcaagtcggcgtcatcgatgtcctcaactcgttcgacgctccagttgcgttcgccgcgaatagagccggcgcgcacataaaaggcgtgcaccgaggcttcgagctcgtcgctggcgaagccgaacacgtccgcgtccacatcctggtcgaagacgacggcgttctgttgcaccacggtttccagcatttggatctggtcgcgcagtcgggcggctttctcgaattcgagttcggcgctggcctctttcatgtcgcgggtcaactgggcgatgtatggccgtccgagtcgtccggtcatcacgccgaccagctgttcgcacagcc

SEQ ID NO: 2791 - DNA, 9573 bp, Unknown
  R36_18m  MAG No. k141_18138
cttcctcggcctgccgcagattgtcggcggtgatacgccagtaatcggtgtccttgccgtaacattcctcgatcacggccagcgcatgccggtatccagtaaccgcatccgcatgccgtctctcggcaaagcacacctgcgcgaagcccgccagtgcggaggcataatgcgcggaatgttccagatggccggtgcgatagatttccagtgccttggctgcatgccaatgcgcgccctccaacttgtgttcggtcagcagggtcaacgccagattcgtgtgcgagctggccacgtcgatatccgcgtccgggttcacgctcgaggcttcgataatgcgcagcgcttcacgcaactccagttccgccttgtcgggccgattcgtctcgctgtagagcatcgatagattgttgtgcagtgctgcgagcctacggtcggtgggtgccagcgaatgccggcagacactctgcgcctgatgatacaaatcctcggcctgatcgtattgttgggccgcgcgcatcgcggtagcgcaattgattagcgtggtggcccacgcctcggatgtgccggtggtcaagcccatacgagcggccagttccagcgcccgctgcacaatccactgattctccttgtgccggccctgcgagcgatagaagcccatcgtttcgttgagcacggtgagcagtccggcctcgtcgccggcgttttccgcgtccaccatcgcctgttccaagtacggaccggcttcggtggctgccgcgtggcgatcgaaaatcgcgtccagtccgttcaggaattgttgggtatcaaaggttgcgggcgattgatcggcatcgtccgtggcctggttcgcagtagaatcggcaccttgcgctgcggccgccgcatcggtgtcgtcggcatcgtctggaccatgcgcgaattgtgcggcgaattgtttgagcagtgcttcctcgtccataccgccagacctccctgaatcgtgtctgatttcagtctattaatactgtaaacaaacgcgtcagggagtttgctgtgagcttggtctcagtccaccttgatttcgcgcatgcggtgaatggcgtcggtatcggtttcgcagcgccacgagtagaaggccagcagccctacggcaagcagagccagcggcataccgcccagaccggtatagcgatagttcatcgagaaagtggtgagcatcgcgccgccgacaatcgagccgatggcattgccgaagttgaaggccacctgcacggctgcgccggcgatgagctcgccgccgccttggccggcttcggtcatcaacagctgttgcggagcggagatgaagaacaggccgaaggcgatccagaaggtcagcaaagcagtagtgccctggtttcccggcagtagcaaaaccatcagcaagccgatgcaggaaatcgtctgacccagcgcggcagtgccggcgtggcgccatttatctgtgatgcgaccgccgataagaccgcctatcaccatgccgaagccggcaagcatcatcaatagcggtaccaggttagacgaccagccaccggtcttctgcagccaaggggagacgtagctccaccagcagaacacgcctgcgttgccggtgaatacggcggccagaatcacccacggtccacgacgagtaaggaatttgaactgaccggcgatgccggcgtccttaatcggcgcaacgaaggggatccatgccagaactagcacgatggtcattgccgcccatgcagccagaataccgaatgcgaggcgccaggataggaactcagccatcaaggtgcccgccggtacgccgagcatattggctacggtttggccggtgaccattaccgatacggcttgtgcttctttgcccttgtcggccaaggttttggcgatgagtgtggcggtgccgaaaaatgcgccgtgcggcaggccggcaatgaagcgcgcgacaatcagcgtggcggcattgaccgagaacgcggaggccagattaccgataagcgcaatcaccataaacaatatgatgaggttcttcggcggcaccttgcggccgaacaccagaatcagtgtgccgaagcacacgccgatcgcatacgcggaaatgtaatggcctgcggtggggatgtccacgccggtggcggccgcggcctgcggcagaatacccatcatcacgaactcggcggcaccgagaatgaacgcgcccgaagccagtgcaagcagactcttcttcatggttcctctaattacttcagtattacttacaaaaacagtgcggcaatcgattgattcgagcgatatattacggtggtccgccaacaaatacgggccttgccgcgacgcggtttgtcgctgtgcgcggcgggttgtttaccgctgtccgatcgcttggtctgattgttgggttaggaaacgaaaaaccggattgctgatttctcaacaatccggtccagttgtcgggctggcgggatttgaacccgcggcctcttcgtcccgaacgaagcgcgctaccaagctgcgctacagcccgtttggcaacagacgtagatattacattgtggtggtggacaatgcaaatcggcatgtcgcgagtgttgcgtgatggtggattcgccgtgtgtacaggtctctcaagccttgtgcagagccggttttgcgtcatgtgagcgggtgttcagatggccgtacggtctgccgggctcataatcgccggccttgcgtacactgatgaatcatggctgaagttgtcgaaaataccgaaaacactgagaatgaaaccccggccgtcccgcagatgagcaccgtcgaacgtgcggaaatgctgctcgagcaggacgccaccatccgcgagaagatcaagtccggtgccacgctggacgaagccgtggacccctccaacaaggagttcggcccgctggctcaccccgagcaggtgcagatgcgcgtggccaagcgcgcgatgatgcttgaggccggcatcgccccctacccggtgcacttggacgtcaccgacaccatcgaggcggtccgcgccaagtatgacggcaagctcgaggctggcgaagagaccgaagacatggtcggcattgctggccgcgtgctgttcctgcgcaacgcgggcggcctgtgcttcgtgcagctgtccgccggtgacggtaccaagattcagggcatgatctccaagaaggagattggcgccgactcgctcaagcagttcaagcagctcgtcgaccttggcgatcacctgtacctcaagggccgcgtcatcgcctccaagaccggcgagctgtccgtattcgccactgagtgggctatcgcctccaaggccctgcagccgctgccggccctgcacaaggacctgaacgaagacacccgcacccgcaagccgtacatcggcatgatcgcggacgagaacatccgcaacatggtgcgcaaccgctccaaggccgtggcctccctgcgccgcacctttgacgaccacgacttcctcgaggtcgaaaccccgatgctgcagaccctgcacggtggcgcggccgcccgcccgttcaccacgcacatgaacgccttcgaccttgacctgtaccttcgcatcgccccggaactgttcctcaagcgctgcctggtcggcggcatcgatcgcgtgttcgaaatcaaccgcgacttccgcaatgagggcgtcgacgccacgcacgcccccgaattcaccatggtcgaggcctaccaggcctatggcacctatgattccatcggccagctggtcaaggagctcgtgcagaagaccgccatggacgtctacggctcgcacaaggtcaccctgctcgacggcaccgaatacgacttcggcggcgaatggaagaccatcagcatgtacgattcgctgtccgaggcattgggcgaggaaatcgtgccgaacggcggccctgagcatcccggcacctccgttgagcatttgggcgccatcgccgacaagctcggcgtggagcgcgacgacgtggagaaccacggcaagctcgtcgaacacctgtgggagcacttctacgaggacaagctttacgagcccaccttcgtgcgtgacttcccggtcgaaacctccccgctggtcaagggccaccgcaccaagcccggcgtggtggagaagtgggatctctacgtgcgcggcttcgagctggctaccggctactccgagctcaacgacccgatcgtgcagcgtgagcgtttcgtggcccaggccaaggacgcactcgccggcgacgaagaggcctgcgacatcgatgaggacttccttgaggctctcggcgtgggcatgcctccggccggcggtatgggtatgggcattgatcgactgcttatcgccttgaccggtgccacgattcgcgagaccatcaccttcccgctggtcaagccgctcgttggctgattaggcatactctggctcccctcagagaggggagccagagttatatatgaaagggattgcttatgtctatcggcttgtgggttcggggcgcgcgtcccaagaccttggccacttccatcgcgtcggtgatggttggggcggtgatggcgtacgtgcatatcgagcggtcgggcacctgcatcgcaatatatccagaaccggcctcctgcgccacggcccgtgaacagcagaccctgctgatggaccgattctggccggtgaccatcctgtgcctgctagtcgcgctgttcctgcaaatcgccgtcaactatgcgaacgactattccgacggcatccgcggcactgacgccgggcgtgacacggacgaatcgaaatcaggcaaaccccagcgactgaccgcatccggactggtaccggccaagcatgtactgttcgcggcgatgatttgcgccgccatcgcctgcatatgcggtgttgtggcggtcgtgctcgcccaagcatggtggttgctggccgtgggcgcggcctccttgctggccggctggttctacaccggtgacaagcatccgtatggatacgtcgggctgggagaagtcggcgtgttcctgttcttcggcttggctgcggtattgggcaccgaatacgcgctgtgcggcacggtggacgtcggcggactattgggtgctgtggcggctggcctgttctcctgcctgatcatgatggtgaacaatatccgtgacatcgacgaggatcgtgagcatggcaaacacacgctggccgtacggctgggggagtccggcgcgcgtacgttgctgattgtgtgctgcgtcatcgcatggatcatcgccctgctgatgtgcggtacattatggtggccgtggggtgcggtgctgttgctctcgggcaccggaatacctgtgcgcatggtctccagcgtgaataaacgtcaattccgcccggctctgcccgccgccagcttccagaccttgctgtttgcggtggtgctggcggttgccgtggcgctatgagagcgaaataataagacgaatactcgtgtttgggcgcacgcggctgtagactgaaccgtatgacttataaactagtactgctccgtcatggacagagcgcatggaataaaaccaaccagttcaccggctgggtcgacgtaccgctgaccgagcagggtgaagccgaagccaagcgtggcggcgagctgctcaaggagaagaacgtccttccggacatcgtgttcacctccctgctgcgtcgcgccatcaacaccgccaacatcgctctggatgccgcagatcgtctgtggattccggttcagcgtgactggcgtctcaacgagcgtcactacggcgctctgcagggcaagaacaagaccgagatccgcgaagagtacggcgacgagaagttcatgctgtggcgccgttcttacgccaccccgccgcccgagatcgacccgaacgaccagtacgcccagaacaacgacccgcgctacgccggcgatccggttccggaagccgagtgcctggccaacgttgttgagcgtgtgaagccgtacttcgagtccgctatcgagccggagctcaaggccggcaagaccgtgctgattgctgcccacggcaactccctccgcgccatcgtcaagatgctggacaacctgtctgaggaagagatcgccaaggtcaacatcccgaccgccatcccgctgctttatgagctggacgagaacttcaagccgatcaagccgcgtggcgagtacctggacccggaggctgctgctgccggtgccgccgctgtcgccgctcaaggccagaagtgagcctaagccgctaacacggtacaagctgtaaggggagtcgcgcataatgtgtggctcccctttgctatgcctgccaaatccccatggggcggtgattaccccatggggcggtaaaactctcatggggcggtaaaaccctcatggggcggtaaaactctcatggggcggtatgccagaatggcttaattccgcggtttcacacatctttcaaaccgccccatgggcaagttaccgccctatgggtgttttgccgccccatggatacgccggtgtaccgcccagaagcaacaaaaaaacggcgtccagccgtagccggatcgccgctttcaggcatcctcctcaaaccataggaggacaagtgttcagttattcgcccaatgtgaggacaagccccaatcagtcgatgtcggtgccctcgtcgcgggtcggctccttggtggggtcgaagccggagacgatgtacaccacacggcgggcggcggacacggcatgatcgccgagacgctccaggaagcggcccagcagcacgatatccacggtctgctgacgggtgatgtcatcggacagcgccagatcgaaggtctggtggtgcaggttgtccagcttgtcgtcggccaggatgatggcctcggcggtcttggcatcgcgatcggagagcatggccaccagctggtcagcggtgttgtccaggaagtcgatcatctcggcgaacaccggctgagcggattcgggaatcgcggcggccgggtaggtgcggcgagcggcctcggccacgtggcgggcaagatcgcccatacgctcgaacgtggaagccagacgcatggtggaaacgaccacacgcagatcggtggccaccgggttctgcttggcgagcagcttgacgcactggtcgatcacagaggactccagggcatcaatctcgatgtcgccgtcaatcacagtctgtgcggcttcaacgtcctgattcagcagggcttccccagcgcctttgatcgccttgcgcacgttctgcgccatacggtcgaggtcgtcagcaacctgcttcagctcctcgttgaaaataacgcgcatttctctagcctttcatgcttgcttattgcaacctgtaccagtgtattattccagtacttgttccccacttcaacgtaggtaatggcaacctcaagttgttctactgttcattgggttgttcacctgaaattcatgttaccggcgcgccggcaaaccgcaatcccagcgtgtggtgtgaaagaatgggggcatgacacagatgccgctcgtcgccgcgattgctcttattgtcgcggctgttttatttgtggtaggaatcatcacgctcatcgtgggattcgcgacacatcgagtgtccatggaatcgccgctggccgatgatgacgacaatgacgatctgtccgacgacaccgccacgctgctgtccatgctgccaggtgcgtccgtggtggtcgacgagcacgacgaggtggtccgctgcaatcccgccgcctaccgcctgggtgtggtgtcagatgacgccatcgcccagcagcaggtgctggatgccattcacgaggcgcgcaagtctggtggcaagcgccagttcgacttgaccaccgatactccggagcggtacgtcgcagaccagaacaagggcgatcacgtcgccacgcagtccgtccaccgccccaactggctgaaggtgactgtagggcgtatcaacgagcagttcgtcatcgtgttgattaccgatgtcagtgacgtgattcgtttcgctcaagtgcgtgactcgtttattaccaatgtatccgagcaattgttgggccccactgaagctctggccaaactcgccgattcgctggagtccggcaatctggacgaacagcaggtggctgccgatgctcgccaggtgcgttccagctgcagcaagctcaaccatatggtgtccgatttgctgctgctcatacgcgcacaggagccgattacgccgtcttccgccaaccgactgaacgttatggaacagctcgaggccacggtggcgcgactggagccgcaggcggccgcggctggcgtgcagctgaacatcaagggcgacgatgatctagtcatcaatggtgaggcggatcagatcgacagcgccgtgaccaagctcatcgaaaacgccatcggctattccaaggaaaatggtgtggtcagtgtgtccgcatccaaagacaaggatggcgaccgtgcggtgattcgcgtgatcgaccagggcgcgggcatcgcgaagaaggaccaggcgcgcatcttcgagcggttctatcggggtgcggaacagagcaatcgcacggcggatggcgtgggccttggcttggccatcgtcaagcatgtggcgctaacccatcatggcgatgtgaccgtatggagcgcgcccgggcaaggcagtacgttcagcctgacgttgccgttggcgcagtgaactttattactgtccgaggcggcggtagtcccagcggtcgaagtattcccaaatcagcagtagcaagccaataatgacaccggccacgcacataatcaccaacggcattacgctgtagcccacggccagcagaatcagcacgacaatcaacgccacaatccatagaccggtaccgatggcaaacaccttacgtaggtccacccgtacgggcttgggcgcgggtttgcggacggcagggtcaatgagaggcgcgaacttcatactcatgcactgtagtaagagtagggaggggcgtcaaacacctctccctacgatttattcaatcggtatcagttgagaccgatcaatgtgcatggcatatatggtcggccatgcgaggcatagaccgccatcacaggtgctcgaccacatagtcgacgcacttggtgaaggccatgacatcagccggttccaccgaggggaacacgccaacgcgcagctggttgcggcccagcttgcggtagccggcggcgtccacgatgccgttctctcgcaggatggacagtatctgggaggcctggacgcgctcgtccagatcaatggtgaccacggcgttcgagcgggcgtccgcatcgacgacgaacggagcggcgtattcggagcgctcggcccacgagtacaggatggatgcggacttggcgcaacgcgtggtggcccaggcgaggccgccgttgctgttgagccagcgaatctggttttccatcatgatcagggtggccacggcgggcgtattcagggtctgatccttgcgggagttgttcagtgccgtggtcagcgagaggaacggcggcacccagcgatgtgcgccttccagatgagcgcttgattcgacgc

SEQ ID NO: 2792 - DNA, 23558 bp, Unknown
  R36_18m  MAG No. k141_18482
accgccttgatacctatgggattgtctgtcggactgtttggcctgttgcctgtggtggtctggtggctggcgatgggcgttgccggcatcacatggattgccttgtggacgcgattcgacccacaacgcacatcaccggcacatgcgggcaaggtgccgtatgtgccggtgatattggcgggcgcgattgtggcggtggttgttggggcttaatcccgttactcccctcagtccgctttgcggacagctcccctcggcgaggggagccaatgaggcgactactggttttcggcttgccacttgcgtagttcggccacattctggtcatgttcatcggcggttacggcgaacttggtttcgccggtgtccagattgaccgtgcagaagtacagccaattgccgctttcggggtgcagtgccgcttgaatggcgctatcgccgggattgctgatcggcgtaggcggcaggccggagatcttgtacgtgttgtacgggttggactcgtcttgggtcatctcggtggtcacctgcgcgggcttgacgttattgccataggccacggtggaatccatgcccaacgacatgccctgctccaaacggttctcgatgactcgcgtcactttgccgtagtaatcggctttgttgacctcggcctcggcgatagaggcgatgatcatcacccgttcgcggtcactgccggtcggcacgcccaattcatccaacttggcgatacgcttatcgaccatggccttgaggatttccgaagcgctcttcatgctcttgacgttgtaggttcccggctccagccatccctcaaagctaccgcccgcttcattgggcagaatatccttacccttgttcttgataatcgtgtcgaattcgctttgggcaacgccggaaagcttcgcggcgtcggcgaacacatcggtagcacgttcaccgggatgaacctcaaggaagcccgccgcctggttggtgtcggagagaacggcgatcacatcggatgcggccatatgcttcttcaatgtgaacgttcccggatagagtgtcgcgctattggcgttgaccacgctggtgaacgcggcagtggacttgatgacttcggccttgagcagattatcggcgatctccgccgcgccttggccctcgctcacggtgaattcgacctcgccatagcccggtccccgatagtccgcgatggccgtcgactggttgctccggctgtcgcgccatgcgatgagcttggttacgccgaaatagccgccgccgataagcagggcgacgatggcgatagcgatgataatgccactgacgcgcttgcgcttgcgctgtgcacgtcgcttgcgcatctccctgcgggatttcggcggttctggcggctcggccccgcgcattggttctgacccctgttcgacccaatgcgtgttgtcatcaaagaactcgttaaaatcatcggtcataaccgatacctcactgctcccgggtacggtcgagtgccgtctgcaaaatcaccactgccgactgctggtcaaccaccggcctgtgcttgttcgaagctttatgggcctcgaacagttgacgatgcgcactgactgttgtcaatctctcatctatcaatgacacctgcggaatctgatactccgtagaatcactgtcttcactctctgcttgcagcctcttctccagattggccgcccacctgcgcgcttttttggcgcttttgccttctgtaccgtccatctgcaggggcagtccgacgattacatggtccacatgttcgtcttcgatgacgttcaggacctcgtcaatagcaaagaaatagtcgccggcaacatgaatgttgccagcagggtgtgcaaaggtaagctccgggtcggacagtgccagtccgacccgggcattacccaaatcaacgcctaaccacaccactggcggaatcaggctttctgcgcctcgtgctcgagcgcttcgagggcctcgtcgatcttggaggcatcgacaccgccaccctgggcgaagtccggcttgccgccgccaccgccgccgaggaccttggctgcgccacgcaccagatcaccggccttgatgccgaccttgcgggcggcctcgttggtggccacggcgaccatcggcttgtcatcctcgttcacgccggcgagggccaccaccacgggggcgtcttcaccgagctgggcgcgcacgtcgagtacggtcttgcgcagggcgtcgaccgcgccgaagtggcccacgttcttgacggccaccttgaccggggccgcggagttcttggtgtcagcaaccaacgccggaaccgaggcagccagctgggactcgtacatggaggccaagcgacgatcggattccttgagcttggcgagcagggcgttcacacgctcggcgagctcgtccggacgagcgttgagcttgtcggacagctgggagaccagcgcgtgctcacgagcgttgaagtcataggcaccctggcccacgacggcgtcgacacgacgcacgccggagccgatggaggcttcggacaggatgttgaccatgccgatcttgccgacgtggtccacgtgggtaccaccacacagctcgcggctccagccgtcttcgccgatggagaccacgcgtacgatgtcgccgtacttctcgccgaacaggtgcatggcaccgagggcgatggcgtcgtcgaacttcatttccttggtggtcacggcgaggttgtcgcgcagcttgtcgttgacgcgctcctcgactgcggagatcacggacttggccggggccttggaccactggaagtcgaagcgcagacggttcggggcgtcttcggagccgcgctgggtggcctgcgggcccagctcctcacgcagcgccttgtgcaccatgtgcgtggcggtgtgcgagcgggcgatggcgccacggcgggccaggtcgatgttggcgttgacttcggcgccgacgaccagcgtgccttcggtcagacggcactggtggacgatgaggtccttgatgggcttctgcacgtcgtcgacttcgagcactgcaccgtcgtcggacaggatctcgccctgatcggcaagctggccgccggcctccgcatagaacggggtacggtcgagaatgacttcgacgttggccgggccggtgacggcgggcacggagcccttgccttcctgcatgatgccgatgaccttggcgcgggcggacatatccgtgtagccgaggaagtcgatcgggctgacgagcgtcttcttgaagtcgtcgtaaacggaaagatccacgttgtgacgcttcttgagggcgtcggcgcgggcgcgggacttctgctcggccatgagttcgcggaacttggcctcgtccaccttcacgccctgatcggcggccatttcgagggtcagctcaatcgggaagccgtaagtgtcgtgcagagtgaacgcatcagagccagagaccaccgggtcggcggtcttcttggccttcttgacagccacgtcgagaatctcgatgccgttctccagcgtacgacggaacgcatcttcctcgccgtaggccgcttcggagacatcgtggaaggtgtcgttaagctccgggtagctggcgaccatggcctccttggagacaggcagcagctcgggaatcaccggatcggtcacaccgagtacacgcatggcctgcacggtgcgacgcagcaggcgacgcagcacgtagccgcggccgacgttggacgggcgcacgccatcggacataatcatcagcgcggaacgcacgtgatcggccacgacacggaacttgacatccgcggcctcgtcctcgccgtacttgcggccggacaagcgctcggcggcctcgatgaccgggaagacctcatcggtctcgtagatgttctgcttgccctgcatcaggtaggccaagcgttccagaccggcaccggtatcgatgttcttctgggcaagctcgccgacgatgtgcaggtcggtcttggacttgacgttgtcgacctcgtagttctcgaacacgaggtcccagatctcgatgaagcgcgtctcatcggccgcgggaccgccatcacgaccgtattcggggccgcggtccacgtagatctcggagcaggggccaccagggccagggccaccggtggtccagaagttgtcttccatgccgaaaatctgcatgtgctcgggatcgaagccctcgttcttccagatggaacgggcctcttcatcgtcggtaaaggtggtgacccacagcttttccgggtcaaagccgtaaccgccctcgctctgcggggtggtcagcagctcccaggcgtagtggatggcctcttccttgaagtagtcgccgatggagaagttgccaagcatctggaagaaggtgccatggcgggtggtcttgccgacctcatcgatatccagcgtacgaacgcacttctggttcgatgtcatgcggcgcttcggcggggtctgctcaccaagaaggtagggaatgaacggcaccatgccggcgatggtgaacagcgtggtggggttcggggaaatcagggatgccgaaggcatgacgagatgatcatgtttggcaaagtaatcgaggtatcgctttgcgatgtccgcagtgcgcatgagcggatgaactccttgtttgggtaatgggcgcagttgcgcctggtattggtggaaaaagactggattatgaggactagtttgttctagctggttcagtgactagatggcaaggcggcatgcgcgtgtcagttggcgcgctcgatgtactgacggttgagctcagcctcgcgggctcgacgggtggcattgaactcgttgaccaacccttcgagtgttttcatcggcacattgtcctgatcggggccaagcaggaactggcgtgccgcatcaggcgtattggccttgacataggcctgtgccttggtgacggcaacgattccgatggccacgccgacgccgacccagaagatgcgtttgaacatcactcccccttctcggcggtgtcgttgacggtggttttcgcggcgttcttcgcaaggaaggactgacccgtggttttcagcgcgtagaaggtggaagcgatcttgatgatgggcttaccgaggaaagagccatacagatcagtcaacgcaccaacgttgttggcggtggtggaagccgcggcggaaatcttgttcacgtcttcaagcgacttgttgacctgcttgacggtggtcacgccttcgtccagcgcggggatggcgtgttcaccggactcccggaccgtctgcgatatctgatcaaacatcttgcccagcctgatcagcggatagatcatgaaaccggccaatactgcgaacgcgatggccgcgatcaggccagcgatctctccgactcccattgtttcctccttgcggtcacacttactcgcctaagggtagcactccttccctatttcttggcataccattgcatgcgcagggcgaaaaccgtgcgcgtgggcgtatgcggctataggcgaaaggctgtcctgctgacgctttcgtttgcggcgtgccgccgtggaccgtacgtgctattcgatatgtattgcttgctatttgctacttgccgtacgaaacgatggtcacggcctcgccgaacggcttgtcggtgtcgaagtcgagcacggttaccgaaccattggccgggcgttcgttcagatcgaggtcagggccgccgaaccggtggccgaggctaagcagtgtgttgccatgcgaaatctgcagcacatcgtcgccatccttgagattcgggttgtcggcgataagacggaacgcgccttcgacgcgcgtccaatattcctcatcggattccgcatcgtggaagggatcggcttccttgagaaaatcacgcgaggcccccaacccgaacttctcgacgatttggttgtaggttttggcgccgtgaggcgctcccgcggcgtaccaggccatggccatgtcaagtccctcgtagtagccgtagaactgctcgcggaagtgcatgtccgtcacgagtgcggggcgcgggttacccgcggcttcgttgatgtcgagaattttctcggccgtctgccgggcacgcgtggtgtccgaacagtaggcggcggtgaacgtcaatcctttcagtcgctcaccggccttgacggcatcagcgacgcccgactcggtcagcggcgaattcgaccatccctgcagacggttgtatcggttgaaataggtctgtccgtgacggaccaaatgcagatgaagaatcatggttccgattatgtcaccattccggcggtttcggtgcgggctgccggaagtcataagtcataacggcataggtcactacctgagatatgcgtaatccgggtagtatacctgacgattcctgagagtacacttagggtactatgagcataacctcgaaacctgcaccatctcaatcgtctgagcctgcccatttcaggggtatcgatggactgcgcgctctggcgattcttggagtcatagcattccacacccgcccgtcgctattgcagggcggattcattggcgtgacgatgtttttcgttatcaccggttttcttgccacacgttcagtactgaacatggtggaccgcaccgggtcctttggatatggccgatatctgatccgccgcattactcgtttatggccggtgatgctggcgaccattgccgtggtgccttggctcacttggatgttcgctcccagcctgttgcagaaagtggtttccgattcgctgccgagcgccttgttcgccagcaattgggtgtacatcttccgcaaggtgccgtatttcgaggcggccggattgccttctcctctgacccatctgtggttcttgggcgtgacgatgcagttctatctgatttggccgttgctgatggtggtgctcggcaaaatcaccaagtccaaatgggtgcgctccatggcgattcttgtcatcatggctgcttccaccgccgccatggtgctgctgtttgacccggccaatacctcccgcgtgtattacggtaccgatactcgtctcgccgagctggccgccggcgcgctgttggctatctggattgcgccttcctcgcgaggtacggaagttgcggaagctggagcggcttcgcaaacagtgcagatcggacgtcaggccggcgacaagacgggcgcccgtctcactatcgtctgcaatgttcttggcaccgcggctttggcggcactgctggccggattctggttcgccaacgggtatctgtcgtacatgtaccaaggcgggtacctgattaccgcgttcatatcgttgtgcgccttggcctgtgccgtgaacaatgactcaatctggtcgcgcgtgctgggttgcgctcccctacgctatatcgggtcgcgatcgttctcgctgtacgtcatgcattatccgctgctgcagttcatgaacccggcgacacgaacgcaggcgttgccgtggtggggttgggttcttgaggccatcgtggtgttggcggcgtcggaagccttctaccagctggtcgaggcggcccgtaaatcggtgcagatgcctcgcagccaacatgccaagccgctgccgaaagccggctaccagctgcgcccgggcgcgtgggtcatgtcggttatcggattggtgaccgttgtggtgctgacgtgggcaccggtggattggaatggcatcgctcaagcgcgagccattcagctgcgccccgaactcgcggcacccgccaagccggtcaagaaaccggcgaagcccgagcccgagtcttctgccataaatgccgcgaacggcgaaaccaataccgctgacgcgaataagaacggttcggattctcagccgcccaccatcaaaccgattgcggaaaaggtgccaaacaatcttgacatttcgaagtacgcctatgatccggcaacggaaagctgcaacgcggatatgatgatggtcggcgattcagtgacgtcgggtacttcggacgccatccaggccgcattcccgaacgcttttatcgatggcctgccgaaccgtcagatgccgcaggcggtggatgtgtatcagcaggacaccgctgccggccacagtggcagtgtggtggtgtttggcctcggcacgaacggcgtgatttcgaatgagcaggaagtgcaacagctcattgacctgaccggcggcaagccgacatacttcatcaccatccgtatgccatacccgtggcaggagaacaacaacaatacgatgctgcgtgaggccgccaagaagaacaagaacgtgggcatcatcgattggcatgggtatagcgaaggtcatagcgaatacctcaacgatgacggcattcatccgaatatgaccggtgcctatgcgtacgcgacgatgattcgtcaggcggtgtgcggccagtaatcgccctacaacgcaggaaccccgcggcttctcgaaagaagcgcggggttcgagcggtatgtcctggatttgttgaccagagggcccggatcagcgggcgtagaattcgaccacgtactggatgttgacctgcaccgggatctcttcgacctccggcttacgggtcacagtggccttcagggacggcaggttcacgtcgaggtagccggggaccgcaggcagcacgtcacggtgcacgccttcggcggcgatctggaacggaaccatggtctggctcttggccttcacctgaatggtctggccgggcttgacgcggtaggacgggcggtccacgatgttgccgtcaacgaggatgtgacggtgcaccacgaactgacgggcctgggcggtggtgcgggcgaagccggcacgcagcaccaggttgtcgagacgggtctcgaggtcggtcagcatggcgttaccggtctggccggcagtacgggtggccttctcgtaagcggcgcgaagctgcttctcggagatgccgtactgagcgcgcagacgctgcttttcgcgcatacgcaccgcgtaatcggactcggtgcggcggcggtcacggccgtgctcgccaggagcgtacggacgcttttcgaagatgcgctgagccttgggggtcagtgcgatgccgagggcgcgagacagacgcacctgacggcgagaacgctgaacgttcgtcattggattaatccttctgtcgttatctgaacggaacgcttgccttgcatatgcctggcaagcgctgagccgggcctccccagcgcttcgtcgtgaacgaacacgaacgggttggttttcttgcgatcacctaccgccgacccgctgatgggctatgactccagacggtatctacctgttggcagacaccagcagactatattacaccgaggctatggacagcactccggcgtccatgcgatacacccggtctgcgtattcgagtgcatcgggatcatgggtgaccatgagaatcgccgtgccgttgttggcttggtctctgagcagacgcattacgatgtcggtgctctcctggtcgaggtcgccggtcggctcgtcggcgatgagcaggctcggctggttcatcagcgcgcgggcgatggagacgcgccgcatttcaccgccggacagctcgcgcgggtagctgtctgccagatcggcgacaccaagctgggtgagcagcatgcgagctcgggtggcgaacaggtccgaacggctcgcagccgtgtttgacggcgtgttttcccggtctgtgattggcgcaatgacatccggcatgaacaggtcggcggctgcttcatcattggtggcagcggcttgtgccacggcatcggtcgacgcaacagcgtccacctgagcaacggcatccgttgcttctgcgttttgggcgaacggcagcggctccggaaacatcgttgcgggcagaatcacgttgtcgagcacggtcaggttgccgagcagggtctggctttgggtcacgaatccgatggtgcgattcctcagcacggacagtgctttatcgcccaagtcggccacattgcgtccagccacgctcacggttcccgaggtcgggcgaatcagcccggcgaccatgttgatcagcgtgcttttgccgttgcccgaccggccgacgatggcgatgaattcgccggcatcgacggtgaggttcacgtggctgacggcgtcgaacggcgtgccgcggcggacgaactggcgggtcaggtccgtcaaggtcagcagatggtccggggagggcgtctcggttacgtgcggcgaatccggcgcagtcggcgcgttcggctgagctggcgtggtcggctggagcttggtcggctcaaccgtggtcagctgagtcggcgtagttgtctcagtcatatcactccccctctcgcagggtcaggtaggcttcgggccggccgagacgccacatggtggccagcgaaccgatgatgccgatgaccgtagagcacacaatggtcacggcaacgaatccgatcaccgcaaccgggctggcttgcagatacggcaattgaagttgtttgccgatcagcgaactgaatgggaaaatcaccaggctggccgcgccgacgccgattacgccaccgatcagaccgatgatggcggattccttcagaatgatggcattcaacatgccgcgcgtggcgcccatgatgcgcagggacgcgaattcgcgtttgcgttcgttcaccgacgaggcgaatacggcgagcagcacaatcacgcccattacccagatcaccgccacgaaaatcttgaggtaggtgacaagcgcggtcagcgaagttctggtgttggcggtgatgccgccggggtatacgtaccccaaatcggcgaaccgggagtcaagacgcttgatgttttcagccacggtctgcgcttcgtaaccccgctgcgtcttgatcatcacggtggagacggcttcgcctgcatattcggcgggcatgacctgcttggagaccttggccgaggcggcaaccatatcaggcacggtgttttggttgatgaacaccgaattgtcgaggctggtgccggtgttggcgagctgggcgacgaccggccacttatggccgtagagttcgatggtgccgtcggtggacacgttgacgtttgcgccggcaatcatctgaccgtcttcaagggggccttcgaactgggatgcgacccatggttcgatgacgaagtcagtgtccgggtcgtaaccgatgatctgcagcttttcggcacagcaggcggcggccagcgatgatatataggtctgttcggtggcctgtgcgatgccgtcggcctgcatgacctcgtcggcgatgtctttggtgaaatagaaagtgctgggattgccgctggtgagcagcgcttcagccttctgcgcggtgttttgcggcacgaccataaggtcggcgcccaggcgcttctccatactggtcatgccggtgttgaggttcatggtcagcatggtgccgccgaagaacgtcagcgcgaggatggtgacgacggcgagcagtgcgccggtgcggaacggcttgcgtttgaggttttcaatcggaaggccgcgcaatgcgatatgggatggcacgatgagtccttatgttgcttatagtgcggttgcaataagcgagaccggagtccagcgttcggaatggctgggctccggccgtctgctcgatcagttgcgcttggcggcgtgagagtcgagccagatggcgatggccgcgaacacgatggtgagcacgccgagcacgatgagcgtgggcagcataaccatgcggcagtgcatcatcgcgcccttgcagatgccgatcaggaaggtgggtacggcgagtagtagcagggcgttggctgcggcggcgatattgaggccgatgcgaatctgcggggcgacgaacaaagccacgacgcccaacacgaggatgacgacgccgatgccggtggccgcctgctgcgagtagtggcaggcacccggcatgtcatggccggtgcaggcgtgcgcaaaggtctggggcgcgatggtgatcagcgcgccgaacagaatattgggcacggatgcaaacagcttgttcttcataactactttttcctctcccctgttcccagggctcgtaggcgcaacctccgcattatgcccagatagtgatgaagaacacaagtcttgttttttgtgaatttatttggtatataactcagcccctcgtcagaggggccaatctatctacaacttctcaataggtgctacgcggagcatgaggcgtttgacgccggcggagccgaagtccacggtgattaccgaattgcggcccttgtcttgcgcgtcggtgaccttgccgagaccgtactggtcgtggctgatcatgtcgcccacggcgaagtcggcgatattcaggccattgtccttggtgagcttcgagctgggcacggcagagccggtcgaaccggatttcggtgtggtgcggcgcgtggtgaccttgccgccacgggtgccgccatatgaaccggatgaagaaccggaacgggaacgcgacccgtaagacgaccccgaacgggagcgagacccgtaggaggacgagccggagcgggaatcatatgatgatgaacgggaaccgtacgaagaacctgaacgggaaccatacgacgaggagccggaacccgagccatacgacgacccataccgcgaccgcgacccataggacgaacccgaaccggacgaaccacgcgagccgaacgtcgacgacccgccaaacgtggcgccgccgaaatcgtcatcatcccagccgcccaaatcgtcggcgaatccatcggtctcccagttggcgcgcatacgctccacgccggcttcacggcgtttccaatcaatcagcgaatccggaatctcatcgaggaattggctgggcatcatatcggcggcctggccccactgggagcggacggcggcgcgcgtgacatacagtcgctgcttggcgcgcgtgatgcccacataggcgagtcggcgttcctcctgcagttcagtggtgtcttccatcgaacgcgaatgcgggaaggtgccctgttccatgccggtcaggaacaccaccgggtattcgaggcccttggcggtgtgcaaggtcatgagcgtcaccttgccggagtcctccgcctcaccgggcagctggtcggagtcggccacgagcgcagtggtctccaggaatgcggacaacgtggcgtcaggcgtgttctgttcgaattcggctgcggtggactgcagctgggagaggttctccagacgggaggcgtcctgcggatccacggatttctcaagttcggcccttaagcccgacttctccaatacttcggccacgatctcgctgggcttggagtcgtgcgcgtgcgtgaactgcgagagcgcgcccatcagatcgcggaatgctcgtagcgaggtggcggtgcgggtcggcacctcgatctcatccaagtgcatgagtgcgtagaagaagctggtgccatgctcgcgcgcgtaggcgagcagcacgccttcggcgcggtcgccaagcccgcgcttgggcacgttgagaatacgacgtagattcacatcgtcgtccggattgacgagcgcctgcaaataggccagcgcatccttgatttcgcgacgttcgtagaacttggtgccgccgacgagctgatacggctgattcgtgttgatcagcgcctcttcgagcgagcgggattgggcgttggcgcggtacatgatcgccatgtcggagtaggagatgccctcttcggcgtgcaggcgcgcgatttcggtggccacccactgggcctcctgctgggcgttgtccgccgcgtagccgacgatcggctcgcccttgccgagcgcggtccacagtttcttgggcttgcggccctcgttgttgctgatcaccgcgttggccgcgtccagaatggtctgcgtcgaacgatagttctgttcgagcatgatggtcttggcgttcgggaagtcctgctcgaagtcctggatgttgcggatgtcggcgccacggaacgcgtagatggactggtcggaatcgcccaccacggtgatccaggcggggccggacttgccggcgttcggcgcgcccgggatggccttctcccccgtgtccacgccggccagctcgcgcacaagcacgtactgggcgtggttggtgtcctgatactcgtcgacgagaatgtaacggaagcggtgatggtagtactcggcgacggccgggtcggtgcgcagcaactcgaccgtgcggccgatcagatcgtcgaagtcgacggcgttggccagggccaagcgatgctcgtattcggcgtagatcaccgcatagatggcttcaaggtcgcccaccgtgccgaactggtagccgcgctggccaggcgtgaagtcgggcgcgtgaacggcgaggttttccttccaaccggtcagattgttcttgaggtcggagatatggccgaggatcgagcgtggagtgtagcgcttgatgtcgaggttgaattcggtggcgatgattttgacgagtcgctcggagtcggcggaatcataaatggagaagccggacttgagcccgatggacttgccgtcgcgcctcagaatgcgcacgcaggcggaatggaaggtggagacccacatgcgctgggccaccgggccgatcagcgagccgagtcgttcgcgcatttcggcggcggccttgttggtgaaggtgatggccagaatctggctcggccatgcgccgaactggctcaagatccaggcgatgcggcgggtcagcacacgggttttgccggagccggcaccagcgccgatcagtagcgcctgaccgcggtattgcacggcttccgcctgctgcgggttcaggtcgcccacgagttcctgtgcgctgcgtgcgatgacttccggctcgtcgtacactgttgcctccctttgaatcgcgacattcatgtttaccacatgcacgggtcagcgcaggacaacgtacacttacaagtatccatatcattcactgacatacagcaatgggaggtctaatgcaggaacttgaggagcgaatccagagcgagggaacggtgaaggcgggtgatgtgctcaaggtggacgcgtttctgaaccaccagtgcgacgtgcgtctgttcgaccgcatgggttcggcatgggccgctcatttcgccggcaagcacatcaccaagattctgaccatcgaggcgtccggcatcggcattgcgtgtgtggcggcccagcatttcggcaatgtgccggtggtgttcgccaagaaggcgcagtccatcaaccttgacggcgaccagtacaccaccacggtctattccttcaccaagcagaaggagttcccggtgatcgtggccaagaagtatctgaacgccggcgaccatgtgctgcttattgacgattttctggccaacggcaaggcgttgcgcggtctgattgacctgtgcgaggcggccggtgtcacggtcgagggcattggcatcgccgtggagaagggcttccagggcggcggtgacgcgctgcgtgccgaaggctacgatgtggattcgctggccatcgtcgagtccatgaatcccgagaccggcgaaatcacatttaggcactgagcacattgactgctcccgccagcgggagcaacagagagaagaaaagaatcatgtcagagaagaaaaccaagaattccatatcctttgaggcgctgtcttcgctgaacgcgccagtatccttctggaagggcattccgttcggcctgcagcatgtgatggccatgttcgtggcgaacctcgccccgatcttcatcgtcgcctcggccgcgaaaatgaccccggcccaatcggccaccatcatccaggccggccttctggtggcgggcctgggcacctgcctgcaactgtacggcgcgtggctcatcggctcgcgtctgccgatggtcaccggcatctccttcacctacgtggcggccgccgtggcgatctgcgcagacaagggctatggcgcagtggccggcgcggtaatggtcggtggcctgctggaactcgtgctgggtttgacggccaagtattggcgtcggttcgtgccgcccatcgtctccgccatcgtggtcacgtcgatcggcttctcgctgcttaacgtgggtgccacgagcttcggcggcggcagcggagccaaggacttcggaagctggcagaacctgacgctcgggcttatatctttggtcgcctgcctggcgttccagctgttgatgaagggcacggccaagcagctgtccgtgctgttcggtctggtggtcggctatgtggcggctatctgcatgggcaaggtcgatttctccggtttccagaacctcgccatcgtgtccgtgccgcagttcatgccgttcaagcctgagttcgactggggttcgatcatctccatcggcctgctctacgtcgtctcctcggtcgaggtgctgggtgacaccgccgcgctgaccaaggtgggcctgaaccgtacgcccaccgaacgcgagaccgcgggcgccatcgccggcgacggcctgatctccaccgtatccggcctgttcggatgcctgccgctgacctcgttcgcgcagaacatcggattggtggccatgaccaaggtcgtcaaccgcaaggtgattctctccggcggactgattctggtgctggcgagcttcgtgccggccatcgccgaggtgttcaactcgctgccgcaggcggtgctcggcggctgcacgatcatgatgttcggcaacatcattctttcgggcttccagatgatcgccgaagcgggcttcacgcagcgcaacatcacgattgcggcgctttcgctgaccatcggcatcggcttcacccaggtgagcgacatcttcgcgcagttcccggcactgttccaacaaatcttcgcctcgaactgcatcgccgtgtcgttcgtggtggccgtaattctgaacgccgtgctgcccagcgaggagcacttcctctccgcgcccaaggaggcaccggccgcagacgccgagtgataacaacgcgacatatcagctgcgcataatcacatgctgatgccctatcgtcttgcaggatgatagggcatcattgattttgagagagactacaagttgaaccatgagttcgagccggtggcgtgtcgatcaatcgacatcttcccattcgaggatgtctccgggttggcagtcgagtgccttgcagatggcgtccaatgtggtgaagcggacggctttggcacgtccgttcttcagaatggacacgttggcgggcgtgatgccaatttgttcggcgagctcgccgacgccaatcttgcgtttggccatcatgacgtcgagattgatgcgaatcgtcatctcaaatcacctgctcgagttcgcgcccgatccggacaaggagaacagtttccatacggccacgaacgccgcttcgatgcagagcaggaacagcacgcccataatgagacatgaccagtgcatcgacgtctggctcgggcagaggccggccagcgcgccgctcaatcccggtacggcgaatagttggccccataggcaggccagccagaccagaatcacgatggctttcaacgcgagcaacacccatcggttcatgtagtttttcatagcccggtcctttcaggtgccgacgtttttggcgacaccgcgaacatcgatatgactatatcgaaaaacgatataccttgcaaggcgtattgcgtcaaccggcattggtcgctcatatgcatataggcttcggcagactgtcagcagaccgtcagctcaacggaacgaacgccatatgagccacccattcgcgcacgagcgtgatgacggcttcgggttggtcgatgtgcgcgttgtgaccggcattgtccagcgtcacgaaggtggcgttgggatagtgcggcaacagggcttgctggtcttcgtatccgacgatctggtcttgcttgccggtgacgatgagcaccggacccgcatatgtgccgagcatttcctcgggattatcggccagccaataacgctgatccagccgttcgcatgccgcacggtcgcacaacgccacgccgggcaggatgaaccgttggtagcgccgccacgcgtcgaatgactggttgacgcccatggtaatgaaatcgaacacctgttcctgtggcaaggagtgcgtcagcttgggattgggctgtgcaaccacatgttcggccacatgccggccggcatgctgcgggtccacgaccggcgcgatcaatgccataccggccactcggcgaggttcgcgcgccaatacttcgcggacaagcgcaccgcccatcgagttgccgaccatggcgaatggagccgctttaccgacaaggccgtcaatggccgtttgcagccaatccgccatttccggcagcccgcaggcatgctcgggcaatgccggcgtacggccgaaaccgggcagatccagatatatacggcgaattgaatcattgccgtcaaacgccttgtcgagcatcatcagcgaacgatggtccacacccatgccatgcacgaacacgacgggcaatccatcatcattgccctcaatcgcgcagtacggctgcaattgtgccatgtgttcctctccttcaacccggtacaaatcgcctttcacacaatagcggcagcagctcccctggtgtcggagcaatcccgaccgccattctcggtttcgaggggctgatttcgtggtttggggacatccacttccgtttcaaggggctggtcattggccaaaacccaagtacgaatggcttcatgccaacgtcatttcgccgttttggagctgtcgctactcggccatcagcccctcgaaacggaagtggatgtctcggaacgagcaaatcagccccttgaaacgcaaatagacgattgcgaatcgacttatcagctgcgtcgaacttgcaatagagatgtcggtgtatcattccccggtctgattgcgcggatgtcaggaagcgtgaagaattgtcacaaagtcgcgtgatggcgcagccgccgttcaggtggatatgccacgctgtcatgatgacggccgagccggaacacgacaaatctcgcatgctgcataggccagccggtcacggtcagccatgacaccgaaatattggaggcgcaatgggacaacaggtgcggtgcggcagacgccgctcccatggcgcgggcgcgctgattgcagccgtcatacttgttgttgcggcgctgatcgcggcatggacgctgctgccacggctattcacgcctcacgagaccgcgcgcacggccgaggaagcatattgcgcggcggtgtcgcccgacggagcccgccgcaccttgacgcctgatcaggcgcagaacgcggcgctgattgcgaacatcgccgtcacgcgcggactgccggatcacgcggcgacggtggccatcgccacggccatgcaggagtcgaggctgacgaatctggactacggcgacttggattcgctcggcctgttccaacagcggcccagccaaggctggggcacggcggagcaggtgtccgacatgacctatgcgacaaacatcttctacgaccatctgctgcaggtgccggattgggagacgattccggtggaggacgccgcgcaggaggtgcagcgctcaggctacccggaactatatgccacatgggatgcgatggcacgcgcttgggcctcggggctgaccggcgaacggtcggcgggcgtcacgtgcgcgttggagccagcaacctcctcggacgcggacgggttggttgccgccataagcgctacactgccgaatgtcaaggtctcggttatgcccctaaatggcaaaaccggcacgaacaacggcgctgcgaccaatacggccagcacaacgttgacgatcacgctgccggacggcctgtccgccgacaaccgcactcgactttgctggcagacggcagggtggctggtcacacaggcgcatcaatacggcattgatgcactgcacgcggacggcatggattggaaccgcagagccggcacatggaccggcaccgaaaccgccgagcagaccgtcaccgtcacgcttgcgtgatgtgacctataacgccgtcgcgaccacaaatccgactgactggagcctacgccgtcgatgctgcctgaggcacgacacggatatgttttttactcgttcgaatgagcccaatccacgacggcttcgatgttattgccatccgggtccagcacgaatgcggagtaatagccgggatggtacgggcgcggaccgggagcgccgttgtctcggccgccggcggcgagcgcggctgcatggaacgcctgcacggcttgctgactgtcagccaggaacgcgatgtgtgtgaccggcgtgaccggcgaagcctccgcctccagcccttcaatcggtgacacgtagaaatcggagtgcagggttccgtcatccacgccgaatccgagcgtgggctcatgatgcgccttgacgatatagccgagcggtgcgagcgcctgtttgtagaatgtgatgctacggtcgatgtctttcacgtgcaacgtcagatggtccagcatggtcttggtcaccctcccctggttcttgtattcgattgctgcttgcagtgtaagcccgaacgtttcccacagggccgcgcatggctatgatgagagcaatcgcacgtcgagttcgagacaatattcaaaacgaatccaaggcaatagggggaatgatgatgaccaaggcactgattgtggtggatatgcagccgacgttctgtgaaggcggcgaactgggagtcgaaggcggcaacgcggtcgccgagcggatcgccgattatgtgaacgcgcatcgcagcgagtacgcgtatatcgcaaccacgcaggactggcatatcgagccgggcgcgcactggtcggcggaaccggatttcgtggacacgtggccgaagcatggtgcggccggcacgccgaacgccgaattgcatccggcgatcaaggcgctgattatccatcatcatttcaagaagggccagtattcggcggcatattccggttttgagggcatcgaggacaataccgaccgtatccagacccgtgaggaggttgcggccgagcaatccgccggcaagacgctggccaatgcgctgaaggccgccggcgtgagtcgcgtggatgtggtgggcatcgccgaatcgcattgcgtcaaggacaccgcgctcgatgccgggaagttcggtttcgaggtcaccgtgttcgaggacctgaccgtaccggtcagcgaggagctcggtgtcgcggcccgcaaacagatgacggcggccggcatcacattggccgagtcccgctgatcaggccggatatacccagagcgaacgcacgaacacttccgtatattcaaggccgacactgccgcatagtcgcctagtcgatatgtgaagaaggcttttatggttacgatgctgctgacttcgatattccgcaacgcctcgtccgccgtgcatgaagtcgaaccgcatccgcaaggcaagcgggtcgcgttcatcccgacggcgagcgccgtggaaccgtgggggccggttcactcggcgttgagcaaacacgcgctgcaacgcctcggtttcgaggtggagcaactggatgtggaagatgtgccgagcgggtccgccgaacgcgtcacgcgtagcatcgccgaggccgactgcatctatgtgggcggcggcaacacgttctttctcctgcaggagttgcgccgcaccggtgccgaccgggccatcatcgagcaggtgcgcgccggcacgccgtacatcggcgagtccgcgggctcggtcatcacggcacctgacatcggctatatcaagctcatggaccgcacggacaaagcccccgatctcaccgattacgcaggattgggcttggctgatttccgcgtggtcccccaccatcatgcaacggccatgggccacgccgcacaacgcattctcgaccggtatggtgccgatctcagtctcaagcccctcaccaaccggcaggccctgcttgtcaaggatggcaaaacccggctgctgcgatgatgcgggtcgtcggcccgtcgcccattcggcatcgccgtggtgtgtccggcctgacatgcctatcgagcggcatcaatcacacagcaatgtggctgggaacctcgccgaacgtcaacacctgcatacatcagcacggcaaaatctgccgaaatcgcccggcgcacgagatgccagccggccccatccgtcacctcagtgccgtaccgggccaggcatggccttgagcaacgggatgaatccggcgcacagtaccagggccacgacggcgagtatctgccagtgggcggagccgagccagccgccccacgtgccgacggcaccgccgatcgcatacgcgaacctggcacggccgctgaatttggccaggtcaccaccgctcagcagcagttgtcgcgatacgatcacgccatgcgccagcaggccatagccgaggttgttgatgagccatccgacgcacaccgcggcaaactcgggaaccagtacggcggcaagggaaatcgccgtggcgattgccccgatggcggacacggcgcgcatgccgagttttgcggagagccgcatgtagacaaacgatccgacgatgctgcccacgccgccgaatgcgtagaccacggtcagcatatcgctgccgtaccgggagccgatgcccagcaacgcatagcttgcccacagcgacggaatcagcgcaagcagcagcgatgcgatcagcagtctgacccgggtcaagcgggtgaccggagtgcgctgcggcgcgtgtgacgtgtcggccgccgtggattcgtcggcggagccgtcgccgtcatcgccgcccgcaccatcgttgccgaatcccggcatgaactcgcgggtgcggaatcgcgtcagcgcgcaggcaaatgacagtgccgacgaggtgagcagcatggccatgatggaggcgttggccaaggccgatccggcaacctggcccagcaacgtaccggccacgctggcaatcacggcgacgtagccgctgtacttgacgagcatgtcatcgtcgtcgccggccgcatccacctcgaacacttcggaggccacgtcgatgacctgcccggtcatcagcagcaggcatgacagggccagcagcagccacttccaatacgtccaaccgttgggcaccagcgcgaccgccaggcacagtacgccttccacgccctccgtggtcgcaagcgaacggaacgagccgaaccgctgcacgatccatgcggataccggagaagcgaagtcgatgaccagattgaacgtcttgcggaacgcgatcacccatgccggcagtccgacgatcagaatcgaaggaatcaccgacccctcgaaaatcgcgttggacagcatcgaaaacgtcatacccaccaacgcccatcgcaacgccctgctcaataccgacaatccgcgcataccttagttccttgtccttgccagtgtaacggaattatgacttctcaatcgtcccccccccgctgtctaaatgaaagtgcaacaccctttcactggttatctggacaatctccaatctaaagggtgttgca

SEQ ID NO: 2793 - DNA, 13887 bp, Unknown
  R36_18m  MAG No. k141_18697
aggcgcgggttggcgagcttgacgaagcgacgcggggtcacgccgttggtcacgttggtgaacttgtccgggtagacgtcggagaagttcttcagggtgacgtccttgagcagctgggagtgcagctcggcaacgccgttgacgtgggagccgccgtaggtggccaggtaggccatgcgcacggcgtcgccggtgtagatggccatgtccttgatggtgtcggcggcaacgcccttggccttgagctcggcctcgaactgcgcgttgatcttctcgataatctcgaggtgacgcggcagcagctcgccgatcaggctggccggccagacctcaagggcctccggcagcagggtgtggcaggtgtagttgaaggtcttggtggtgatggaccacgcggtatcccagtcgtagccgtactcatcgatgaggatgcgcatgagctcggggatgccgatcaccgggtgggtgtcgttgagctggaagacgatcttgttcgggaaggtcgtcaggtccggcttgtcctgccccgggtagaagacgcggatggcgtcgtgcagggatgcggagacgaagaagtactgctgctcgaggcgcagttccttaccgaccttggtggagtcttccgggtagagaatcttggagatgttctcggccttgacctgcggggccacggcgtccatgtactcggaacggttgaaggcgagcagatcgaactcgtcgtagctcttggcggtccacaggcgcagggtgttcacacgctgggacttgtagccgggaaccatgtagtccaccggcacggcgcgcacggaccaggccggttcccaggtcttggtgccgtcggcgttttcgacgaccttgccaccgaaggagaccttctgatcacggttgtagtcggtgtggccccacggctcttcgttggccagccagtagtccggggtttcgacctgcttgccgttctcgtcgaacttctgcttgaagatgccgtacttgtactggatgccgtagccgaaggccggcacgccgagggaggcgagggagtcgatgaagcaggcggccagacggccgaggccaccgttgccgaggcccggctcgtattcgacgtccacgatgtccttcggcttgaagccaagggcttccacagccttgtcgaactggtcggtcaggccagcgttcagcagtgcgttctccagctgcttacccatcaagaactcggcggacaggtagccgacggccttggtgttgccgttgacggtgtcggcctgggtcttgaaccaggagtcggcaaggtggttgcgcacggccttggatgcggcgacatacacgtcagcaggggtggcctgctcggcggtgacgttttgagtgtatttcagttgttcacgaatctcgtcggcgaattgttccgccgtgacaggagacttcggtgcggtgatttcggtcattctgactttccttccgggataagtgcccgtgtttattatgccgcgcgataggtatcgtcgcatagacgtaagcatgaactctccgtaacgacgatggcggagcgttcttgcatacgttctcattgagagcgtatcacatatctcacggttccgcatcctacagtatgccatcgtttgcataccttgcggtttcgcgtgccggtgccatgatggagcatatggcagtaattctcgaaaaagacttgaaacgagggcacgacgcactggtgcaatggcgtgccgcagccctggaactggccgacaacacaccacatcgcctgaccacctcccccgttctgccgcgcccggtgtgggcgatggctgtgcgctactcgctgttcctgctggagcggcgcgcgcccggccctggcgtggaggtgcgcgttgcgccgtggggtgcggtcaaaatcctggacggcccggaatcggacccgcacaacctcactccaccggacgtcatcgaactggagcccgaggtctggctacggctggcctgcggcatcaccacgtgggcagaggaaaaggacgccggccacatcagcgcggtcggagagcgcgacgatctgagcgacctgctgccgctgtaaatcgtcggatgcccggtatcggatgccctttatcagaactgtgcgatgctccaacgctggatgtgctcggcccagcggtccggcgtgggtagggtgatgaggctgcgcatcgtcagcgcgtaagcggcggcagctaccagcacggcggccagaatcaggcaggtcggaccgtagccgatggtctgcataccccagccggcgagtgccacggccacgccataggcaccgtactgcaacaccatgctgcccgctccaacgcggccgagcttgtccttgcccaccaaggtattgctgaggcctccaagcaccgcgttgcccgcgggcaatgccagtaccgagcaggccacaaatatggccttgccaaccatggagggcaccaacgcggcaccggtgaatcctacagccagcaagacgaacatcacgcccaccagtacgccgccgggcacacggttgaccagttgcgaggccatcagtgcgcccagcaacatgccaacggcggaggcggcgttgatgaatccggcggatatcagctggctgccaccttgggagatgtccagcgcggtcagcagtaggaaggcattgctggcaccggtcaccatggccgctgcgatgatgagatggcgttggaaccggtcgcgcagcagccagatcatgccgtccagtgcgtcgcgccagcgtggggcggagtcatcggcatcatcggcgtccgagacggccccgacctccgaaccggtatcaacattgcccggacggccgctatcgctcacagtcgcacgtttccaatagcggcggatacgccatgcggacaccatgcccagcacgctcagcaccgcgctggtcagaaacggcaccgcatgtcccacggtcatcagcagaccgcccaacggaccacccaccaacgtgaccgtcgaatcacgagcatcgttcaacgccatcgcgtgaggcagctgctcatccggcaccacgccacgcagcatggcattcgacgtattctccaacagcccatcgcgcaccgaaaacagcacgacgatacacagcagcgcgatcggaagcacgtgggcatacggtccgccgaatgccggagcgtttgccccgttaaccccatggccgctcgtcttcggcgcattgccgaacagcatcaccgctgtcgccgccaccgccgagagcaccacaccggacgcaccccagatcagcatgagcgtacggcgatcataccggtcctgaatcacgccgccggcaaggcccagcaccgtctgcaccaccacgcagatgctttccgtcgtggtggcggcggcagaggatcctgtcgtggcgagcatcatcagcggcaccgcgaacgcgatcaggctggcaccgaccgcaccggacgtgtccgcagccagccaccatccgtaatcagttccccgccataattccgtatcacttgccatcgttgccctccctgggattggtccttatggacgccaccatagggagccgccgccgagcagaacacccgcaatcctcggttatggggacatggctgcggtcgtcgtcctcatttgtgaggacagggcacaatcagcgccggacgccggacatcgcagcttctgccccatcagccccgcacgcacgggatacgcacatagatcatccacgtgccatcatccgaacgggtggtcaattcaccgcccaactcctgcacacgggtgcgatgcatggccagcccacgccccgaccgctcctgcgcggacaggccattctgcgcgtcggcatcgtcacggatatcgttggtctcgcgaatctcaatccattcgggagacagggtgacgaacagcaggtaggaatcagctcccgccggtgcatggcggcggatattcgtgccgatctccgtcatcagcgacagcgcctcggccgccgcctcggggtccacgaccatggcgatgccgttgaccgcggccgtcccccgatagccctgcgcctccagaaactcctcggtatcggtgatctgcgccttcacacgcgtgacgaaggattgcggcatgcccgctgtggattgcgtacggtcatcgccaccggcgttctcgggcacggcattgtcaaccacctcattcgcaatcgctggacagctcccggtgcctaccgggtcacgagccaaggcggattctttcgtcggcgaatcaacctgccctgattctgcagtcgccacctcagatgtcccggtgccaccgaccggcaaggactcgtcccggaagccggcgtccattccgctctgctcggtcagaaaatcgatgatgccatgcacttccgcaaaggcacgttggctgcgatccagcacgcgctgccagtcgccaccatcgatgccggctggcgcggccagattattccgggcgatggtcgagatatacgtcagatcgttggacagcgtgtcgtgcagttcgatcgcgagctggttgccgtggcgcagatcggccagcgccgattccatctgctcgttttcgttctcctgattcaccacgcgcttgcgccagcgcaacgcaatgcccagtaataccagcagcacgcttgccgtcaacgccgccgacgccgtgaccagccacgacccggtcaccgcatagacgatggccgccaccgcaagcacaccgatcgggccgaacatcgccagcggatgattgagttctatatcgatatcaatctgatgatgcttcttgccgtcggcgtgaccatacgaatacgacgaatgccgcggaatgataatcggacgtttcaccggcccgctccccttatgcgccttgcgcttcttctaccatgtccccacacacccatcggcgccttcatcagtgcaggttcatgcgaatccatgcgccgataagttccttgagattgccagcgccgagcttgtcggccgcacgcatcagatgcgtgcgcacggtggtttcggtgatggacagttcggcggcgatctgcggcatggtccggccgcgggaccacagttccgcaacctccatctcacgcgcgctcagccggttgtccttctcggccttgatgcgcgcggacgcaacggccgcggtctcgaaccgcacgtcgccaccatcgccccatattttgccggtctgcacctggcggatagccacggcctgcaatcgcacatcatcgttcttgctcatgatgccctgtacgccggcccgggccatctcctgggcatgtcggcccacaatcgaggcggtaatggccagtatcgccgtggtcgcgttttccctgcggattgcacgcaccacatccggaccattgatgtcgttcatcgcgatatcggccaatagcacagcaggcgggtgtttggtggccgtgcacagctgaatggctttgctgccttcgctcaccggcggcaacaattcgaagtctggcagggccttcgacaaaatcgactgtaatgccatcagggccatgcggtcgttgtccatgatgagcatggtgggccttggcccatcctgcccgctgatatccggcatatgcctacgtgcgctcagctcttcttgggcttgagcgcggaaggcatgggcatcggaatcggcttacggggagccggtttcggtacattgaccgccttcttgggtgccgatgcggggaattctccactggtcgccttggctgccgcttcggctgcccacttggcgtactcgtcgaggtcgtcctcctgcgcggcgggagctgcctcggcggcaccggaagcgtggtcgtcagcagcagaatccacatccttgtccgcatactggtcatccatgtcggcgaacgggtcaggagagcccgttcccggctcctgctcgcttagctcttttgccagctcatcgtaatcggtatcggtggtcaggtacttgagctttcgggcaattttctgctgttttgctttttgacgtccgcggcccatctgaccccctgcgattactgtgctgttcgattcatcaacaatagagagtaccactaatagtggcttgttcgttgtcggctcacacttttaccataaaaagcgtttatctgagccctatttaaaggattttcgcatgaccgacgagcagcaactgacagcggcaggcaatgagataagcgcgagcttcctcgcggccaaaaagcgttcggacgaaacgctcgccaagctggaggccaagccgtcgtccttcaccatgttgaccggcgaccgtccgaccggccggctgcacctcggccactacttcggctcgatccgtgagcgtgtcgccatgcaggagcgcggcgtcaacacgaacatcatcatcgccgactaccaggtgatcaccgaccgcgacaccaccgagcacatccaagacaacgtgctgaacctggtgctcgactacatggccgccggcatcgatccgaacaagaccatgatgttcacccactccgccgtgccggccgagaaccagctgctgctgccgttcctgtccctggtcaccgaggctgagctgcaccgcaacccgaccgtgaagtccgagatggaggcgtccggccacgcgctgaccggcctgctgctcacctacccggtgcaccaggcgtgcgacatcctcttctgcaaggccaatgtcgtgccgatcggcaaggacaacctgccgcacgtggaaatcacgcgcaccatcgcccgccgtttcaacgagcgttacgccaagaagaacccggtgttcccggagccggccgctattctgtctgaggcaccggagattccgggtctcgacggccgcaagatgagcaagtcgtacggcaactccatcatgctgggcgccaccgccgaggagaccgccaagcttatcaagaagagcccgaccgattccgagcgccgcatcaccttcgacccggttgcccgcccgcaggtctccgccctgctgaccaccgccggcctggtgaccggccgcgacccgaaggacatcgccgaggagatcggtgattccggcgccggcgcactcaaggcatacgtcatcgaatcagtcaacgagttcctggccccgcaccgcgagcgccgcgccgagctggccaaggacatggactccattcgtgacatcctgcacgacggcaacaagcgcgccaacgccatcgccgaggagaccctcgaccaggtgcgcgaggccatgggcatgaagtactgattttcccgccgctcgtagcaagacgccgtgtcagccccaactgggcaactgacacggcgttttttgtattgcggcgtctgctgtgtcctatcttcacttcgaggggcggatttcttgttttccggaggtctatctccgcttcgaggggctgttgctcaagtaggcgaggcacaaaaacggcggaatgacgttggcgtgaatgggattttatctgagattgagcgcatgaccagccccttgaaacggagatagacctccggaaaggctcaaatccgccccttgaaacggagaatcaagcgttagtaactctcaattcaaaaaacacaacatgttttccgtgcaacgcggctatcaagacggacctctggtcacttcatgccgatggcttgcatcaatacgtacgctccccgcacagcaatgtcattacgacgtgttgcggcatagcgcgcatggcttccggagtatcggcggcgtatgggtcggcgtccaacaacaccatatcggccgggtcgccggatgcaaggcggtcacggccagtggcggtcgaggctgccagcgaggtatgcacatcgaggcactgctcgggctggaacggctcgcggtcagagctttcggtgccgagcacggcggcggaaatggccagccacgggtccagcggggccacgggcgcatccgagcccatgcgcagcgtggtaccggcgtcgtggagggccctgaacggataagggataccggccgggttggcccagaaacgggtgatgacgtcgcggtcatccatggcgtgctgcggctggatactggccgcgagccccagctcggcgaaacgcgggatatcgaagggtttgagcatctgcgcgtgctcgatcgatccatgtgcgtgcgtggcggcgactgcgttgagcgcaatggtgttcgcttcgtcgccaatggcgtggcaggcaatgtcgaagccatgctcggcggctaggcgcatatagtcttcgatttgctgcggcgtgtagctcagcgtgccatacgtcggcggctcgatgcccgaatacggcgtggagcagtaggcggagcgggtgttgagcgatccatccgagatgagcttcatggcgcccacatggccgagcccggcgctgcccggcagtgggttgccggtatgccaacccgcgtcaatggcggcttgcaaccgctcggggtatacaccggcgtccacgcgcaaaccgttaatgccggccgcgaaacgattgatccacgtatcgatgttttcggccatttcataatcgcggatgcccaccacgcccttgcttgcggcgtcctgttcggcctcgcgcagcagacggtcagtctcttcagcagcgcccggcaccttgtcgaaggcggtgtaggcgttgaaccattcgagttcaccgaccagaccggattcgtccacatgtacgccaagcctgcgggccgcggcagagttcacccatccacagtgcatgtccgcgctggagagggccaccggctgttcgccggtcacggcgtcaattgcagccagtgtgggctgctcgtcgtcggcccacagcgagtgacggaatcgcatgcccaccacgaaggcatccgggtcaagcgtgccggcggcgcggcgctcatccagatgacggcgcaacatgtccatcgcttcggcggcggaacgggcattgatgaggtccagtcggcccagcgtcttagcccattgcgtgaagtgcgtgtggcagtcccacaggccgggaataacccacaggccgtcggcgtcgatggtggtttcgtcagcaggtgcggaggccgacgttgggattgagacgctgccagaagcaatggcattcgtcgcgtatgccaacgatgtcgtatgcgccttagtctgcatcgtgccgtccgaagccgagaccgttccagcagggccgacagacgcaacaaccccatcgcgaagcaccacatccacgcggtcctgagaccccggaacaccggcattgacaatacgcaccaagctactcatacccgccatcatgccacctttgcatgaacgccatggagattcgttcaagctgaatcgcgccgtcggcggcgattcccgctggctgcctgcaaacccctacgttccatgtaattgcgggatggcctgcaactgcgatgaacacccatagtttatccaccgacttatccacatttatccaccgaaaaattggggcggtagacagggccggtagccggaccctacactgcgaggacaaagcgaacatcacgaaggggtgatcatcatgggtagctcaacggcattgaccgagctgacaatgcagaagtatcaacgaatgcagacgtgcgcagatgttcaacgacgaagcgcatggcgcccaccctatgccctgacaacagcgttggagcttttgtcaattgaagtaccccgcatatcaagcaaacacagaggccttgcaactacaaccattgttgcggttccacacgccaatgacaaacggcacattgtgggggtcaaagtggttgtatggcctttcccactagacacggtcataatcgagggacaattcacatgcacttcaccagcttgcacatgggccatgttctccgcgtatctcgaacttgaagaactcatcgttctcgctgattccatgatgcgacgagatcgaaggctctgcagaacaaccatcgacgccctttctctgtatctcgatgaggccgaggcccaggtgcgagccgacaaagagaatggcaccaattcgtatttgttccgcgggtataacaaatgccgtcgcgccctgcttttggcgcgcgcgggcacagattcctccatggaaacacgaactcgtttggttctcttgaaatacggtctggattgcccgcaggtgaattatccaatattcgtaggaaacaacaccagacccatatatctcgatcttgcataccctgaattcaagatatgcatcgaatacgaaggctctcatcatgccgggcaatggctgaatgacgcgagacgccgccagatgatcgaagacgctggctggaagtacattcaagtcaccaaattagatattggcgacgaagcgggagaagaggcccttgcccgaagagttgccgaaaggatacaggaggttacgggcaaaacggtccagctcacgatgcggcaaaccacccagcaaattagcgatgtccgaaagctacgccgtattccgctgtacaaacggctgaaattcgagcctctgctgccgattattccgacgacgcaggaataataagcccggtagagtcagtccgcaccgtccgcaccgcgctacggtattcaaaacccatttcaaggggctgatttggcctccgccggaggtctacttcggtttcaaggggctgatcatccgctagatcacgtgtatcaatgcccttacgccaacgccattccgccgttttggagccgcgtctactcaggcatcagccccttgaaacggaagtagatctctccagaacgtcaaatcagcccctcgaagtccgttttggcctcaatggttcctgccgaaccacaaaaaagccactcctctgccatacgagccgaccgcacagcaggcacgtgtcatttgccgctgcggacctcggactccatggcttccatgggctcgtcgacgagcacggtgccggacggcagggtgccgggcagcggatcgtccatgtagtggtcgaattcgtagagcatacgctcgttcggcttggcggtcagcaacgaaaccaccacgatgaacagcagcgaaatgatgaacgccggcagcagctcatagatggcgaatacgccacccaagggcttgacgaggttgtgccagatcagcacggccgccgtgccggacagcatgccggccacggcgccggccttgttggcgcgacgccagtatagcgagcacagcatcaacgggccgaatgaggcaccaagcccggcccacgcgtaagacaccacctggaagatcgacgagttctggtcgtatgccaccagaatgccgaacaggaacatgaccaccagcgtgaccctggccacgatcatgacctgcttgtcggtggccttgcggtgcagcagcccgcggaagatgttctcgcccatggccgaagcgccgatgatcagatacgaggagctggagctcatcgaggccgcgaaaatgccggagaccaccacgccgcacatgaagctcggcagcagggtctgcgccagcacgatgaagatggtttccgcatcggtggaggtcagcagttcggtgggcatcatcgcacgccccaccaagccgatgcacactgcgcaacccagcgaaatcacgcaccaggaggtggcgatgattcgggacttgcgcacttcttccacgctgcggatggacaggaagcgcaccagcacctgcggcataccgaagtaacccaggccccacgccagcatggagatgatggtgatgatgccgtagtcggagggcgcgccgaacacggccttgcccgcctcgacgagctgctggccggtggccgggtccagcttgggcgcggccacctgcgtgccggacaggtagccggggatggcacgcaggaattccacggtgttgtcgatgccgcccgcgctggccacggtgccgatgaacaccaccgcgagcgcgaagaacatgagcatgccttgaatgaagtcggtcatcaccacggacaagtagccgcccaccacggtgtagacgaacacgaccaccgcgccgatgatcatcatgacgtggtagtcgaaaccgaacaacgtggcgaacagcttgcccacggtcacgaagcagctgcccacgtacacgctgaagaacaccaggatgatcacggccgcgatggtggagaccacgcccttcttgtcatggaaacgcttggcgaagaagtcaggaatggtgatggcatcgccggccactaccgagtagcggcgcagtcgccgggccacaagcttccagttgagataggtgccgagcgccaggccgatggcggtccacatcgggtcggccgcgccggtgaagtaggccaggcccggcaggcccatcagcagccagccgctcatgtcggaggcttcggcgctcagggccgtgagccacggccccacgccgcgcccgcccgcaaagtattccttggaggaggagttggagcgtttggagtagatgaatccgatggacagcatggccgcaaaatagatgaccatggccagcagaatccagaaatcgttggccaactgcgacacctccccaatcatgacgccaagcggctaccgccatggcagaactatgtgctgatatgcgtgctgatatgcgattgacgccggagcggcgtcatacagaccgtcacagccgtgaatacggccgcaacgcacttcgcctgatggtagtggatacaagggctcaagcaccttccaccgtttccatactgagacgctgttttatccgagctccccacctgaggggagccaagatgacggtcagatgtcgtagcgccaggacttgtcggtcaccacgcgggccatcgccaaaccgatcggcagacagataatcaccatgaacgcacggaacgcccagtccagcgcattcatggtctggaagctgccgaggtaccacatggcacggtacatatacagaccgggcaccatgatcacgatcgacggcacggtcaggcagatgcgcgggtagccgaggtgcggcggtagccagccacgtcgcacggatgaacgccacgccgatgccagaatgcccgccaggaacgcgccgatgaaggtagccatctcgggtgccacgttgaagtcttgcaattccaagcgcagcgtgtccgtgatcgcaccgatcagggcggcggccaggcacatgcgctgcggcgaattgaacagcacggagaagccccacacgccgacgaacgccgccacgaaccgcagcaatccgttgacccacgggtcaagccccagcggttcaaagccttccgggtgcaggtgcaccatcacggccacggcccagcctgccagcgtggccatcaggatgatgcacagcacgtacgccacgcgctggatgcccgaggggaagtcgattttcgccatgtcgagtccgccggtgatgagcgggaaaccggggatcacgaacagcatggcgccgatgtaggccgtatcgtgcgagagcgcgactgggtcgaaaatgccgatgagtcgcagggtgccggtgcaggcgagcgccgccgcggccacgcacacaaaggtgacgaagaactggttcagatggtatgcaaacagccggcgacgcatccactggccaaggcccgcgcccacgaacgcaccgatcatgtcgtatgggccgccgccgagcaggaacacgaaggccgcgcaggccagggcggaggccagaccggagaaccacggcttgtacagcggcttgcggcgctcaatcagatcgagtcgctcgtgcgcctgccgcacggtgataccgcccttggccttctcttcgtcggagcgctcgttgaagtgttcggcgtattccttgggcacgcgattcttgcgcttcgtactgcttgcagcagggctttcggcggttgcgccgttcgccgccgcgccctcagcgcccgcctcggcattcgccgcgttcgccgattcaaccgactcattggagtcaccggtaaacacttcggcatcgtcgtaggccttctcttcggccgctttgtcttcgaccg

SEQ ID NO: 2794 - DNA, 12814 bp, Unknown
  R36_18m  MAG No. k141_18706
ccagcgggaaccattcgtttatcgttcgagtttttgactcaccacggctgttacgccatcggctctcatggttacgccgtaaagcgcgtcggcaatcgacatggtgcgttgctggtgcgtaatgatgatgagctgcgcatgggcgcgtagctcattgaacgcattaatcaaacgggtcaggttcacgtcgtccaacgcagcctcgacctcgtccatcacatagaacgggctggggcgggcggtgaaaatcgcgaacagcagcgccagcgcggtcagcgaacgttcgccgccggacagaagactcagctgtttgacgcgcttgccggccgggctggcctcgaccagtacgccggtggtgagcatgtcttccgggttttccaggcgcagtcgtccggtgccgcctgggaacagcgtggcgaacatctgctcgaatgcctcggcggtatcgtcgaacgcggatttgaacacctggaccatcgtggaatcgagatccttgatgagctgcatcaaatcgtcacgtgatttgaccacatcgttgcgctgatcattgagatacttgttccgctcctcaagcgcttcgaattcctcggtggccaaagggttgatcttaccgagtgcggccagatcgcggcgagccttatcgagacgcttcttctgctcctgacggttatacggcacggtcttaaagcgggcggaatcgccgttggtgccggtctctcccccggtttctccctcttcggtcccagcctcagcttccgtctcatccaacggcacagggttgccctcatcatccagcacgggcaccggctgttcggggccgtaaccactaaccaattcctccaaagtgagaccgagttcgtcggacactttctgcatgagctgcccggattcggcggccaaccgttcgcggtttacatccaaggcatgttcgcgcccggtcagatcggtgaccttgggctcgatctggttgcgctgcgcgcgcagggccttgagttcctcgtcatggctggaagcggcggcctgcagctcgtctcgtttggcggccacgtcatgcagcgtatgctccaccatggcggccactgctcgcgcgtcatcggccacaccttgcaggtgtgcggcctgctcgcatctgcgatcgttcaacgcctcgatgcgggcgcggcgttcggcggcctctctggcgttgtcccgcagcagcccggcctgtcggctcagtgactcccctttgcggcttgcttcggtccacgcgattttcgcggcgacctcatgctcgcgagtcaggttcagttcgcgctccagcgtgcgttcacgttcatcaagttcgtcgaaatcggcatgttccgctgtggattgccgggccgatgccaaagcgcgattgagatcgtcgagcttgagctgatgctcgttgcgattctcttgggtctcggtgattttcctatccagctgctcaagctgacgggtgaacgatgcgacgcggtctgtggcggatttcagagatttctccgcctgttgggctttgagccgggcttcggtgcgtttggcggattcctggtcgacgagtcgggccgcttcatcgcgtttggctttggcctcggccacttgctcagccattccgccgtcttgggcggccaactgtttgacctgtgccaatgctttgtctcgacgggcggccagagacaggtccgattgagagatggaagagccgccgaccgccgccacgccgtgtgtgaaggtctcgccgttcttggtgacggcccgcatggcttcgccggatgccacgatgtgctgtgcttcgtcggcggtgccggccatggctacatcagccagcaggagacgcacggtgtgcacgacagcttcggcctgtgccgggttctctgcatccgggttcgcggtgacgagtgctgccagcgcgttgcccgatcgcggggcggccgccgtgttctcggcgctactctcctccgactccgtgcctggctctgtggcgggatcgccggcaatgctcgcggtcagcaccacggctttgccgagcttatcttcccgagcgcgttcgagggcgtgcaacatgttgcctgcctcgggtaccacgatggcgctggcatactggtcgagcgcgtgggccacggcatcttcccagccttcggccacatggatgaagccggtgagtcggccaagcgaggccacgtccgtgtcgcgttccaacgatccggaggcattgcggctgcctagcgtgtcggcaagcgcatcggccttggatttgagcgagatgatcttggactgtatctcgcgctgcttatcggcgagttcgttcagtcgttcgcggcattcggcgagcgtcgcacgcgcggcgtccaatgcggtaccgtcatcgtcggcaatggagtctgcttcgctgcgcaatgcgtccagctgttgctgggcatcgtcgcgctgggaagtcagcaagtcgcgttgggaggcataatccttggcgcggctggtcgccagttgcacggcggattcctcgcgggcgatgagttcgcgcagtcgggcgatctgcgcatcgcgctcctgtgcggttttgcgcagttccgtcaaggtctggcggactgaggcgagcttcttctcgtcgtcggcgcgttcctcggtggccttgtcgagtgcgatgcgtgcatcggccacggccttggtttgtgccgcggcctgagactccagttcctcggctcgtttgacgagcatgccgggatcctcaccgaagttggtgacgatctggccggtgagtgaccggctgcgctcttcggccaactgggcgagcgcgttcagtcgttcacgggtctgtgagaattcatgccagtattggttggccttggcgatggtcggactggattcagagctcaacgcctcgacctgttcgatgcgtactttgacgtgggcgagttcacgttgggcgacggccagctggttgcgcacatcgccaagctcttgacgtaccgtgtcgcggcggttcatcgagcgttgggcgtcttcggcatacaggcgtgcttgggcgtcgcgtacggatatctgaatcgcgtcggcgcgccgggagatgcgtgcctggcgtccgagggggccgagctggcggtgaatctcccccagcaaatcgtcaagtcgactcaggttcgtttcggtattggccaacttgcgcaacgcgcgttccttgcgcttgcggtgcttcaggatgccggcggcctcttcgatgaacgcgcggtggccggacgggtcggccttcagaatcgcatccaatcgtccctgacccacaatcacgtgcatctgctggccaagaccggtatcggagaggagttcctgaatgtcgagcagacggcattgcgagccgttgatcgcgtattcggagcctccgttgcggaagatggtgcgggatatggtgacttccgtgtaatcgatatcgagcgtgtggtcggaattatcgatggtcaggctcacctgtgcacggcccaatggcgggcgggaggacgtgcccgcgaaaatcacgtcctccatcgaagtgccgcgcaggtttttggcgccctgctcacccatcacccaggtcagggcgtcgacgatgttcgacttgcccgaaccgttggggccgacgaccgccgtgatgccgggctcgaagcgcagcgtggtggcggaggcgaaggatttgaatccgcggagggtgagttccttgagatacatggcgtgagactgttttccgtgtgtccgggtatccgatatgccttggattcgggttaccgggcgtcggcggaatcgtcggtgacggcgcctgtgtcggcgctggccgtgccggtgccggcgttaccggcgtcactggcctgttccttgccgaggccgaggacgtcgaacacgtcgaagtcgtccgggctcaccgaatcctcgaggttgtcggcggcctcatcctcggccttgtctgccggctgatccgaatcgtccgggtcgaccgccggctgatggacggccatggcctgcctcatcgtggggctggcatgctcctcaagcatcaggcgtgcgtcgccggcggtgacgaagctgccgcagataagcacgccgtggccgtagcccacgcccagctcgtcctcggcatcgaccatgttgacggcagcctgaatcgcgtcgggcaggttcgcttccttgatcacacggtcacggccgaacacgtccacggcaatcttctcgagctcatcggccggcatcacacgctcgcgccacgagttctcggtgaccaccacggagctcaggatcggctccagaacacccagatattcctcgacctgcttgtcgcgcatcatggcgaccacgccgaccagctgcttgaagtcgtagctttcctctatggccttgcgtagggcttcggcggcattcacgttgtgtccgccatccagaatgatggtcggtgaggtgcggatctgttcgatgcggccgggaatcttgaccgagctcaacgcctcgcccaccaagtcgccgtccagcgggccattgaccggaatcaccacttcagaggcggcaagcgcggcaagcgcgttatgggcctgatgctcgccgaacttggcgatcggcacgccctcgtaagtgccgttgggcgtggtcagggtgacgacctggccgccgactgcggccatacggtcggacacggtcatttcgtagccgtcgcgcacgagcatggcgtggttgcgttcggcggcttcggtgagaatcggcatgacggcttcctcatgcggctgaggcccgatgatggcggtgcagttcggcttgatgatgccggccttctcggtggcgatctgttcgacggtgtcgcccagccactgcatgtggtccatgtccaccgggccgatgatggccgcatccgcgttgagcacgttggtggcgtcccacaggcctcccatgccgacctcgacgatggccacgtccacgggcgtgtcggcgaacttccagatggccatggcggtgagcacctcgaagaagctcatcttcggcttgccttgctcctccatcttggcgtccaccagggccacgagatccttggtctggtcccagatgtcgatgaaatcgtcgtcggacagctgctggccgtcgatggcgatacgctcgttgatcttctccagatgcggcgacgtgtacaggccggtgcgcatgccgtaggcgcggcagatggcctcggccatgcgtgcggtggagcctttgccgttggtgccggtgatatgaatcacgcggaacgactgctccgggtggcccaggatgtcgagcatcagggtcatccggtcgagatccagattggtggtgttatgctccggcgggcggctcatgatgtccagttcgacgtcccgcatgctctcgttgttccgattcggatgctcgaatgacatatcctcttctgacctctgctcgtgttgctgttgaaccgttcggagtgcgtatgccgcttacgtgttcgtgccattctcgtcatgtctacgcatgcccgcatatattccgcttccgcatgcgcaagaagctcccctcgcacaggtttgccctgcatggttcgggattcttgccttcacgcgtggagccgcactccctcaattccctctatcctagccgccggggtggtttatcgtgcgcgcacagtgaaaccgtctcatatgtcgccgccgcgcgggcggccttttcctgcagcgcgcacagtgaagccatctcatatagttgcaatgcggctcttgccgtcggcatcccattcttagtcggctgcaatccaaaacttgtatgtccggcgacgctgatgctattcagcgtcggtacagtgccagcttctggcggtacaccgacgctatgatgctcttgcgagtcggtagctggccaaaacctggattaatcccgactccatcgcctctcagtgtcgcctcctcgccaaggcatgccattctgccgtcgctgagaaatttcaacattgtcaatcgaccatgtcttgccccggaaacgactctcacaaacgtcctctacatcatcttttgaactcgcagaggctcattcactgttatgactgctctcaccgtcggcagccgtccaagccctggatctatgccgccaataaatcgcagcaaatcgtcggccacgatacaaccattggactcacgccgacgctagattccacactcagacagaagccagccaatatctgaaccagcaccgacggcgtacaaagcataagcactgttaaccgtcaattcgccgccctctaccagctacatccgccttcgccgatgatatcttgttcgaatccccaaagcacgttgttcgaatgacattactgatggtggataagttttgtatgttatccactattccgaattagcggcctaataccttgaaattatcgggaatatctcactccaagacagccaagctccgaggctagaaccacaatggctgaaattcatacttacgctgcttcgttccggctacgctcgacgtcatgaagacacacaaagcagtggcctcgctcatatcagccgcgcagaatgagctgagatgcgtctattcaagaaatgaagcggaacagaccgctctacgccgccgtgcccagagtggcgagttgttgaaagtgtatgacggcattcccagtctttatgcaaataccgcatactgggatggtttgacgccgccggagcgaacgttgcatatggcccgcgctcttgcgcaagagcatcctcagtgggtttttggcggcttggtggcagtaagtgcttatggattcgaacatcaatggcatttgcatgatggctgcataaccatcgtgacttccgatcatggatctcgtcaatgccatcagcgcttacgacatgtctatatgcccgatatgaacaatccgaagacacattacgaggcctccggcctatccctgatatcaccggctagaaccttggtcgaggccgctatagaccttgattttcggtttgcgttgccgatctttgactcggcccttgccaagggaataaccaaggaagagatagccgccgactgcgttcaatggagaatcgattatgcccgagtattccgcctgctgcgctatgcaaacgaaaggagcgagaatggtggagaatccctcgcgcgaggcaccatcatcgaggatcgcttcctcacgccgcgtattcaggtaacggtgaccgacccgcagacgaataccgagcaccgcgttgatttcgtatggaagctcgatgacgggcgcgtgatagtggccgaatacgacggcacacaaaaatacgtggacccagccatgaccgataaccgcagcattcaggaggtggtggccaaggaacgagcacgcgacgagggactgaaacgagccggtgccaccgaaatcgtccatttcacatacgccgacgtcatcgaacgcactccgctgcgggtaaaactgctcaaagccagagtgccccagatggaggcatccgcagagcagcgggtcccgtgatgcgatgaaccttcatcgcatgggttcacatggattcagcccgcaaaatatgccaatatcaatcggcaagctccagcccatgcccctccttccctaccgagaacaataaacgggcccgcattccagcccgatgcactcgccatatgggcatgtccggaagaccgtccaaattccgtacttggttttaccgtcagccgtcaatcgtggcacatcgcataaagccgactagtatgaggtgggaatcgatgattcgacaacaactacatacaggagagtggcaatgggtgaagtgatcaccgccaaggacaaggaatatgaggccgaggagcgcgctacggcgccgggcgcgaaccagtcgatgagcgaccgtgtgaacaaccgctcgctgcgcccgcagtcggctgcattcaaggagtttatgaagtccggctgggccgacgatgatccggagatcaagcctctcgaatcctccaagttcacgccagcccgccttgaggcgctgggcaaagccttcccgggcgagcgtctggtcattccggccggccagccgaaggtgcgcaacaatgattgcgattacatgttccgcccggacaccacgttcgcctactacaccggtctgggttccgattacgaggccggcgccgtgctggtcctgaacccggtcgaccccgactcccccgaagccgccgccggcaagacgcacactccggaactgttcgtggcacctcgcgccgacaactccaccgaggacttcttcatgtccgcccactacggcgaatactgggttggcccgcgtgctggcctcaaggagatgcaggcgatgaccggcatcgagacccacgacatcgcccagctggccgacgccctgtccaaggacgtgggtgccgaggccggcgccgtgcgtgtgcgcgtggtcagcgagaccgatcccgaaatcacctcgatggtcgagtccatccgcgaggccaacggtttcgccgatccggacaagaactccgcatccgacgacaagctgcacgagttcgccgccgaggcacgcatggtcaaagacggctacgaaatcaacgagatgcgcaaggccgtggacgccaccaagcacggcttcgaccgtctgctctccgcactgccggccgcgctcgacaagccgcgttccgagcgtatcctcgaaggcgcgttcaacgccgtgtcccgtgagctgggcaacgccatcggttacgactccatcgtggcctccggcccccacgccccgattctgcactggatgcgcaataccggtgtggtgaagaccggcgacatgctgctggtggatgccggcgttgaggtcgattccctgtacacggccgacatcacccgcaccttcccgaccaacggcaagttcaccgacttccagaagcgtctgtaccaggccgtgctggactcgcagcaggccggtttcgaagccgccaagccgggtgccacctattccgacatccaccacgcctgcatgcgtgtgatcgccgagcgtctgcacgattggggtctgctgccggtgagcgtcgaggagtcactgtccccgcaaggccagcagcaccgccgttggctcgcctgcggcgtggcccaccacctaggtcttgatgtgcatgattgcgcgcaggcccgctatgagtcctatcagggcgcgaagatcacgcccggcatgatcttcaccatcgagcccggtctgtacttccgcgaggatgatctgctgattccgccggaataccgcggcatcggcatccgtatcgaggacgacgtgctcatgaccgagaacggccccgaatggatttccgccggcatcccgaagcagatcgacgacgtcgaagcgtggatgcggagccgtaaagcaatcagtccggtggactgattgtaggcgacgccgaacgctgacaagcgcgaggaaaatgaaatcatgcgcgaagcgcaccatattaagcaggctgcccaagccaagtaacccttaagctccctcatcagagggagctcctttttctactaaggaggcaatgtgcctactccggaatttgtgttggaattgcgtaagaagatcggccatgatctgctatggctcaatggcgtgaccggttgtgtactgaacgaacatggtcaactgctgttgggccgtcgttcggacacgggcgaatgggcgatggtctacggcatcaacgagccgggcgaacagccggcggacacggtgatgcgcgaaatcaaggaggagacgggcatcgatgccatcgtcaccgatttggtggccgtcacctcgtcaaacaaggtgttgacctacgccaatggcgacaacaccatgtacatggatcattcgttcctgtgcgccctgaagcccggcggcaatgccgagccgttcgtgggcgacgaggaaagcctcagcgtcggctggttcgatctggatgacctgcccactcccctggcggccagcacgagcgagcggctggagctgttccatacttacatcgagaacaaaaagcacggcgacgcccacgccctgttccagttcgatgggcagcagtactagcggatataaagttagctccctctgacgagggagctccaatgctatgcgattacgcctcttgggctaggagctcgtggaggtgggcgcggtgctgctgctgttcgcgcgggtcgggcacgggcagggaggccagcagcttcttggtgtacgggttctccgggtgctgcataatctggtcggcatcgccgtgctccacgatctggcccttatgcatcaccatgatgcggtcggcgagcatatcgaccaccgccaaatcatgggtgatgaacaggcacgcgaagccgatttccgcctgcagtcgcttgaacagctccaacaccttggcctgcaccgacacatccaatgcagaagtcggctcatcggcgatcagcagcgacggcttcaacgccaaaccacgcgccaaagacgccctctggcgctggccgccggacagctcatgcgggaaacggttcatgtaggcgcgcggcagctggaccatctccagcaggtcgcccacatagttcttggcctcggccacggaaccgtacttgtggtgcacgagcagcggctcggccacattctccgcgatggtcatcagcgggttgaacgaggagcccggatcctggaacacgaaaccaatgtccgcgcgcttgggcttgaagtcacgctccttgacgccgttcatctcgatgccaagcacgttcagggagccgccggacaccttctgcaggccggcgatggcacggccggtggtggacttgccggaaccggactcgcccaccaggcccagcacttcggagcggtggatggtgaagttcgcgccgtccacggccttgaagtcgggctgcatgagatggcccgggtacgtgatggtcaggttcttggcctcaacggcgatcggctgttcgcgccaatcggccttgcgctcgatcggcttgccctcgcggtcgcgcacgaccagcttctgaccgatgcgcggcacggcacccagcagtcgcttggtgtagtcgtccttcggatggtagaagatctgctccacgtcgccctgctcgaccacgtggccgcggtacatgacgaccacctggtcggcgatgtccgcgatcacgcccatgttgtgggtgatgatgagcacggaggcgtcgaactcgtcacgggcgaggcgcagcaggtcgagaatttcggcctgcacggtcacgtcgagggcggtggtgggctcgtcggccagaatcaggccggggttcagcaccaacgccatggcgatgacgatgcgctgcttctggccgccggagaactggtgcgggtagtagtccacgcgggtttcggcatccgggatgccgaccttcttcaggatgtcgatggccttggcgcgcagttccttcttgtccttcatgccgtgggcgcgcaggccctcttcaatctgccagccgatggtgtacaccgggttcagcaccgaattgggctcctggaacaccatcgcggcctcggaaccacgcacttcgcgcagctgttcgccgctcagggagagcacgtccagcgaatcggagccatcacgcttggacaggtagacggcaccggaggtggtggccgtctccggcagcagcttgatgatggagcgcgcggtcacggacttgccggaaccggattcgccgaccacgccgaccacggtcttgcgcggaatggtgaagttcacgtcctcgacggccttgatggaaccggcgtcggtcatgaaggagacggacaggtccttgatatcggcgagattcttgttgtcttcgctcatctctcactccttgccttccggcttgccttcgccggtccattcggaggcgacgatggtcgggtcatggtcggtgacggtggccggcgggtcgacgttcgcgtcgagttcggcgatcacctcgttgcgtgcggacggcttctcgtttgggtcgacggacgtgtcttcgatcgatccgaccacttcgccggcggacttgcgggcgcgcagacgcgggtcggccagatcgttgagcgattcgcccacgagcgtgatgccgagcacgataagcacgatggcgatgcccgggaacacggcggtccaccagatgccggcggtcacgtcggaaaccgaacggttcaggtcgtagccccattcggcggcggcggtcggctcgatgccgaagccgaggaagcccaggccggcgagggtcaggatggcttcggacgagttcagcgtcaggatcaccggcagcgtgcgggtggagttcttgaacaggtgcttggtcatgatgcgccaggtggaggcgccgaccacgcgcgcggactcgacatacgcggattccttgatgcggatcacttcggcgcgaattgtgcggaaatactgcgggatgtacaccacggtgatggagatgccggaggccaggatgccgctccacaggccggactggccgtgggagatcatgatggccatcagaatggcgagcagcagcgaggggaaggagtagacggcgtcggcgatcatcaccaggatgcggtccacccagccaccgtagtagccggacaccagaccaagcagcacgccggcgaagatggagagcagcacggccacgacgatggcgatgacggcggtgcgggcaccccacaccacacgggagaacacatcgaatccggcggcggtggtgccccagatgtgttcggcggagggcgcggcctgcgccgggaaggacgtgccgtcggcggccttgatctgggcgtggccgtagggggcgatcagcggggcgaagagggccacgagcaggaagaacgcggtgatcgcgagaccggtgatcagcatgcccttctgccag

SEQ ID NO: 2795 - DNA, 6414 bp, Unknown
  R36_18m  MAG No. k141_18711
cccgccggagattgtgaccagccccgcctaccgcaccatccagccgaaggtgacgaaaatcgtgccaagttcgtcgattgtgggcatgattttcgagaccccggagccttgccgcgtggtctcttccgattcggatggcattatgcagcattccgccttcacctggctattggatggcgaccagttcatcaccgagccggatttgagttccagctcgcagttgtttaacgaggagctgaaccattggatcgccacgcttacgcccgaacagcgcgagcgtgcggtggacgcgctgttcaccgtgctgcacgccaacggcgccaccagcttcagcgaggtgatgagcaacttccccgcttcgattccggcgatgcttggcgcgtatgtagggctgacccccgcagaccggcgtcatttggttgaggccctggcgatactgttcaaggcgtccacggccaaacgcaggccgacgcccgccccggcttccgcgccgagttctgcgaccgccaaaggaacagccgaaaccccagcaggaactgcgacaggaacagatagcgcggccccggccagcgccgataccgacaccgacactgacaccgcagcttcgccctcagcggaggacgcaactgaaatcgccgattagctcatagacatgtccacaaataatagttatactgcccgataagttattagacagcgtgaccatatcacgctggtgcatcaggaggaagagatgccacgtccacgccatgattccgaggtgctgcccgccaaagaacgcctagagaacgctttctgggaattgctcgccgaccgcgactaccgcaagatcaccgtcaccgatgtggtgcgtgaggctggcgtgaaccgtaattcgttctattatcacttctccagcctgcccgaattggccgattcagccatcctgcatcaggtcgaatcgattccgatcaaccgcacccccgacccaaatggcaatcccgaggaacaatggcgagaccgcgtcaccgccacgctctccgacccggagcagcggcagcgcctcgaccgcctggccctgttggccggcccgcacagcacgcttgaactgaccgaatcgctgcgcgacttctgccgtctgcaaatgctcagcacattgcaacgcgaccccaagaaccttgacctgaaaaccgatctcatggtcgagttcaccgtgggcggcatgctcgccgtgctgcaacgttggcccgaattgagcgacgccatcgaaatcaaagacctgcttaaagaagatgtggccgtgctggccatgggcatatacctggccatgagccaaaaggacatgcttaattactggaatcgcatcttcgtgcacaatgcgcaggattcggccgcccccggcatgcaggccaccgccacgcatgccgcgccatcccccatctcaccgtcgaacggccccgcaggattccccgggtacaccgcttgaccgaaaaccagtgagtctggattgtttccgtcgaatgaacccccgcgtgaggtttctcacaaggcgcaatcagcctctcatgctggcgtttccagccctcacacaggaagatggaagcatgagcgaaacatcgaacaaaacccgtctggaacatgactgcatcggccagatggaggtgccggcgaacgtctactggggcattcacacccagcgcgctatcggcaacttcccggtctccggcatcaccgatagccaacatcccgagctgattcgcgcctatgccacggtcaagcgcgcctgcgccatcgccaatgaggaattaggcctgatcgacccggccaaggccgaggccattcgcgccgcctgcctagaaatcgaggccggcaaactggccgatcagttcccggtcgatgtgatgcagggcggtgccggcacctcgtcgaacatgaacatgaacgaggtgatcgccaaccgtgcgctggaaatcgccggccaccagcgtggcgattacacatacatccatccgaacgacgacgtcaacgagtcgcagtccacgaacgacacctacccggccgcctgcaaactcgcgcttatcgacgcgatcgggccgctcgccgagtccaccaagaaactcgccaaggccttccacgatctggccgacaaacatatcaatgacgtgacgatcggccgtacgcaactgcaggacgccgtaccaatgacctatggtcaggagtttcattcgttcgccacgctgctgaaatccgatttggctgcattcgatcgcgtggtgccgctgctggcccagctcaacctcggtgccaccgccatcggcaccggcatttgcgcggatctgcgattccgcaagtccgccatcaagcatctggcgcagatcaccggcttgccggtcaccgccgcgcccgatccggtggccgccatgacggatatgggcgcgtacgtggccacgtcggccgccatcaagagccttgccgtgcacctgaagaaggccgccgacgatttgcgactgctcaattccgggccgcgctgcggtttcaacgatctcaacgtgccggctcgccaggccggatcatcgatcatgccggccaaagtgaacccggtgatccccgaatgcgtcaaccagtgctgcttcacgatcttcggcatggacgtgactgtgaactgggctgtggccgagggccagttgcagctgaacgccttcgacccggtgatggtgcatgagctgctgaccggcatggcgttgctgacgcgcgccatggagacgttccgcgtcaattgcgtggagggcatcgagatccacgtcggtctgggacgctcgtatgcccagtcctcgccgtcgatcgccgccgcactcaaccactacatcggctatgagcatgcggccgacatcgccgccgaagccgtgcacaccggccgtaccgtgcgcgaggtggccggcgaacgcaccgacctgcccgccgagcagctggacgagattctcgatccgattcgactggcccgtggcctcggccaaacctgccgcgagcatcgggactaggcgtcacggcgacgtcatcaccacgacgatgctgcaccgcggtgccgcggtggtgccggtggtgccgacggcacgccaccggtatcgcaccatcggcaccaccgcaacggccaaaacccgacgtgggcccgcatgtttacgacttcaccagaaatggtcgatacagtagggcatatgaccgaatatgcacaagacatcgcacgctggtttcaggtgaacgccggcaaactcatctggctggccgtcgtgctggccgtcgtgttcgcggccgaccgcgtgatcagccgcgtgctgcgcagggttctggatagttcgcagattcccagcgcctcgattttcgtgaatctcacgcgcgtgaccatctgggtcaccggtacggcgatggtgctgcaaccggtgttcggcatcaatccgaccaccctggtcaccgccctcggcgtcggaggcgtggcgatctcgctgggtctgaaggatacgatcgccaacatcatcggcggcttcggcctgatgctgggccgcgtaatccaacccggcgacctggtgaccattcaaggcgtcacaggtaccgtgcatgacatcacctggcgacagaccgtggtgcgcacccgctccggggacatgatggtcattcccaattcggtgctcaatacggccgccttgaccaagctcacgccggccagcgaaggcatggccacgctcgaattcacggccaaggcctccggcgacccgtccgctatcagtcaggatattctcgaccgcgtaaccaaagccaccgccgacgtggcactggagggccagccaccgctggtcaagttcgccggcttctccccttacggcatgaccggccaagtgcttgtgttcgcgcgcgagggtgtgctgccctccaccatcaaagatatggccgcgcgcgccatcgccggttcgggcactaaataccttgttgaagatggcggctcgtcagacaatctgtgatatctcccggctcacctctctgggtccggctatgacagtcatgcgaacagcatccaaccggtaagcatcacagtcagcagtaggtacgcaataacgccgggattggcataggcggtgcgtattttaagccccgccggcaactcctctggcgcaagatagaactcccagttcttgcgcttggtgataagcagcacgataccggcaatgcagaggcccaacatcactgtgccgtacaacatcatgatgcccatgccgcccatgttgccggtttcagccatacgcatgatttcggcctcgctgattgtgccgtcgaggatgcggggatcgatctgttgtatcaccaatggggcgagtactgacccgttcaggttgatcagcatgtgcatagccactgaataccgcaggcgggaggtgcgtgtgtatacatatccgaacatcagtcctaggccaaaggcgtagaagaactggaacacgttcatatggaatagcgcgaacgccaatgcggagaacatgattgcggtcttttctccgtaccggcgcaggcgggagataatctccttgcgaaaaatccattcttcgcaaaccggtgccaacaggcctatgaacaatgcgttcacccgccagtcgctgccaagaatcacgtcgttgatgcgattggtggcctgaccatcagtggctccggcagacaatatattgccgatcatattgcccaagaacattaccggaatgcacatgacgaaaatccgaatgaactcccccgccttcatggggtactgccgggtgcgaataaccggtacgcgagtgaaggccaacatactcagcggcatggccaccacatacagcggcccggaggaggcgagcagcacagcccaagcgggcacatcggcgccaagcagcgttcgtagtgcttcagtggccagaatattcagcccgatccagaacaccatcataatggcgagcgccgagccgattgtcgaaaaccggcgatgggccgtgaaccaccaatcgcgtggggtttgttgcggctgctgcgccgacggcattggttcgctcatacttatcccccatagtcactggccgcaaacggaccgatcacacgtgcaatactcttcaagaatacggcacggcgtttcgattgcattgggaatggggaaaatcatcaatgggcaaggaatgatctacgtcaatcaatccccatgccgagagagtcctctactctgcgggattgttgtgggacggcacgcgattttgcccgattttttcgcggcggcccacaccactccacatatgactgatgacgccgcacgaagaaatggcgtcattgcaacgattcctcaatacattctgtgggacggcacgaatgtacatcgtttgacgttcatgccatcccacaccggcgtgggacggcacgcgataatcgcccaaaaatcgccgccgtcccacacatatcattgccgataagccattcgacgatcgtacagtcacaaaacagaacagaaccgcacgatcatcgcaacgccattcagcaggcgagcgcggcgaccggacgcggggcgacaatcacgtcatcgcccaccgccagaccggccggcagctcgctggcgggcagctgcacggtggccttgagctgttcacctttgttccagcgctggtattcgccggaggtgatgaccgtgtccacacgaaccaaagagccaaggaagtgaatgacctccacgcgggcgcgttcgccgacgtgcgaatcgctgctgccagccaaggccagcatcaggttctccgggcgcacgagcacggccacggaatcgcccttggcggagccggcgagcagcggcacgcgctggccgaagaccacggcctcgtcgccattggatgcgccgagcaggcggttggtgagtccaatgaacgtggccacgtactcggtggcagggcgctggtacaggtcctgcggggcggcgatctgctcgatcttgcccttgttcatcacgccgatgcggtcggccacggccagcgcctcttcctgatcgtgggtcacgaagacggttgtggtgccggtggtgagttggatgcggcgaatctggtcacgcagctggacgcgcactttggcgtcgagcgcggacaacggctcgtcgagcaggagcacgcgcggcttgatggccagcgcccgggacagggccacgcgctgctgctggccgccggacatctgctgcgtgtacttcttggcctgatcggcaagccccacgagctccagctgttccatggcgatcttgcggcgttcggccttgcccatgccgcgcacttcgaggccgaattccacgttctccagggcggtcatgtgcgggaacagcgagtacgcctggaacaccatggccatctcgcgcttgttcaccggcacaccggtgacatcctgtccgccgaccatgatgcg

SEQ ID NO: 2796 - DNA, 5179 bp, Unknown
  R36_18m  MAG No. k141_18850
ccttcctcggcatcctgtcggaaacctcactgaacatcgcctactccacgctgatggaggagttctccatcggcgcttcggtggtgcagtggctcaccaccggcgatctgctcttgctgtcagtatcgatttcgagctcgccgttcatggtgcgcaagtttgccaccaaaaccctgttcatcatggccgtcgtgatcttcgccgccggcacactgctgggcgcgctcgcggtcaacttcccgatgctgctcgccgcccgactggtcatgtcgctcggcaccggcatctccttgtcgctcatcaccagcatcattctggaaaagcgccgcttgaacagcgcggctcgatgctcggcatcgtcagtctggtcacctgcgctgcaccggccatcggcccggtattcggcggcgtgctgaagagccacttcccgcccaagttcatcatcatcggcttcgcgggcaccgtaatcatggacgcggtgttcgtgacgctgtccggcaatgtgtgggtggtggccatcgccgcgaacgatggggcagacgccgccggttcgtatatgatcgccttcccacgcagcatgatggtgttcgccggcatggccgtgctcggcgtgatcctcgcctcgctcatgttccgattctccactcgccgcccgccggaaatgagggaagtcaaagagtatgcccgcagcggattggttggctttatgatggaacagatatgccatcacaggagaagcaggagaactatcatgcttgaaccaccggtcactccgatccgcaaggccaacgacggcctcgaactgccagccaccggattcggcacctacaaggtcaacggcctggccggcgtggacgccatcaagtccgccattcatcagggctaccgactcatcgattccgccttcaactatgagaatgaaggcgtggtgggccgcgctatccgcgaatccggtgtgccgcgcgaagacatcatcgtcacgtccaagctgcccggccgccaccacgcccatgacgaggcgctgctcaccattgaggagagcgtgtgccgtatgggcctcgactacatcgatctctatctgatccactggccgaacccgagccaaggccagttcgttgaggcatgggaggcgctggtcgaagcccgtgaacgtgggctggtcaagcatatcggcgtcagcaacttcttgcccggccatattgatctgctcattcgcgatacgggcgtgaccccggccgtcaaccaagttgagctgcacccgtacttccagcagcgcgaacagctggcctacgacaacgcgcacggcatcatcaccgaggcatggagcccgctgggccgcgccaaccagatgctgcgcgacccggacctgaagcgtatcgccgccaagcacggtatttccgtggtccaggccattttgcgctggcacctccagtacggcgacgtggccatcccgaagtccttgaacccggagcgccagcgtcagaacctcgacctgaccgcttttggactcgatgatcaggacatggccgatatcgccgcaatggacaaccccgaaggtcacaccttcggccagaacccccattggcacgaagaagcgtgattccagcatgcaacgtcctattatgacttcgcggtcgtttttgcgcacgccgtccgaagcggccgggcccggcgacgagcaggtgatcgaagacctcgtagacacgctggaggccaaccgttcacggtgcgtgggcatggccgccaacatgattggcgtaggcaaacgcatcatcgtctttgtggatgaagaccttggcgggcgcataacggtgatgctcaaccccgtgattaccgcttcggacggtgccttcgatacccaggaaggatgcctgtccctgaccggcgaacgccgcacgctgcgttatcgacgtattgaggtcaactacgagaaccgtcggttccgcgcccgccacgccaccttcgccggttggactgcgcagattatccagcatgaagtcgatcactgcaacggcatcattatctgattcatatcggtgctcattgcagcccaactcccgaggctggtcatcgcgattacgatgcgattacatcgcaaccgctatgaccagcctttttgtgcactggtggggtgggtgttctcatcggtgttggggtgccatgcgctggcaggttggcttcgctgaggggtgtgggtggtgtcatgtcgccagcggttggcaggttggcttcgctggaggttctctcagcgtcggtgatgtgccaaagagtggcgggctggcttcgctaaggagcgttaccgtcggtggagaaccagtgcgtgacctgctgccgacgctaagcgttcattaagcgtcgttagcggccaaaacttggacgtgtaacgatgctgggcggttttagcgtcgttgctgtgccaagttgtggtcctctgccgacgctgccagtgcagtagcgtcggcgttgggacaggtgttgggcctttgccgactctataagcgagggaaaatcattcgccggtgcctaaatgggtctattgccatgctgaatacatctgctgagtgtagctatgcgttcgaaggcgatttcgggacctttctcagtagcaaatatgtctaatgcgcggagttatacacttcaccgtgcacttatacacgccaaacgaagcagaaatcgactgctgacagtggacgacacgccagagacgatgtggataacccagagacggtggataacagctgcgcgatcagtggataacctgcaagaaagtgcggttatccaccgacggtagccactgttatgcacattccataccccttggaatcattgggttttccacttatccaccatctcgccatgtgggcttgcgggccaccgcacgaacgtcatacagtgtgcctcacggcgggcaacgtagcccgccgtccacatcacatgaaggggaaacaccatgagcaccgcaaccactactactgccgaaaatgccggtttgccagcaatgctggacaccaaagacgtagccgagatgttcaaacgctgcaatctcgccgtctatgccgaagcgagacgcatatattatcgcgaagtgaatctgaacccatgcaaaaagtatccgaagcaggtgctgcaaaggatcgaatggtggttctgggattggtttgcctatgactgcgccgtcagcggcgtgggactgaccggcgacgaatccgaggatctacgcatcgaactgaaatatggcccaagcgtaggtatttcaccgtttctggctttggctgaattcatgcatgacagtgactcgcggattggcacacgtgaaatacgtgattttcgcgaacttgacgacaccaatttcgcgtcgatgttctggattcgtgatgccagcgcggtcacggggcgtatcatactcgaagacatgatccacggtggcacctacgaggtggcggacccgcatgccgccgcgcaatatgacggtgcgcacggtggcatgatcgtcaatcgcattgcgcatgttcgaggagcatggaggtcatgcgccatcccgatttatgaggcacgcaggcccgacgacccagaaatcggtgattcgctggttcgcacatttcagcgcaacggatttaagccggatttcgcggggctcgtgcgattcttctacgggcgagccaaagacaccggtctcgactgggtggatatggaaaaggcgtgtaacgctggcacgttggatgagatcatcaagaaagcctacgatcgatgaatgaatcgcctaacgctgctgtccaagtcggcggccgcgatcacgaatgaagagtgacgcaaccaaacagaccgcacacacaatggcgaccgtgcggaacgaagcccgcacgccaatggccgatgccgccgcttccggcactccggtgcgcatggccgccgcggtgtgcgtgttcatgatggtgaccagcagcacagccgcaaacgtcatgatcgcgaagcccggcaaggcgagcggccggccaccgatacggtcatacatcttgcctgccaccgggttcaggatgcccatggcgatgccgctcggcatcatcaccagaccggacaccagtgcattaacgccaagatcattctgcaaatatgcccatcgcgtacaggaacagctggcgggtggtgaaggtctcgatgaggaacgcggtgatcgggatcatgatgccgttggtaagcatgaatccggtggtcagccattgcacggtgctgctgggcacgtcgaactcgtgcatcaacgtgggcagggcggagatcatcagcgtttggttgaggatggccacaaacgagccgatcatcagggtgatgaccatggcggtggtgttggcgggggtggtgctgttggagttggcggggtggtggagccggcctcagcggtggccggcgaggaattgcgtgacgtcaattatcaagcctcgttttcttggcttgcccatgctatctgtgccttgactgcattcgaaaaccattgcaatggctagcaacacgctgagacgcggcgtattaattcaatcatttgacaaatttagttcgttcgttttattattagtcctgcaatccgtaatatcgcctactgcaaaggagcgcccaaatgggtctgtgggatgttgacaagatcgagtatgtcggccgcgccaagggaccgaaggaagacttcgccttccattactacgatgccgacaaggtcgttgccggcaagaagatgaaggattggctgcgcttcggcgtcgcttggtggcacaccttcaaccaggaactggttgatccgttcggcaccggcaccgcgcaccgcccgtactacaagtacaccgatccgatggaccaggctctggccaaggtcgactacgccttcgagctgttccagaagctgggcgtcgagtacttctgcttccacgatcgtgacatcgcccccgaaggcgacaccctgcgcgagaccaacgccaacctcgacaaggtcgtcgacaagatcgaggagaacatgaaggccaccggcgtcaagctgctgtggaacacctcctccctgttcaccaacccgcgcttcgtgtccggcgccgccacttctccgttcgccgacatctacgcctacgccggtggccagctcaagaagagcttggagatcggcaagcgcctgggcgccgagaactacgtgttctggggtggc

SEQ ID NO: 2797 - DNA, 7335 bp, Unknown
  R36_18m  MAG No. k141_18890
gccgccgatatccgtcgtatcgcggccgatgccggcatcagccccaccaagaaattcgggcagaacttcgtcatcgaccccggcacggtccgtcgtatcgtacgagaggcgggagtgaccgctgccgatcatgtcatggaagtcggccccggcctgggatcgttgacattggcgattctggaaaccggcgccaccatgaccgcagtcgaaatcgatccgccgttggccgaacgactgccgggcacagtcgccgaattcatgcccgaagccacgtcacgactcaccgtcgtcaatcgggatgccttaaccgtcaccccggagaacgtgcctgatttcagcgatgacgcatcgtttacgctggtcgccaatctgccgtacaacgtggccacgccgattctgctcacgctgttggagcgtttcgacaacctcggctcgttcttggtgatggtgcaaaaagaggtggccgacagactcgccgccaagcccggttccaagatctacggcacgccgagcgtgaagctcgcctggtatggcaccgccgaacgggtgggcaccatcggccgcaatgtgttctggccggctcccaatgtggattccgcgctcgtcagattcacccggtatcaggccgatgacccggccgccccggaagcctcgaacagcacggccgacggcggcgcacaacgggaactcgtatttcgtctgattgatgcggcgttcggtcagcgtcgcaagaccctgcacgcggcattgaagaccattgcgccctccgaggcattctccatcgccggcatcgatccgacccgtcgaggagagacgctcaccatcgccgaattcaccgctctggccaaggccatcgaatcgtgtggagatggagatgaggcacaatgagtccggtaatctcacatccacgcccagccgctgcccgacatcagttcgatgagctctcccccatcaccattacggtggattgcccggcgaaaaccaatctcaccttggaagtgggacctgctcacgacgaatggggcggacgccacgaactggacaccacctactgtgcaatcggcgtatacgacaccgtcaccgcaaccgccaagcaacccggagcgggattctctctggagctcgaaggcgcttatttgggcgacttggcctcctcacacagcgacatgcgccgcaaccatgcggtactggccctcttcgccatggcccaggcggccgagcgcgagccggatgtggcgttgaccatcaccaagcgcattcccgtgggtgccggactaggcggcggttcagccgacgccgcggcgaccatgctggcggtcaatcgtctctgggatctgaactggcctatagagcgcctgcgcaccattgccgccacgttgggcgcggatatgccgttctgcctgaccggtggccttgcatacggcaccggtttcggcgaacgcatcacggatatcgcccccggcagccgcgatgagctggcgctgatagaacagggattcagcggcgaagtattggtcggcgcgtaccagtcgcaactcagcactcctgaggtctaccacacctttgacctcgtgggagccgcagaaggcgaccgcaatcatctgcaggctgcggcaatcagcctgcatccccgcagcgggcaggccatcgacgccgccacgcaggcgggtgccagccatgcattcgtctccggatccggcccctcagtggtcgctttcgccgccgacgaggcagcggcacaacgcattatcgatgtgtggcgcgatacggctgtggtcgatcgcattattcgagccaaatctcccgcacaccccaatatcggcgtcagacagtgacgctaaggtagcaaccagccacccgacccatgaaagaagtccaccgatgacgtatcaggttgatgaacgtgaagcccgcaaggcgtacgtgcgccaccgccagaccatcgtcttttccatcagcggcgcggtattggcagtagtgctggtcatagccctactgttcaatttccacgttttcggcctcggcgaagtggagactccggcccgccagccgaattacggcaacgcggcaccgtgcgcggtcaaggacagcagcggcaaagcgcaatacgtgtccaacgcttcggtcggcatccgcgtgatgaacggcacctctcacggccaattcgccaaggccgtgggtgaggctttggccaatcgtggattcagcgtgcagaaaatcgataactattccagcaccggcgttgaacgcaccaccatctacttcggcaagaacgccattaatcaggcgtatacgctgatcggcaatttcaccgacgccaccatgatcatgacggctcgcgaggatcagctcatcgatgtggtcatcggcgccacgttcaacgatctgcaggacaccaactcctccccgcaatccggtaagaccatcaccaatatcgagggttgcaaggccgccgatagcatgaccaagctgcccgccgacaccaaacacgacgcatacacggcggagtaaggcgcatacagcttcatcttcgcgaaaaaccgtacgctgacacgtattcagcgtacggttttttggtatcggactagtatcggactactgaatctcggcgtaccagcgcttgagttcttcgacggccacatcgtggtccaccggaccgttatccaagcggtattccagcatgtgcttgtaggcgcggccgatcatcgggccgggctccaggcccagcaactccataatttcgttgccgtccagatccgggcggatcgcgtcgaagtcctctttcttcttgagttcgcggacgcgctcctccatctcatccatggcctgggagaagatcatcgccttgcgcttgttttgtgtggtggcgtccgcgcgcgtgagcctgttcagccgctcgtacaggtgcccggcatccttgacataccggcgtacggccgagtcggtccacggctcgtccacatagccgtggaagcgcaggtgcatattcaccagttccgagacgtcctcgaccagatggtggtcaaaacgcagcgccttcaaacgcttgcgggtcattttggcacccaccgcgtcatggtggtggaagctcactttgccgcccggctcgaaccggcgggtcttcggcttgccgatatcgtgcatcacggcggccaagcgcagcgtcaggtcgggggcgggcaccgggccgtccgggccggtttccagggcgatcgcgcgttcgagcacaatcatcgtgtgctcgaagacgtccttgtggcggtggtgttcgtcgatctgcaattgcagggccggaatctccgggaagacgatgtccgcaagaccggattcgaccaacgcctcaaggccggcgcgcggacggtcggagagcagcagcttggtcagttcgtcgcgcacgcgctcggcggatacgatgtcgatgcggtcgcgcatcgaggtaatcgcctcggccgcgtccggcgcgatacggaagcccagctgggccacgaatcgcacggcgcgcatcatacgcaacggatcgtcgtcaaaggactgtcgcgggtccaccggcgtgcgcaacacgcccttggacagatcactggcaccaccgaacgggtccacgaattgcaggtcgggcacgcgcagggccatcgcgttgacggtgaagtcgcggcgagacaggtcgccctcaagcgtgtcgccataattgacctcgggcttacgcgagtccggatcgtacatgtcggagcgataggtggtgacctccaccttgacctcggtgccgtccgggcggcggcgcatggcacccagcgtgccgaacttgcgccccatgtcccagaagccgtcatgcccccaccggcgcagtatcggctcgaactgctcaggccgtgcggatgagcagaagtccaaatcgtggctctttctatggagcagcaaatccctgaccgggccgccgaccaatgccagctcgtaaccctgttcggcgaacagtcgaccaagttcgatggcttcgggccatacttcgaaattcaatgggcaccttcccgcgtgcgacgtttttctgccctaccagcataccgttaccccacctgcacacggggttgagtaaggtggagaatatgattacgcccgccgaccttgcccgcatactggggcaaacaccagattcggcggatagccatacccaagaccacctgctgtatacgtccgaaactccgcatcattccgccgattcgggcgattctcccgatgccggcggcaccgcgagccactccaccaatcaggccgttcatcaagacgaagtagacgcagtaccgactacgcaacattccggtgtacccggcacacccgcaacgcccgccacacccgcaccatccgaatccgaaatatcggacgccgccagcgacatgcccacaccgaagccgatgatgcccacaccggccaccgtcttcggcatgcatgccaccgtcaccatcgccactaccagcggcactatcgaggggcaggccgatggtatcgccggcgaggccggtgccgagacgattgccaaggtcgagccgattatcgccacggcacaaacgtccgtaaccatcgtcacgaacgattccgcggcgaccgcccacgcggccgtagatactgccgttgcggtcgccaaggccgccgccgcgcataccgcagcgataccgactccgcgcgacgtgctgatgccgcctgcggcacgtaccgcaccggccgcaacgccggtcaccatgccggtctcagcgccgtctgcagcaccagtgaggcccgcaacgtcagcgcatcccacgccggccacggtcttcggccggcatccgtccgcggatgttgcctcgccggaaccggcagtgccagtagaaccggtgacgccatccagcccgactccggccatgatgccgcaacgccgtacgtcggacggtccgaccacattcgcttcactggatgcccaggaactgccggtcgtacgcgaatattcggcaggcggtctgattttcgatgaccagaatcgcgtggccattatcgcccgtcattcccgctccggccatctcgaatggtgcttgccgaaggggcatatcgaaaaaggcgagaccccgcagcagaccgctgtgcgcgaagtgcatgaagagaccggcatcctgggcgaggtgatcgattccatcgccaccatcgactactggttcaccggcaccacgcagcgcgtgcataagctggtccatcacttcgcgctcaaacagaccggcggcgaactgacggtggaaggagacccggatcatgaggcggaagacgccatctgggtacgttttgaagatttggatgacgtgttgagctatcccaacgaacgcaaaatcgcgtggctctacgccaggaagaagaacaggcaggcaaacgagtgaacctacccggagtcttacgacattgcacacgtctggcacacgcactggcggctggcgtcgccgttgtggcgatgctggccgctccattgaccgtctacgcgaacgatacgacggacacgactgattcatccgatacgacggacgcaacgggcaatcagaccgagaatcagcccaagcagagcattgccatcacgcaaagcacccccatcgtcacctccaaatcgggctatcatgtcaccgcggtcatcagcaatacggacagcacggccacgtcaagcggcacactgcacctgaccaccaatacgctgttcacctttgtctcgcgcaccgatattcagaattgggccgagaacaacgcccccatccccacccccaacgagttgggttccgttgacgtgccatcgattcccgccggcggcactgccaccgtcaccatcgaggtgaacgccaatcagcagacccttgcctccatagggagctgggggccgaagccgctgatgctgtcgtatatcgtcggcaatcggatactcgccgatttgccgagttttctgacccgatcttcggatgggctcaacaccgcgacgacaccggccatgaacctgaccgtggccatgccctacaccgccagcggctggcaggtcgataacaaggccatcagcaatcgcattgccgaaaccaccacttcctcgacatcaacatcgtccaagtccaacagcacggacaaggccgacaagtccgataacgccgacgccggcaacgtggccaaagccactgatacgcaagccatatccttatccgagcaggatgccgataccgcgcgatcccttgggcagacattcgccaagcaccgctcgctgcaagtgatcgcggatcctctgtattggcgtcagtccgcagtgcaaccgtccattgccggcatcatgcagcccgccgactttgacatcaccgcctataccgcgctgggtgataccgcggcctacgaaaaggccggcatcaccactgaacagtggaacgccaagcaggcggccgcatggtatgccgccggaaacgactccgaaacaccctccgcgtacgcatggcagggcaacaactgttggacgttggatgcgctgaccgcagcacgcgagcagggctatgacacggtgattgccgatgcctctttcgatgccgaccagactgaagccgtacacacaggcacctacgtggtggatacgcctgccggcgatgtcaccgtgctgaaggagcaatcgaccttgggcacgctggccaagggccaagccaccagcacggacgcgcaggccgagtccagcgatgccggtcggttggcccgactggtcgctcagagcgcgttctaccagatggaacagccctatacatcccgatacctgcttatgacgttctcccgcaccacggaggccagctggatcgatcaggtgatgagcgccttcgagcaggcgtcctggttgaatctgacggatctgaagaccatggccaaggccgatccgtacgatgtcagcgattcggtcaatcccgacaaggccgatgatgccaacaccgccaatacccggtcggcattgagacagttggccgacagccggcatgacatcatgcgcatggccacctccatattgaagaacgagattgattccgacgaggtctcgtcgttggccccgcaggccctggcccggcaggatgccaatgacaccgtctcgcacagcaacgatccgacgcaatggattggctctttgctggtgctgcatgacgatatggcgctgcgatccatgtctggctccccccagccgacaaccacgcgaaaatccatggtcagagccgcgaaaacactggccagcgatcttctgaacggcgtacgcatcaacccatcggaatcaatatccgtgttcagcgaatccgcgaaaatgccaatcaccgtcagcaatgaccttcc

SEQ ID NO: 2798 - DNA, 11493 bp, Unknown
  R36_18m  MAG No. k141_18926
actcaaaggctcccattgggcgcatatggtgatgttcctgtcgctgctgaccgtcggctacgtgttcttccggctgtcaatggacaatctcatcctgctgggcgtcttcgaaatcctcgccggcctgaccgtctcgccgacgttcgccaccggcaacctcatcgtcaaggatctggtgccggcggaatccctgaccgaaggactgagctgggtaaccaccgcaggcacggtcggcacatcgatcggctcgtccgtggccggcattgtgcttgacgcctccaaccctcatgtgggcatgatgctgccattcatcttcacgctggcgtccgtgccattggcgttggccggatgggccttggccaagcggcgtgggtgaaacgggatcgggctacgcccgatggatggttggcggcttcgccggggtctctccctcagtccgcttcgcggccagctcgaacgcaattaatgatggctttcagtcaactgaattattgctcactgtcgttcgccctcacctaaaaacgcctccggcgttttcttcacggttcggctcatcagagggagctcgacttcatggttcggcttgtcagagggagctcgattctgtggacgggatattggcgtgagggcttggcggtgataggctgattgccgattggaaaacgttccgggtacattgccgggcaggtacgggtagacagggaagaagacatgatcaaggtttcggtggtcggagcaaagggccgcatgggctcgcacgtggtcgaagcggtgaacaacgccgaggatacgcagctggcgctcgcattggatgccggcgacgacctgacccaggtcaccaccgacaacaccgatgtggtcgtcgaattcaccgtgccgtccgtcagcctgaacaacgtgctgaccctgatcggccaaggcgtggacgtggtggtcggcaccaccggctggaccgacgagaaactcgcccaggtcaaatccgccatcgccaacggcccgaagcccgaaacccagaaggtcttcatcgcacctaatttcgcgatctccgccgtactggccgactactttgcaaccaaggccgcgaaatacttcgaatccgccgaagtcatcgaactgcaccaccccaccaaggtggacgccccctccggcaccgccattcacaccgcccacggcatcgccgaagcgcgcaaggccgcaggactcgcccccgtgccggacgccaccgaaaccgatggcggctcacgcggccaggtggtcgacggcatccacgtgcacgccgtgcgtctgcgcggcctcaacgcccacgaggaagtgctcttcggcaacgccggcgagcagctgaccattcgggccgacagcttcgaccgcaccagcttcatgcccggcgtcctgcttgccgtgcgcaagctcgccggcgacgctccggctggcctgaccatcggcctcgaccacttcctcgacctgtaatcgacccgcagtcgaccagtagtcgcccccgcatttcaggcagggaagcgcgccgggacgcgcatcacggcattgccaccggttccggtcataatgccacgcattcagcaacaatcaaggtacgtaatgtaagagtccacaatgggaagtacggtgaacactatgagcgagcatgacatgcaccttcttgagccagcacctttcggccgcattctgccggctatggtcaccccgatgaaatccgacggcagcgtcgatttcgccgccgcgcagaagctcgccaaatacctcgtcgccgatggcgcggatggtctggtggtcaatggcaccaccggtgaatcgcccgtcacccatatggatgagaaggtcgagctggtcagggccgtcaaggaggtcgtcgacgttccggtgatttccggcgccggctccaacgacaccgcacacaccgtgcgtatggtcgaacagactcaggaagcgggcgccgacgcggtgctcgtcgtcatgccttactattcccgcccctcgcaggacggtatcgtcggccactacaaggccgtcgacgaatccgccgaaaagccgatcatcgtctacgatgttcccggccgtaccggcttgaaggtcaaggtcgaaacctacgaccgactggccgaacttgaacacgtcaaggctgtcaaggacgccaccggcgatcttgcagccgcagtggagaagcagcagcgcaccggcctcgcctggtattccggcgatgacggcctgttcctgccgttcctctccatcggcgccgtcggcatcatttcggtgattgcccacgtcgcctccaaccccatgcagcagcttgtccaggcattcgatcgcggcgatatcaccaccgcccgtcgcctcgccaaccagctcgccccccttgtccacgcgttgaatggcgacggctatcaggccgtcatggccaaggctgcgctcaaggtcaagggcgttatcccctccaccaccatgcgtctgccgaacatcggtcccgacgccactcagcttgacaaggctgaagagggcatgcgcgctgccggactgctgtaagcccgaaacgctgcatacgggttgccagcccgccgcccctgcatgacagagcagaggcaccacaacagaaatcccaaaaaggttatggcacaagaacaaaagaaaacaagcaagaacacgaattctcgccgtcgcggttccgcgcgcggccgcaacgccaacggatccaacagccgtacgccgtcccgtaagatcaacgccacccggcaggccaccgcaccccagcaggatgccgtgctgatcgccccgccgaagtaccgcaagggctccatgcgcatcacgccgctcggcggcttgggtgaaatcggccgcaacatgaacgtgatcgaatacaacggtcacctgctgctcatcgactgcggcgtgctcttccccgaggaggagcagccgggcgtggatctcatcctgcccgatttcagctacatcaagaaccgtctcgacaaggtcgacgccctggtgctcacccacggccacgaggaccacatcggcggcgtgccctacctgctcaagctgcgtccggacatcccgctgatcggctccaagctgaccctcgccttcgtggacgccaagtgcaaggaacaccaccagaaccccaccaaggttgaggttgccggccgtgagaagctcaaggtgggccccttcgacctcgaattcgtcaacgtcacccactccatcccggacgccctggccgtctacgtcaagaccccggccggctccctgatcgacacgggcgatatcaagctcgaccagctgccgctcgaccaccgcatcaccgacctcgtcgaattcggcaagatcggcgaaaagggcgtggacctgctgatgatggactccaccaacgccgaggtgcccggcttcgtcaagcccgagacctccatcggcccggcccttgaccaagcgttcgcccaggccacccgcaagatcatcgtcgccagcttctcctcccacgtgcaccgtgtgcagcaggtggtggacgccgcccacaagtacggccgcaaggtcgtgttcgtcggccgttcgatggtgcgcaacatgtccatcgccgccgacctcggctacctgcacatccccgaaggcaccgtcgtggacctgaagcaggccaacgacattcaggacgacaagctcgtcttcatgtgcaccggttcccagggcgaaccgatggccgcactcggccgcatcgccgacggcaaccaccgcgacatccacatcaacgagttcgacaccgtgattctcgccagctccctgattccaggcaatgagcacggcgtctacaaggtgatcaacaagctcgtgcagctcggcgccaaggtcgtcaaccgcgacaacgccgccgtgcatgtgtccggccactgcaacgagggcgagctgctgtacatgtacaacatcgtcaagcccaagtgcgccatgccgatccacggcgagaaccgtcacctggtggccaacggcctgatcgccgtcaagaccggcgtggacccgcagaacgtggtcttggccgaagacggcgacgtggtcgacctgtatcacggcaaggccgcggtcgtcggctccgtgccgtgcggttacgtgtacgtcgatggcgattccgtcggcgagctgaccgatgacgagctggaaaagcgccgcattctcggcaccgagggcttcgtatccgcgttcgtggtggtcgacaccgacaatcacgaggtcgtcaccggcccgaagatctacctgaatgccgtggccgaggacgaaagcgagtttgacaaggttcgtcaccagatcgtcgaacagctcaacgaccagatgatgcagggcacgcgcgacacctacaagctgcagcagaccatgcgccgcacgctcggcagctgggttgcgcgccagctgcaccgcaagccgatgatcgtgcccgtcgtggccgacatcgcccaggacgtcgaaaccgtagaaaccaagtagtccggattatccagggacgaccgtaaggagtaattgaagtcatgcccggttctaatctcactcgtattgaagccgaagaacgtaaggccgttatcgaagcgccgattcattatcacgtcgaccttgacctgacggtcggcgcgaagaacttcggttccaagtcgctcatctgcttcaacgcgaagcctggttcgtcgaccttcctcgacctgattgccgacgaagtgacatccatcgacctcaacggcaagtccctggacccagccgtggccttccaggacaaccgcatcgaactgaccgacctcaaggagaagaacgaggtcaccgtcgaagccaagtgccgttactccaacaccggcgagggcctgcaccgctcggtcgacccgtccgatggcaacatctacctgtactcccagttcgaggtgccggacgcgcgccgcgtctacgccgtgttcgaccagcctgacctgaaggccaccttcgatttcaaggtgctcgctcccgccagctggatcgtcacctccaacatgccggttgccaccatcgaggacgatccgcgcgaaaccctcgacggcaccctcggcgacaagccgaacgaaagcacccgtctgtgggacttcgagccgaccccggtgatgagctcctacctgaccgccatctgcgccggcccgtacgccgaatggcacaccgaatacctgaacgaagacggtcgcaccgtgccgatggcccagtactgccgacagtcgttggccaaggccttcgcgaaggacgtcgactacctgttcgacatcaccaagaagggcttcgcgttctacgccaagacctggggcgtgccctacccgtacgccaagttcgaccagatctacgttcccgaatacaacgcgggcgctatggagaacatcggcatggtcaccatccgtgactcctacgtgttcgagtccaaggtgaccgacgcgctggccgagcgccgcgtggtgaccgtgctgcacgagctggcccacatgtggttcggcgactatgtgaccatgaggtggtggaacgacctgtggctcaacgagtccttcgccgaattcacctccacgctggccactgccgaagccaccgaatggcatgacgcctgggccaccttctgctccggtgagaagagctgggcgttgcgccaggatcagctgcccaccacgcacccgatcgtcgccccgatcaacgacctcaacgacacctacgtcaacttcgacggcatcacctacgccaagggcgcctccgtgctgaagcagctggcattctacgtgggccgcacgcagttcttcgaaggtatccacaactacctgaaccgccacgcctactccaacgccactctggccgacctgctgagcgaactggagaagacctccggccgcgatctcaaggcctggagcgccaagtggctggaggaatccggcatcaacacgatcgccaccggcctgaccgtaaacgcggacggcaccatcgccgaattgaagctcacccagagcgcgccggccgaacacccggtgctgcgtccgcatcgcctggccgtcggcttctacaacgaagacgccgaaaccggcaagatcgtgcgcaccgagcagttcgaactcgacgtggatggcgaaaccaccatcgtcgaggccgcggcaggcaagccgcgcccggcattcgtgctggtcaacgacgatgacctgacctacaccaagattcgtttcgacgccgaatcccaggcattcgccgaagccaacctgcatcgtttcgacgatgccctggcccgcgccgtgacctggctcgccttctgggatatgacccgtgacggcgaattcccggccgaacgcttcgtggacatgaccctgcgtcttctggccacggaaaccgaatccaccaccttccgttacgcgctggcctgcatgagcaccaccgcccaccactacgtggcgcccgcccgccgcgacgatgtgctgcgccacgtggccgccgagctgtggaccctggccaacgccgccgaagccggctcggacacccagttccagctcgccaccgcctacctgggctatggcgaggagggcgatgccgcattcgccgccaacgcacacggtctgctggacggcaccgtgcgtcttgaaggcctcgaaatcgacaacaacttcacgtggaccatcgtccaagcgctcacctccgtcaacgagatgaccaacgacgacgtggacgcgcagctcgccaagaaggagaccacggaaaaccgcgagttcgcctacggcgcccgcgcctccatggccacgacgcaagccaaggaatgggcttgggatcaggcactccacaacgacgagctgaccaactcccagctcgaagccgtggcccgtggcttctccgccaccccgcgccccgatctggccgagccgttcgccgccaagtacttcgagaccgttgactgggtctgggccaacaagacctatcacatggccgaggctttgctcaacggcctgtacccgggttacgccgatcccgccacgctggtcaagctcggtgacgcctggctggacgagcacattgccgccgacaacgccctgaagcgtctgatcgtcgaaaacgtggcatcctcccaccgcaccctcaaggttcgcgaatacaacgaagcgctctgatttccttctggctcccctcgggtgcgaggggagttgtcgcctcaggcgactgagggaatcgcttccgcgaggagctacgtccacattccaacataaaacccgcaaccaatcctcaacagcgtattctcgctcaaggccggcaatgtgccggttgatgagcgacaaggatacggggaatgattgcgggcttttccataacttcattactactgattctgttggccggaatcggcgcaggattcgtgggctatgcggtaggcgcatcgtcactggtctcatacccggccttgctcgcgttcggcattccgcctgtattggcaaacgcttctaacaccgttggcgtggtcggcacgggcatcggtggcgtgatgggcgcgcgcaaagaactcaaaggccaagcggtacgctccattacgtatgtggtcattggcgcgttcggcggggtggccggtgcgtttctgttgctcaaactcgacccgagtgtctttgaattcgccgcaccagtgctgattttgctgagctcgctgatcatcgccatcaatccgcgcggccgcatgcaggccaagcaggccgccgcggatgccaccgcgcaactcaagcacatcgaagccactgaagccaccgatgccactgatgccgccaagcgcgcaaccacccctaccgcacctcaccgcccgccggaacaactcgtgcagcccatgagccaggattcctggtgggtatggctgggcgtggtggcagtcgccatctactccggctacttcggcgcgggcgccggcaccctggctctcgccatgcttgatgccgccaaaatcggcccattccacaagatcaatgcattgaaaaccctgatcggcacaggcgcgaacatcagcgcctcagtggtattcatcatccaaggcgcggtcgattggccggccgccatcatgctgtgcatcggctgcttcatcggcgggtacatcgccccgcccatcacccgcaagattcccgcaaacatcatgcgcgccgccgccgtaatcgccggcatcattctcaccatcgatctggggctcaaaacctattgattcatgccttacactgatgcagtgaagcatacagcatggccgccaaccgcagcgtggccgcagaccccgataaggtggccaatgtctggcatttggcgactgcggaacctgagcgcctagaaaccaacgcggtaggcaaagaggtgagtgacttcctcgatccgccagacacgtcgcagattcacggcgttgcgtgccatgctgattggtggttcgcggcgcgagcaggtgctgttcgccggcgttatgaaggagctactcgcgcccatcaacaatccgcgatatgtcatcatcggcaaggaatggggcgtgcgcacgtatggtgtaagcttcccatgcccgtccatatttgcccgccgccagcaggacgccgaaatactgcgccggcagttggaccgctgcctgacgcattgcaccatggtatacacccgcactgaggaaggccggcgtacgctacttcgttgccaaacgcgttctttcctcaaccgtgacgaacaactgccgcgcatactgaccacaacatcggagtgatagatcgttgcatgcatagccgagaccactccggtagaggagatgccgttgggcatgttcaccgcatggctcagcgtgttcctcgccgtcgtgttgtatacgatcacgtttgccggcccattcgtgctggtacgccgtcttcgttcccgcgccagagcccatcgacctgcccggcttgcccgttaaccgatacttctcattgttcgtctatcgagcaaggtggcacgtacgctacttggtataggggagagtttctcgctgtctgtggtggaaaatccgagttttattatctgagtcagtgctttgggtttgcgttttgggctcgatttactattggacggcgatatccggggcgggcggctagctgttggggttcttgtcgcggctgtagatgtgtgttcggtctatcggtgatgcttgtcctgttcgtggaccgggcgaagtgcgggacgacgcgcggatttcgcggtttttcgtctgccgtcccgcagagagcccgggggatgattatggtccgtaacggggattggcgtgattgcgcggttctggcggttgatagtgtggaacgccacgaacgtcaaacgattgatttctctaccatcccacgttcctgcgggacgccgcgcggaaaccggccaaatccgcgtgccgtcccacaggcatgaggctgtattcggccggccactgtccatggcggacggacgaacagaccccactggctatcgtctgcgcttctgcagcgctcaccccggccttccacggaaatcatgacagcatgaaggtgacgaatggcctggcttgcctgtggacgccgatcaatgtgtgcgacaatgattcgcggtacatggcccctggcgctggagtcgcagatgctgcttgtgtggcacaggagctgtgctggtacgtgtgatagccggcttgttgtccgtactgctgactgtatggttgccttacgaagcggtttttgatgagagaaggttgatgatgtgggatcgtgtggatgctgttgccggtgcggttgttcgtcggcagttggattggccgtggtacatgctggaggccgtggtgttcgtcggcgtgctgtggctgctgaatgctgataaatctggttttcctttctgggtgggtagggttttccggtacggcattgttgtctggtgcgtgttcgtggtggctggttcgttgctcggctggcgtatggtccgtgtcaggcagcgcatgtggccgacgtggcggtattggtatcgcaacggcgtcatcgcgtcgttcgtggtggcgtgcgtttgcattgcgatgatgtgttgggctttttccgtggtttcggggttcctgtgctggttgagatccgttatgagccggctcccggagtttcttcggtcacgtattcggtccatgcgcgtgattggcaggccaaacggaccgtcgatgctggaagcacggtggtgcttcgtggcgaagccgtgcgtaatatgcgggtgaacaggttctacagcaagggaccgtggctgacgttcacgctgaatgtgtatgacaataatggctttttgagtaattacgccatgcggtatatgcaggtggtggtgttgcctgtgccggctcgttcgcagggggtatgcgtggtgctcggtaagcgatttgttggggcatgcggttcggccacagttggtggggccgccgcagaatgtgttgcaggtattgtccgctcatccgttgcgccccaatgtgattgttgcttcggggcgggcgtatctgtgggtgttccggtgcgataggtggaatatctacgaccgtttcatgaaccccggtttggagtcgcagatgctaccggtggcgcaggagttgtgcggttttcttgccggccgcgtgtgatgtgtattgtgtacgcggcgatgctggtcgtatggtggtgtcatgccgttctttgagaggtcgtcagggcccacgcgtcatattttcaagtatggtccgtctcgtatttattgttacgatcggccggattcgctgttgatgccggtgggtgcccggcgcacgtacaggtcattgctgaagtgggagcggaagttgccctgtgccacgccgttggatgggatcgcgcgtgatctgggtgctttctggctgttggaccagtggttcacggtcggtctgcatgggtgggccgaatcgatgatcagctccagcatatcggatcgcaatcgtacgttctgccagtccgtgttccgtgcgtccgatgccgcgaaccccaagtatgtgccgttattgcaggaacatcgcgatatgctgttcgaccgggtgcgcggtggtgtggcggggttggatccgtctgcgatggattatgtcgggtttcgcgcggcccgttgccgtgcggggcttgcggattggctgttcggcccggatcgggggatactgctcaatgatgttccgggcactggcgcgtggaacacggacccgttcccgcctgatggctggcgcgagcagctgggctggacgccgccggtttagtatgccgcacgccatctgtacagtctgtacggcatcgttgggggcctcgtcatgtccggtccggtatctggtttgccgggcctgggcatctgctgctcgtccttgttccctttcttgacaatgacaggggctttggctgaacagaatgtgggagtatgcttagtttcttgtagggggttcttttattgaagctcctcggcgtaattgaccaatgacggcgtgagccgggaagagttaaggagatgggccatggcagaacatatttccgctgaagccgg

SEQ ID NO: 2799 - DNA, 7936 bp, Unknown
  R36_18m  MAG No. k141_19000
cccgccgaaacctctgaccagctcaacaagcccgccaaatccggcaaactggaggtctccgacctcatcaccatcggcgtgtttgcggccctgtacttcgtgatggtgtgcatcgccacactggtgagcaccctgttcaccagcggcttcggctccatcttcctgcccgccggacgctcgatccgcgcgcgagactcttccttctgctggtggcgaacctcatgctgttcttccatgtagggctcgccacgcaaatagtcatggtcgtgctgttcctgttgcccctgctggcggccgcccgatggcgaaccgcgttgaacttcggcgtgacctatgccgtactcaccgcgctgggaatgctcgaccccgatgccctgggactgccgtggctgcatgtggtctccgcgctggccgtgggcgtcacgatgatgctgccctgtttcatcaccgactcgcatggctcaacggcgtggccgaccggtacgtggtattcgacggcggacatatcgtgcaggattacgaggccgatgaattcctgtccctctccccggctgcgtggccgccatgggattgcgggcgtttgacttggaaccgtatcggcaccggattgcggccctggcttcaagcccggccgccgaatccggctccacggacaatgcctcgctcgccatcgaatggttcgccgaggacgacaccagcctcgacacttacgaatacgccatcgaccatgtcatcgagcacgggctcgaaagctcccccaccttcgtgctccgcaccgctgatccggccgccgaagacagcccgttccgctggctgctggccatcaaccctctgccttcgcgcaaggcgttcgccgagggcgggctgcccagccacctgcatttccagtacgccaacgatctgcacacgctcgtcgccacggatgaggccaccggcgccgagaccttgcgcaatccgcgttggtacgcacaccatgtgctccaacgagggaacccccgaggaccgttgcgccatcatccgtgcgttgcaccacttgcagtagatctggcaacatacggcggtatgacggctccccgctagtgaaacagcatcgcttcagtagccatgcgagtgcagatactcatcatcgaagccggaataatggccgatctcgtgcaacacggttttgcggatctgttggcgcagctcggcccgtgttgagcatacgcgttcatgcggtcccttgaacagggtgatggcgtcccggcatcacgccgctgtagcccgtggttcgctttgtgatgggtatgccctcatacagtccgagcagctcaccgcacggattgctcattgtggccagttcgcgctcattgggctcgtccgcaacgacgatgccgacattctccagcacccgcgcaaaccgttcaggcaaatcatccaacacctgttcaatggcccgttcaaactcatcgtcaccgatgtgcatactcaatccttcacctgttgcttggctcccacgataacagacatattccgggttccggcttcttgcgggtgccataacgttgcgcggaacgcttccaatcattcattaggtcgattcttcattcattaggtcatgaggctgcgattgtcggtgttggaatggcaccattccagtggtgactgtcagagctcaccgacctaatgaatgaagaatcgacctaatgaatgcgtccggtcatatctcattgtgaaaatgacccggtattgcggtattccgcaattgcacttccaacgattctgaagtattcatccagattctgcgtggtagcgaacgttcttcttgtggcgggaaaagtcttatagcccgcgaaggagaggttgttccttttctcgatatctccttcccatcggtttcggtcatagtggtaccgtccgtcgtattccagaatcacatgatcattcggatacaccatgtccacaaccacctctttgttctgcaatgggaggtatatcggagcattcacctccaattcgggtaatccacgttttaccgattcaaggcgaaggatgctttcctgcggcgaatcggtgttctctctgcacaacgagagcgctttgcgaaataatctgatacctgggaatctacctatatcggcgaggaacaacgatatcttgtctttcgttgtctgtttcaaatgctcattacggcaggtggcccaatccaaggcaatgaccatactttccacatcgacgaactgtgcgatctgacacagcgcctgttccactgaaaccacggcgataagatcatcaatcatcgtctggtcaatgccatgaccccaataatggcattgcgtttcggtgagattcgacaatctttcagccccggacaccgtaacgtgcagtttgttgaggtcatagttgggcttgtaattcagcgtggccgtcataccagcaagctgtagcctggtgccatggctgaagcaaagctcctgtgaagtgcgcatcgatctggcacggcattgttccagtgttttctgggcgaggtctcgcgcctcatcaagtgtgaagaacgtgttgtatgcataggactccatgccatccccctgatggttgtatccgtgaaccgcgttattcacggatacaactcacgatggcataaccaacttctgcgcgcaaccagctcggccgaatcggtggatatgtgtataacctgccagctcagctgttgcggttgatctcgatgtcggtgacggtgaggttggcctcgttgatcaggttgaagaggatgacttcggccagcggaccgggctgcatgaaggtgtgctgcttggcttcggacacgtagtcgtggctatcacggtagaaggcggtgtcgatgccgcccggatagacggcgaccaccttgacgctggtgcccttgtatgcggcctgcagactcttggtatagcccttctcgccccacttggcggcgcagtacacgctttcgttcgcgttgccgcgcgtggcggcggtgctcatgatctgggcgattttcacgtcgcgctctccacaggccttgagggtttccaccgtccacagaatcatgcctttgagccccttgaggcatttgtcaatgtcagcggcttcataggcggtgggcaccttgaacgaaggctggccggcgttgttgatgagcaggtcgatgtggccgagcgcggcgatgctcgccacggattccttgacaaacgcttcgtcggtgatgtcgcctacgaaggcgcggtaggattcggctggccactgcgcgctcagctcggcctgacgttcggcgttgaagtcgatgccggccaccagccagcccttggcgatgagttggctggcgagctcgtagcccaaacccagcgcgctgccggtgacgatggcgatcttctggcctgttgtggttggcatggttgattcctttgcatgcttgcgagactcccctcagcgaggggagcctagggttaacccgttctttgctgacagctcccggtaggggagccaagaggtaggactattcttcggctacgagttcgaggtacgaatcattccagaggtcttcgtcgccgtcgggcatgaggagcacgcgctcggggttgagcgcctcgacggcgccctcatcgtgggtgacgagcacgatggcgccctcatacttggcaatggccttcagaatctcctcacgggaggcgggatcgaggttgttggtgggctcgtcgagcagcagcacattggcccgcgaggtgaccagcgtggccaaggccagacgggtcttctcaccgccggaaagcacatgggccggtttcatcgcgtcatcgccggagaacaggaacgagccgagaatcgaacgggcctgcgtgttgtcgagctcgggcgccacatgctgcaggttctccaacacggtggcgttcagatccaaggtgtcgtgctcctgcgcgaagtagccgatcttgcagccgtgaccgtattccacggaaccggtgtccggctcctcgatgtgggccagcaggcgcagcgtggtggtcttgccggcaccgttgtagccgaggatcaccacacgcgagcccttgtcgatggccaggttcacgccggcgaacacgatgttggaaccgtaggccttggagatgtccttggccatgatcggcgtgcggccgcagggcgcgggctcggggaaacggatgtccgccaccttctcggccttctgcgcctcggaggtgttttccagcagcttttcggcacggcgcatcatgttctgcgctgccacggccttggtggccttggcgtgcagccgaatgccttgcttcatgagacggtcggccttcttctcggccacttcgcgttcgcggcggcggcgctcctcgtccaccacgcgctggtgcaggtaggccttccagccgagcgaatacatgtcgatctggccgagctgcgcatccagatgccagaccttgttcaccacttcgtccagcagttcggtggagtgggagatgaccaggaagccgccctcgtacttcttcaagtagccgcgcagccattcgatggaatcggcatccaagtggttggtcggctcgtcgagaataagggtgtcggcgttggagaacaggatgcgcgccagctcgatgcggcggcgctggccaccggagagcgtgccgagctgctgctccatgacctcctgcggcaggccgagcgaggcggccatggaaatcgcctcggactgggccgcgtagccgccagccttgtcgaagtcctgcatggccttgtcgtaccgggtcatggccttgctcatcacgtccggatccgggtcggtcatatccttttcggccttgcgaatgcggctgatgatggtggcgatgtcacgcgcgctcatcatgcggtcgagagcggtctgcgtgggatcagaggcgtgcgtgtcctgcggcaggtagccgagcttgccggagacgcgcaccttgccggcggtgggcaacatgtcgccggtgatcacgcgggtcagcgtggtcttgccggcgccgttgcggcccaccagaccgatcttgtctcccttggccacatggaagttggtggggtgaagcagcgtgcgcgcgccgatctgaatttcaagtccctgcacctcaatagccatgaataacctacttgtctgttacgaatactgtctcttaccaaagtccgactgtccatcatagcgaacactatgccgaccgggctcagccgacgctcatgcgtccatacgcttatatgcccgtaggctcatgtaatacctgcaatgtgcgcgataagacagttgaatcgtgatttccgtcgtacactatccatatccgggcacgcttgcggcgcaatgcgtgtgcagtataggaaggatttcccacatggaaccaaattatctcgtgttattgggaatcgtgatcgtgattgtgggtttcgccctcaaacttgatgcgattctgatcattatcgtggcggctgtggtgactgcgctggtcggcggcattggcgtcgacggcttcctgaccacgttgggtacgtcgttcgtctcgaaccgcagcatggcgattttcatcatcgtgttgctggtcaccggtacattggagcgcaacggtctgaaaaccgcagccgcgcagctgatcggcaaagtgaagaatgcgacgcccggtatggtgatcgccctgtatggtgtgatgcgtctcgtgttcgccgcgttcaacgtgagttttggtggcgtggccgggttcgtgcgtccggtcatcatgccgatggcggtgggtgcgattgcagcgtccggtcacgagccgaacgacgagtatgtggaagagctcaagggcatggcttccggcatggagaacgtcgcatggttctttggccaggtgctgttcgtgggtacggccggtgcgctgctcgtacagtccacgttgaagccgctgggttatgacgtcgaactgttgcgcatggccattatcgagattcctgtcgcggtgattgccgtggcggtcaccgccgtctattacatcatcaaggacacacgactgcgcaagaagtactacggtgccgaagccgccgctcaggccgccaccgctaccaccaccggcaaggaggcctgatatgtcgttcttcatggaccccagcgtgaccgttggcacgaaaatcctcgagttcttctatattttcatgggtttcatgtccgtgtatgcgggcgtacgcaacctactcgataaaaccaacaaggcccgctacggcactttcgtgttctggacggcgctcggtatcgtcatcgcgttcggccgttggattccggccattgcggacggcgtgctcattatcatcatggtcattcccgccatcttccgccaagtgcgtaagggctcggcatccgattcgagcgctcccagcaccgccgaagtggccgcgaacttccagcgcatcggcatgcgcatcttcattcccgccctgtgtctgggcgtgttcgccattatcggcgccctgattcccagcgtcagcgccctgaccggctgctgcatcggtgtgatgattgccgccgtgattctgttcgcgttctcgcatgacaacaagccggtcgtattcctcaacgattcggaacgcctgttgtctgccatgggtgcgctctgcatgctgccgatgctgctggccagtctcggcgcgattttcacagccgcaggtgtcggcgacgtgatcgccacgctggtcggcggcattattccgaagggcaacgtcacgctgggcatcatcgtattcggtgtgggcatgatgctgttcacgatgatcatgggcaatgccttcgccgcgattaccgtaatgaccgtgggcattggcgcgccattcgtgctcgccttcggtgcggacccggcggtgattggcattctggcgctgacctgtggctactgcggcacgctgtgcacgccgatggccgccaacttcaacatcgtgcccgtcgcgatgctcgatatgaaggaccgcatgggcgtgattaagaagcaggtgctgcccgcattggtgatgattgtggtgcagatcgtctatatgctgatcgcgcaataacctcgttgtccaaataccacaacaatccgtgaaataaggagctaatgatgagcaagattctggtgaccggattcgatccgttcggcggcgagccggttaaccccgcattcgaggcagtcaagctgttgccggatgaaatcgccggtgcgacagtggtgaaactggagattccgacggtgttcacgcgcagtgcgaccgtggttgaggaagccatggtgcgcgagcagcctgactatgtgctgtgcattggtcaggctggtggccgttcggctctgaccgtggagaaagtggccattaatttggccgaggcgcgtattcccgataatgatggcgagcagccgttcgatacgccgttgcgtgaggacggcgacaccgcgtatttcgccacgttgccggtcaaggccatggtcaggaacatcaatgaccacgggattcccgcattcatgtcgtatacggcaggcacgtatgtgtgcaacagcatcatgtataacgtgttgtatctgattgaccgcaaattccccggcgtcaagggcggcttcattcatgtgccgtatgcgaccgcgcagggcgtgggcaagccgaacggcacgccgaccatggaaatcgcgaccatggcgcgcggcatcgaagccgccatcgaggccgctgtgagcaccggaaccgacgccaccgacatcatgggcgaaacccactgatacgcataacgatgcccctgctgacagcagttgtcagcaggggcatcgttatgcgttgaacgttacagttcgcgcagctgggcggcgatctggatggattcgacgctggcctcggccttgttgcgcgtctcctgccattcggtagcgggcacggagtcgagcacaatgccggcaccggcctgcacgctcgcctcatggtcgcgcaggaacgcggtgcg

SEQ ID NO: 2800 - DNA, 30294 bp, Unknown
  R36_18m  MAG No. k141_19245
gtggcacgtttggccggagccggtccgtacgtattgaatccgcaggttggcgtagcgataagcaacagaccctcatgttcgccgacgaaaccgttgcgatgatcatgaccagctacgacgccgaaatacccctcgcgcagcgcctcaaactcgtccgactcatccgggcaggaaatgccttcccccagatacccgccggcttgagtgcgatcctcgtccagcacataataggtatccgcatgcttgcggtagccctgcatggcgaaagccgcattggcggccaccggtttgagtacctggtaatactccggcagcggcatgtgctggaacaccattgatttggctccgatatgttcgggcaaagccttgaggaaggccaatgtctcgggcgaaggcgtgccgaaaccgcctccatgcgcatagtcaccggaattcaccagtaccagtcccagtacgttgcgcgtgcaatccacatccatcaccggcaatgcaaaagtgccgggaatggtggacgcggaaatcggcgcatcggtttcttcaccattggttgccgcaggcgagccgtccttatgacacatatatacggtctgcttggccagcgcatcgctcggcggattgatgcaaccgggaaactcgcggtagattccgtcgagttcggcattgctcaaaccgcactggaaatcgtggttgccgtaggtcaccgcccacggtatgccccgtgacgccaaaggagaggtaaattgaccgatggccttgcgcaccaattcacgcgtatggttcaacgcagattcaggaatcgcctcttcgcaccaacggcgtttgcggaagctcttggcaaaggccggatcgtagccggcgatctggttgccggagaaaatcaccagatcaggccgtgtggcatcaaggctggcctcaatcagggcgatggtgtctttggagactttcggcccatcctgaatgtcggcaatctgcagcacgcggaacttgccggaatagtggaattgcagtcgtccgagacgcgcagagatagagaccgggcggccgtcttcggcatcggccggcttgatacggggtttcgacgacatcccctctggcgtacgctgtgtttccgtcatgccctccactgtacacacaaacgaaaaggcccgccggagcgggccttttctacaagttcaactactggagcagaatctctgcacaacatcatcgtcgtaacggtaagtctttccaatgcccgtccaacgtaacagtcctcgtgaccatacactatttgtgggctctgctctgttcagttgttcttgtacctcataatctattcatcactcccgtttctcgcaacctgcagagagtcgttgtgcgttttttatcacaactgttcaatcgcactttctgactatcggaaaacgagctgaaccgttcacatcgaacccgtctgatgttcggtttcgttcgtttcaccgccgctcacggcgtgtcgcgagcacgctagcacactcaaaaccaaccaacaccgaactaacatgaacacccgttgaattctggcgcgttcagtcgttttccggccacgccagagcttacgatataagctatggcacagatatttgacgcaccctcgaaggcaattctgcgcagccaaatcgcagagcatattgccgaaaacgacaacaacgaccgccgcgtcgatcaggaaggcgaggcaccgctgcccaaggaccgtttcttcgaccgcgagctcagctggctcaagttcaaccagcgcgtgctcgaatgcgcggagaacgaagacatgcccctgctcgagcgcgccaacttcgccgcgatcttcgcctcgaaccttgacgagttcttcatggtccgcgtcgccggcctgaagcgccgtatcgactcgggcatcgccgtgccgtctgccgccggcctgagcccgcgtcagcagctgcgcgcgatcagcgagaccgcacaccgtctgcaagacgagcacgcacattacgcgatcgacaccattctgccggaattggagaaggagcgcatcgtcctgctgacgtgggacaagctcacctcctccgagcaggagcgtctctcgcgttactaccgccagcaggtgttcccggtcctgacgccgctcgccgtggatccggcccacccgttcccctacatttccggcggttccatcaacctggccgtgattgtggagaacccggcctccggcaagtcgcacttcgcccgtgtcaagatcccgggcaacctgccgcgcctggtgccggtggacgacatgaccgacgaggagtccaaggacgagcgttacggcttcatcgccatggaaaagctcatcgccgcgcatctggaatccctgttcccgggcatgatcatcaaggaggcccgctccttccgcgtgactcgtaacgaggacatcgacgtggaagaggatgacgccgagaacctgctcaacgccatggagaaggagctgctgcgccgccgcttcggaccgccgatccgtctggagatcacggacaccactagcccgttcctctcccagctgctcgccgaccagctcggcgtgagccaggacgaggtataccgtctgcccagcccgctggacctgaccgtgctctttgagctcggcagcgtggaccgcccggacctgaagaaccgtccgttcgtgccgaccacgaaccgtcagatcgccgaggtcgagtcctcccgtgcgcaggacattttcgccgccatccgcgagcgcgacatcctgctgcatcacccctatgactccttctccacttccgtgcaggccttccttgcgcaggccgccgcggacccgaaggtgctggccatcaagcagaccctgtaccgcaccagctccaactcgccgatcatcgacgccctgatcgacgccgctcatgccggcaagcaggtgctggctttggtggaaatcaaggctcgtttcgacgaggacgccaacatcgcgtgggcccgcaagctcgaacgcgccggcgtgcacgtggtgtacggcatcgtgggcttgaagacccactgcaagctcatcgaggtcgtgcgtcaggaagcggacggtctacgccgctactgccacgtaggcaccggtaactacaacccgaagaccgcgcgactgtacaccgatctgggtctgctgacctgcgacccggtggtcggccaggatctgactcgtctgttcaaccagctctccggttacgcgccaaagtccagcttccaccgtctgctggtggccccgcgcaccgtgcgcaccggtctaatccagcgcatccgccgcgaggaggacgccgcccgcgccggcaaggaggcctggatcaagatcaaggtcaactccatcgtggacgagaagaccatcgacgccctgtaccgtgcctctcaggccggcgtgaagatcgacatcgtcgaacgcggcatctgcgctctgaagcccggcgttcccggcctgtccgagaacatccgcgtacgttcgattctcggccgcttcctggagcactcccgcatctacgccttctgcaatgcggacggcccgcagatcggcgagggtccggcttccggcccggaggtctacatcggttcggctgacctcatgcaccgtaaccttgaccgccgtgtggaggctctggtgcgtgtcaccgccccggagcagattgacgggctcatcaagtacgtggacctgcagatggccgactccaccatgagctggcacatgcagcccgacggcacgtatgtgctgcacaccaaggacgacgagggccgcccgctggtcgacagtcaggaatatctgattcgcaagcaccagcgccgccccaattcgcacaactgatttcactcgatgctccctgtcaacgcaagctgactgagggtggttacgatgcccggctcctctttcgagaggatgccgggcatcgtcgttcagcgcgcaaaactacgtagcagcggtccaacgtgacctacaatacaagagatgggtacgaacagtatgagacgaatcgtggaagccgccggcggtattctgtaccggtggaaggatgatgccgagccgacgcaggcatcatctccatcagcgaaatccaatattgccaccgatggcaccatcatcgcgaacaccacggattctgacggcaaggccacggcagcacacggcgcatcggacgcggctcccaccccggacctggcgcaggccgacagcccggccgcggcggacaacgtactcaaccgcatcgaactgtgcgtcgtgcatcgcccgaaatacgacgactggagctggccgaaaggcaaggtcgacccgaacgaatcgcaccggcatgccgccgtacgcgagatcggcgaggaatcgggcctgtccgtggaacttggcccttatctgggcgacatcgagtacccgctgtccgaagagggccgcaaacagcgccataccaaggatcggtcggcggataccaagcatatccagttctggatggccacgccgatcagcgccatcgacaacctgcggcgcacccatgcgtttggcccggtgcatcgggcggacatcggcgaaatcgacgaagttttgtggctgacgccggccgaggcccgcaagaagctcagccattccaccgataaggacatcctcgcgctattcgttgatcgggtcgaagaaggtgcactggacgcggtgccggtgattatcgtgcgccacggcaaagcggaagcgcgcaagctgtggaagggttcggacgcgaaccgtccgatcacgccgcgcggcgcggctgcggcatacgcgctgaaccgcgagctggcgtgtttcaatccgacccgactggccacgtcgccttgggtgcgctgccaggagacgttggagatgttcgcgtggcagaccggacgagacatggttcatctcgatccgctcaccgaagatgcatacgccgctgcgccggacaccgcatgggagtgtctactcagcgaaatcgagttcgcacttgagcgccgtcagcccatagcgatatgcatgcaccggccggtgattggtggtatgttcggacacctgcgcagcatgtgcgttgcgccgtctttgagcaaacgcctgatcgccaagacaccgttcatgccgaccggcacggcggtggcgctgttcgtcactccgacgcctcatggtcccaaaatcatcgatattcagaaggttcaaccgcttgtctactagacccgcatttcctgattcatccaactcctcggccgctgccgctgcagctcatgccgcgcacaatggtgccgccggcagtctgggcccgggcttcggctcgttgcgtgcggccggagcggcattcggacctgctcgcatgggttcttcacgcccctcgcgcccggctcagctcgacccggctgtggccgatggattggccggtggcatggacccgcaggcgttgagcgagatgagtcatctgtctgctgccgcattgctggatcgtgtgcgccatagcgaagacccggcggttgttgagcgggtgctcacgttggtggagacggtcggcgtggatgaaatcgccgaactgtggagcgatgccgagccggattcgctgcctggtgtgctgtggcgactgtatatgttgcgtacgtggatgcgatcgaatcgcgactcgatcgcgcatctgtggcgcttgggtgagccggtggccactaccgcctccgccatcgccggcgtggatcaggctcccagtgaagatgacatcgtgcgattggccgattcgattctctccggtgcttttgtgggcgattttgccgtggcgcttgagcgtgcggcggcgtttaccgatgtggtggcgttgggcttgcgcgtggaggcgcggcgcatggtgacccgggccgaggccaacggcgccttctcctcggatgccgatgagaaggccgtgcgcaccaaagccgcccgccttatgcacaccgccggcagcctcatggccaccgccaaggatttccagcacggtgccaacctctggcgtcgcggacggttggagtagccctgctccaggctccctctgatgagggagctgtcacgggcgatgcccgtgactgagggagagacccaccaaccgcaccccaacaatcagctaccagccaacaccacacctccccggcgcggcgagccccatcgcaagctatactaagtatccgcgtcggaccgtgcttaagccccgggctccattttttgccgccgcgagcggcccttgcgccgacaggcgctttcgcggttcggcgcttcttttcttttacccgattcacgccccgaacgttgcgatgggcacgaccagtatgccgtcattgcggcgataggccttcccacctcggccggtaaggaacatcatgaactctggttcgcgaacttgggccatggggttgccacagattttgtcgcggaaggatttgagcttatccgcattgtcatcgttcaccttaaggtcactgagttttatttcgatagcaccccacctgccgtcagacaactcgataatgacatcaacttcaagccccttgtcatcgcggtagtaggcgatgcgattgttcgcgcccggcatggccgacagatatacattcaaatcacgaatgcacagcgtttcaaacagatcgccgagcgtctgtgtatcgcgcatcagagtattcggcgcggcacctaaaaccgcagcaggcaacgaaggatccacgaaatatcgcttgggcttggttcgcacacgactctttgcgcggagtggcggctcccaaccctccaaatccgtcagaaggtacaagtccttgagcattcccaaatagctctttactgtctgcgtatccggttcacggcgctcatcgccataggccatatccgcagccagcgtcgcatattttggtgcctgcgatacgttcacggcgagcgcacgcatgagtgcacgcgcggtttcagggttcttgttcatcttgggcacgctgatatcaagcacactcttgatatattcactcggaatttccagagcaaactcgtcatccaaatcaagatttgcgggccacccacctcgacagcaccatctggcaatatcttcaatgctggttgcacattcggcaggctcgaattgtccatcaaacaaaccagacaagctcactacaccggtagattgccctgactcgcacagactcataggccacatacgcaagcgagaaattcgacctgtgccactgtggtgaattgtttctcggtccttcggaatggccgagcccgtaagaatcagctgccccttgcgattcgcattgtcatccacatgacgacgagcggcatcccaaatttgcggcacatcttgccactcatccaccaaatgcggttcattacccatgagtaccaatgccggatcagtctgtgcggccgcaaaggtagcggcatcatccagacgatccatacttcgcgagcgggaaagcgccgtccatgtctttccacaccattttggcccgacgatttccaccgcgccgaatgctttaagtaacttacctaacctgccatcgaccacgcgagcacgataatcaggttgagtcaaggtatcactacgattgttcaaatcgttcattttccggcctttctcagctacccaatcacctcaatatagattttacacctttctcattcccggttttacaccattccgattcccggttttacaccattccgattcccggttttacaccgcaaggtgtctagtttcttcctatgacttaatccaccgagaatcaatccaacgaatcttcgcgcacgactgcgagcgctaggccaaacttgacccattccgatgagacatatttcacaataccgtagctttttcagctggtttccagaaaccgttgacttactgtccggttcggcctagatacgctctttttcgaatctcatgaaatcaacgtcaacaccttggggaaactctcatgaaggcaaccatcaccaaagcgactatcgcagttctcgccggactcgcgatcctcgccgatgcctttctgcttttttcgatgaagatatccaatagacgccacgtgaatgtcattgccatagtgacggatgcacgcgcacgatgcgagcgtcgagccgctccacgatgtcgtggtgatgcgtggagaacagtacagtcttgccggcatcagtgaaggcgcgcaatacctcaaccactacgtcggtattgcgctcgtccaagccgtcggtcggttcgtccagaacaagcaggtccggattcatcgacatgcagcaggcaatcgccacacgctttttttcaccgccagacagacggtatggcgcccgctcccgcatccgatccaagccgaacaacgtcaccatgtcatcgactctgcgctgtacttcggcatccggcaaccccatctgcaacggaccgaacgcaatctcctcttccaccgacgggcagaacagctgggtgtcggagctttggaacacgaatccgatgcgctgatgcagcgctttggcgaacaggctgttcttcgcctcgacttcctcgcgaaccaccggagtaccgccaaaccgatactcgcctgagtccggaaattccagcgcattgatgatgcgcatcagcgtggtcttgccgctgccgttcggcccgagcagcgccacgcgctcaccgcgttcgacggtcagcgaaaaatcacgtagcacggcgtgcgacgaggtttcatcgtcggcgtcgccgtaatctttataggaaaagtcgatgtgattcagttcgaccagcgggtcgccgcggaaccatgagttatctggccgcatggctgcagtttgtttatgattacgctttaatccgaacattattgggctccattcattcgaaccaccctcatcccgaatacaccgccagcgcaatcattgcagcaatgcacacggcatacaccccgttgcgccacgtcagcagacgctcgtggtggatatgatacgtaccgtcaaacccccggcacaccatcgattcagccatttgccgcgcctgcgtattcgcacgcagaaacagcgcgcccatcaactggccggcggacgtcagcttggtccggtcgcggcccacgctgcgcaaccgcagcgcatccagcaactccaccatcgaacgaccgagaatatcgatgaactgaatcgtcacgtcgcagatataaatcaccgaatcagggtagccaactgcgcgcagtccggcaatcaggcgattccacggcaccgtacgcgccagtgcgatcaccagcgacaccgccacgaacgcacgcaccaccagccggaccggcgcactgtactgcccaatcagcaggctcggcaccgccacgaccaggctcaggatgcatacggccagcaccgggccgagcaacgccctcatcaggcgcgccggccgggtcgccatcatcagcagcaccaccgccagcatgatgtacgagaacagcatgttgcatgtgatgttgacgcagacaatcgcggccagtatgcccagcagccgcacgcccggattgaccgagcccagcaccttgtcgaccgggctcgactcaatcggcaacgcatgaccaacctgctcgagtacgctgccgaaatgccccaggttgtgttcgatgaaggatgacttgtcagccggaggatcgtaatcctccgactcacgcatccatgcaggtatcgtcaacgcgcggatgtcttgccgttgccgctcaccgcgagcgccagcagacggaacacgatagtgagcacggcgatgccaatcactgcggagagaatgtagccggcgatgtccggcagaccctgcagcgagtagtcaggcaacagcgcatcccacgagaagccatgggcgatgtactgcggcacgtagttgagccccgtggcactcatgaagtcctcggcgccccactcgccccaggcgtcgccggtggcgagcaggccgatcggggaaagcaccgccaccacggccagcgcaatccacgcagacttgcgcagtccggcgtgcgcgacctgtttgccgtcagcaccggcggtctcggcgaagttcacacgggcattgtcttcgataatctccggtgcggtgcggcgcacgaattcgacaaccaccacggtcaccagaccctcgaccacgctggctacggccaggtgcgggatcagcatggcgggaatcgtcacgttaaaggtgaacgggaagtagagcgcctggccgtcagcggctttgaacagcagcggctgcacgccgagttccagcgccacgcagaatgcggcgagcgtgatgccgatatagccggacacgaattcggccacgcgttccttccagccgtcgggcagcaccttgcgtagcaacacgtacagtccgtaagccacaaacggcagcacgaacgccatgttgaagcagttggcgccgagcgtgatcaggccgccgtcgccgaagagcagcgcctgcagcagcagggccaccgacacggagaccgtcgcgtactggggaccgagcagcagagcgatcagcgcgccgccgacaccgtgcgcggtggtgccgccgggcgtgggcacgttgaacatcatgatgaggaacgagaacgccgcgccggcgcccaggtaggccatcttctccggcgtgctgttgcggatcacgtagcgtaggcacagcacccacaccggaatcatgatgacgtagaacaacgccccggtggacggcgaaatgaaattatccggaatgtgcatcgccaatgtgacggtgtcaggtacttcgattatatccaacttccctctttttgttgatttcggagctcgaccacaacctcccgctccaggaacgtgatatgtaatatcacaactgtgattcgtctaatgcacaaccatgcaaaatagcttgcaattactagcgacacaccgtgtaccatatatccggtttccgtgttttcggatatttttccgctatattttttgcatatttcgatcattcgttacaaagtgacgcaacaggctctctacactgtggcatgaaggacgtggggattctcacgccacaagcaattttctccaaggagaacggatgatcgccaaagaaatcaccggcaacatcatcagtcagcagtacagcgacggcaaacttaatgtgtcgattgccttcgactggttcgaaaccgataagaagcgcatgcgcaaggtggccgaggacggcaccgagttcggcatcatggttggcaagaccatcaaggatggcgatgtgctcgccgaaaccgaagacaagcgctatttcgcacgcattaaaaccgcacagctgattgagattccggttaactcgatgaaggaaatgggacgcctgtgcttcgaactgggcaaccgccacctgagtctcaaggtcgagaacgaccgcgtgctggtgccgtacgaccatccgaccatggaatacacgaagaagatcggttatgaaccgcatatcatcgagggtgggtttgacggcttcctgatcgtcaaggcccacgccggcaccggcacactgattccgggcaccaacaagaccacgggcgacgtggccgaggaggagcaggaagccgaggccgacaaggaattcccggccgaggaggccgccggccatctggatgtgcatacacacgacgcaggtgagggtgagcccggcgaatatgagatgaacggcgtgctgcaccgcccggacggctcccacagccacgacggcggccgcacctggcacacccactgatagccccatgaacatcaacgaaaccgaatcgcgacgtctggccatgctgcaggtgtgcgacagcgtcttccccgtgggcgcgttcgcgctgtccaacggcatggagaccttcgtacagcgcgacttcttgcgccgtggcgccgatttcgaggagtatatgaagaactacctcgaagtcgcaccgtacaaggaaatcgggcagatggtgctggccggcaagtacgccaccgattcgcgagtctcccgcaaagggctggccgagcgactcatcgaacttgacgagctggcctcggccctgcaatccgcacgtgaaatccgtgaaggcagcgagcgcatgtgtacccgcctggtcaagctggccgagcagatggatgccggccaggcgcagacctcggatgggcatcgtgggttcgccaagccaagtcctgccggcaatgccaccgcatccgctgcggattcgcgcgaaaacagcatcatcgccgtgcacgagcatcacaccgaacgccaccagctgcacgatgccgccgacggcctgtacggctcgccgtcgctcgacctgtatgccgggctgattcgcgagcgccgctgccgtggcctgcattcgatcgcgatgggcctgtacgcggctgaccatgcgaacgacgtgcgcgacgcggccatcatgtatggatattcgctgttgagcgcgcttaccatgtgcgccgcaaaggcgattccgctcagccagtacgctggccaagtcgccctgcatgattcgttcccgcgcctcgtgcgcgcggtgaatatcgcgatgacgttgaagcccgaggatctcggcatctccggagcttacctcgacatcgccgccatgcagcatgaaatcttgtactcgaggctctacatgagctaattatcctggctcccctcaaggaggggagccaggataacctcacccgcaaaccacatacctaactaattcccacataaaggagaaaccccatgtcatacgtacgcatcggcgtcgccggaccggtcggttccggcaaaaccgcgcttatcgaacgcctgacccgcaagatggctgacgaatacagcatctgcgtggtcaccaacgatatctacaccaaggaagacgccgagttccttatcgagcactcacgcctcgcgccggaccgtatcgtcggtgtggagaccggtggctgcccccacaccgccatccgcgaggactgctcgatgaacctcgaggcctgtgaggaaatggcccgcacccacccggacgtgcagatcatgttcgtggagtccggcggcgacaatctgtccgccacgttcagcccggacctggccgacgccacaatctacgtcatcgccaccgatgagggcgacaagatcccacgcaagggcggccccggcgtcacccgctccgacctgctggtgatcaacaaggccgacctggccccgttggttcacgccgatctagacgtgatggcccgcgactccaagaagatgcgcggcgaccgcccgttcatcttcaccgacctgatgggcggtgccggagtggacgacgtcatcgcatggatcaagaagagcgtgctgttcgaggacatgtgatgttttggcccgcccgtatccaaaaacggacgggccgaaacataccgttgcaccaagtgcggcataattgcccatgtcatcgtcaggcaccaatcataagaaggcagcgattcgtccatgggcagtagcacttttcgtctatccactgcattccgccacggacgtaccaaaatcgacgatatttatttcgaggcgccgttcaaactgatgaccccgttcaccaacggacgtcattcggatttcgtcgtgatgctcgcctcccctggcttcctgaggggcgatgaagcccatatcgatatcgacttcggcccaggcaccgattcgaccatcaaaacgcaaagctacgagaaggtgttcgacaccgcggacggctcggccgaacgcaccatcgaactcagggcgcgtggcaatgccaaagccgtgttcctgccgttcccagtgattccgttcaagaacagctcattcatgaacctgaccaccgcgcatatttccgccgagtcagcattcgtgtatgcggatgtggcgacatgtggccgcgttgggatggatgagcgttgggccatgaaacgttttacgaatcgtatgcgcgtatatgtggccgaacccgaagccgtgaccaaggccgccgcagccgaattggcgcaacagcacgcacatcgccgaggccggccttccaaggcggaagccgccgctgcccgaccgcgcgaacatctggcctttgctgaccgcatgctgttggaacctgatgcttttgactacaccgaactcggcatgtggcgcgaattcacccactgcggcgttctctacgctcacctgcccgaactcgaccctagcgacgctgtacaagatgccgcaactaaagaagcatcctccgccgccatccgcgagcgcatcgagactgcccgcatcgccgccgaagacgcgctcatcactcgcatccatgaacacgcagacgccatcggcttcaccggcgagctcggcgtgagccgcgtaatcaatggcatctgcttgcgtgtactgaccacccgaggcgacgacgccttcgacctcattcgagatgtggccgatttcgtgaccgatttcgtggccgaaggctaaaaccaagtggctctcccctttgaggagagccaccagttctctcagaacaggaagtaccgctgggtaagcggcaactcgtacgccgggtcagagtggaccggttcgccgtccaccgtcacttggaaggtttcgggattgacctgaatgtcggcgagcacgtcgttgaacttcagatccttcttgcctaccgtgcggcagccatgcactggtaacacctggcgctgcagctccagcttgcccttgatatcgtcatccacggcggcctgcgaaacaaacgtggcgcaggacttgccaagcgcacggccgagcgcgccgaacatatcgcggtagtagacaggttccggggtcgggatagaagcattcgcgtcacccatacgagagtaggcgatggagccacccttgatgaccatttccggcttcgcgccgaacatggacggctgccaaagcacgagatccgccatcttaccgacttcgatggagcccacgtattcggaaatgccgtgggtgatggccgggttgatggtgaacttggagacgtagcgcttgacacggaagttgtcgttgcggttgttgtcgtgttcgtcttcggggagcggaccgcgctgcttcttcattttgtcggcggtctggatggtgcgggtgatgacctcgcccacgcggcccatggcctgcgagtcggagctcatcatggagatgatgcccatgtcgtgtagcacgtcttcggcaccgatggtctcggggcggatgcgcgagtcggcgaaagagatgtcttcgggcacattgcggtcgaggtggtggcagaccatcatcatgtcgagatgctcgtcgatggtgttgcgcgtgaacggcatggtcgggttcgtggaactcggcagcacgtttgggaagccagcggcacgaatgatgtccggagcgtggccgcctccagcgccttcggtgtggtaggtgtggatggtgcggcccttgaacgcggcgatggtgtcttccacacaaccgccttcgttcagagtatcggtgtggatagccacctgcgtgtcggtttcgtcggccacgccgagtgcagtgtcgatgacggccggggtggcaccccagtcctcgtggatcttcaggcctgcggcaccggcgcgaatctgctcacgcaatggttcggggctggagtcgttgcccttgccaaggtaggcgatgttgatgggcagcgcttcggcggcctcgatcatgcgggtcaggtggaaggctcccgggttgcaggtggtggcgttggtgccgtcggccggaccggtgccgccgccgaccatcgtggtcacgccaccggcgagggcagtgcgaatctgctgcggggagatgaagtggatgtgggtgtcgagtccgcctgcggtgacgatgaggccttcgccggcgagagcttcagtgccggagcccgcttcgagaccgggggtgataccgctcatggtctgcgggctgccggccttgccgatggcgctgattttgccgtctttgatgccgatgtccgccttgtagatgccggtgtagtccacgatgagggcgttggtgatgatggtatccggcgattcaacgtcgagctgcacggagctttggcccatgccgtcgcggaatgatttgcctccaccgaacttcagttcatcaccgtagtgcgtgtagtccttttccacctcgatgatgaggttcgtgtcaccgagtcgcacgcggtctcccgtggtcggcccgaacattcccgcataatccttgcgcgtaataatcttcatgtcaaaagtccttgctgtttttcagctccccttgtcaggggagctggctcgcgaagcgagactgagaggtagtccgctccccgctggcgggagctgtcagcgaagctgactgagggtggcccttagctcagattcccgagaatccaagctcatgcgccttcttaaacgcggcctcccgcacctcagggtcatccaacttcccctcaaccagtgcgctgaagccgtgaatctcacgcgtgccaccaatatcaatcaaccgcactcgatgcgtttcacccggctcgaacctcacagccgtaccagccgcgatatccaaccgcttgccatacgccgccttacggtcgaacttcaggtacttattaacttcaaagaagtggaagtgcgaaccaatctgaatcggtcgatccgcagtgttcaccacgtccagctcgatgtcttcggaaccttcattgagttccaaatcatcgtcagccagcagatattcccccggcaccaacttctcggtggattcgatggggttatgaatagagacgagcttggtgccgtccgggaacgtggcctcgacctccaccacttccagcatctcggccacgccatccatcacatcttcaggcttgagcagcgtgcgaccgtatgccatgagctccgccacagtgcttccctcacgcgcccgctcaacgcattcggcggaaatcaacgcaatcgcctccacatagttgagcttcacgcctctggctttgcggtctttggcaagctgccccgccaagtacagcatcaacttgtcagtctctcgtggtgtaagtctcataacatcctctgttgttgactggagtttttcaggcacaccaatgtgagccctaacatcgcccaataataagagcgttataagaacgggacgtttctcataacgctctatggccataaacgggggtcgaattaatcacactctcatggattccttggcggcttctacttggtcggggccgccttcgccggtggcgatgaaacggccggaggccaggacgtagtagcggtcggcgcgctcgacggcgaattggaccttctgctcaaccaagaccacaccgatacccttgtcttcggccatcatgcgaatggccttctggatttcggcgacgatattgggctggatgccttcggtcggctcatcgagaatcatgagcttggggcgggtgatcagcgcgcgggcaatcgaaagctgctgacgctggccaccggacagcagaccggcacgtcggccagcaaattccttcaagaccgggaacatttccacggcttcgtcgtaacgggccttggcctctgaaccgtagcggtcggcgaccacgtgcaggttttcgtccacggtcatggtgccaaaggactgctggccctgcggcacgaacgccatgcccttgcggatgcgttggttcggtgcagccttggtaatgtccttgccctcgaaactaatcgaaccggacgaaacgggcagcaagcccagaatcgccttcaacagcgtggtcttaccggcaccgttgttgccgacgatgctcacccattcgccggcggccacgtcgaaactgatgtcgttgacgacggtcactttgccgtaaccggtgttcaaatcctttacttcaagcattgccatgattattcactttctacggcgtcgtgcatattgatgttgaggcgcgttgtatcaccctcaatatgcactgaaaaagcgcattccgggatgcgatggttgttgtcagtgcggtccatattgcgcttcttcctcttacctactcccctcagtcaccttcggtgacagctcgtccgcaattaaggacgggccttgcctgcaacctgctggttcgactatcgtctcgccttcggctacaaacagcccacagggctgtttgcttaacgcctcggcctcagggaggggagacagggagttagttttctccgccgcccaggtagatgcggactacttcttcgttgttttggatgtcttcgaccgaaccctcggcaaggatttcgccctggttgagcaccgtgaccgaatcggcgaactgacgcatgaaatccatgtcgtgttccacgatgatgaccgtgcggttcttgctgcatcgcttgagcagctcaccggtctgcacacgctcggccggagtcatgccggccaccggctcgtcgagcagcagcaggtgcgcgtcctgcacgagcagcataccgatttccagccactgtttcttgccgtgcggcaggatgcctgcgggcttgtttgcatccacagtcagattgcacacgtccatcatgtattcgatgttctgcgaaacgccgcccatcggctggaacagctcacgacccttcttgcggaagccctcggccagctgcagattctccaacacggacagctcttcaaccaccgatgcggtctggaaggtacgcccgacgcccagcttgacgatgtcgttcggcttgcggcccaacagctgctcgccacggaattccgcggaaccagtggccggcaccagtccggtaatcgcgtcgatgatggtcgttttaccagcaccgttcgggccgatcaggaatcgcaaatcgccgtgctgcacagtcaaatcaagattcttgacggccacgaatccatcgaactcaacgtgcagtccacgaacttccagataatcgctccactggccgccgcgatcatccagcaccgcaagctgatcgtgcagcttcgtacgctcttcaacgatttcggccttcatctgggccgcttcgtcgcgcatacgcttggcttcgtcgcgcatctcaatcatttcggcgcgcaactgctccaaatcggcctgcgatgcaggtgcgggagccgatggattcgagctcatgttcttctcctcactcatgcgttcaccgcctttgcagtagcagtaccggtaccggcaacggcaccagcaccagcaccagcaccagccgaagctccaaccgaactctttccgagcccgatcttctccttaatccaaggccatacgcccttgaactgtcccaagcccttcggcacaaaggcaatcaccagaatgaagatcaggccttcgatgtacgtccacgcggacggatacgcctcagacagctgcgtttccgcaaagcgcaccagcagcgtgccgaccaccgggccgagcaaagtggcacgtccgccgatcaccacgccggcgagcatcaggatggacggcgtcacgccgatatcggacggcgaaatgatgccgaccactggcacgaacattgcgccaccaatgccggcgaacattgcagccaccgagaaggcgaacaccttgatggaggcggggttatagcccaagaacttcatgcggttctcttggtcgcgcacgccgataatcaggtcgcccataaacgatttgcgaatccagtagacgataagcaccatggccagcgtcaggaacgcgcagatgtagaagatcatctgcttgttggcgttatcagtcaagtcgtaaccaaagaatcccttgaaatcgttgagaccgttggtgccaccggtggttttcgactggccgataagcagcacggcgaacgcggcaaccagcgcctgcgaaagaattgcgaagtaggcgccacgcacgccacggccgaacacagccagaccgaggattgcggcgataatgcccggtaccgcagccacgccaatcacggcgatgaccggattgcggaagagttcccagaatccaggaaccttggtgatgccgtactgggacatgaagtccggcacttggcccacgccaatgtcctcaagcttcatgtggatagccatcacgtacgcgccgagaccaaagaacaggccttggcccagcgtcagcataccgccttggccccaagccaggccgatgccgaccgcgaccatcgcgtagcacaggtatttggacagcaggccgaggttgtacacgctcagcacagtcggagaaaggaagatcagcgccacggcaatgaccacaccgatcaaagccttatatttcgtggcgtattcgctcaaagtcatcttcattgtcgtttccttacccttctgaagcactcacgcgaggttcctggagcggatggagaccaagccctgcggcctgaactgcaggaacaccaccacaatcaggaacacggcaacctgaccaatcgaggcagaggtcggcagttcgatggacgactggcacaagcccagcacgaacgaggcgataaccgcgcccttgagctggccaacgccgccggccacaacaaccaggaaggcctgcacgatgaaggtcgtaccgaagttgaagctaatcgagttcagcaggctcagcgccacgccagcgataccggcgatgccggagcccaggaagaacgtcacatggtcgaccatcttggtggagatgccggaaacctcagcgaggtcgcggttctcggaagtggcgcgaatctggcgacccagcggcgtgagcttcaggatcgcgtacagcgcagccacgcagataatcgacagaataaagatgaacagtcggcctgcagagaagctgtagccaaagatggtcaccggattggtcagcgcttcaggagccgaagcgtagaccggagtggcaccgaaaatatcgcgtgcgagctgctgcaataccagcgatacaccgaaggtaaccagcagcgtatcaagcggacgattgcgcatacgctccagcagcaacacgtccagcagtaaaccaagcaaaccggctactacgaaaccgaccaccagcgccacggccagggacactgttttattgccgatgaccatgctcatgacgtatgcggtgtatgcgccggccatcatgaattcgccgtgggcgttgttgataacgcccatctggccgaaggtcaacgacaacccgagggctgcgagcagcagaatcgatccgttggacagacctgccacaatttgtggaaataacatacccatgttgttgtgtcctcttctctcagttgctctcgacgctggcgctcaggctcttggcccagctgtaggtcttcaggtacgggtccggcttgatgggaccgtccgacttccagacggtgtggatgagcttgtctgagccgatcttgccgatgtatgaggtcttgtagatgtggtggttttcgccgtccaccttgaccttgccttccggtgcattgaaggtgacaccgtctgctgcagccttgaccttgtccacatcgaacgacttggccttctcgaccatgcccttccacaggtacacagatgtgtacgccgattccatcgggtcggaggtggggcgattggctccgtagcgcgccttgaagttcttcacgaacgtcttgttttgcgcattgttcagcgtctggtagtagttccaagcagtgagctggtccttgacgttgtcaacgccgatagcggaaacctcttcctcggcgatagacatggaaatcaccggcgtggtggcggctttcaggccggaagccttgtattccttgaagaatgcgacgttggaatcaccgttcagcgtgttcaccaccgcatccgcgccggagaacttgagcttgttgacgatggtggtgaagtcggtggagcccattggggtatattcctcgccgaccacttccatgccattgccctcggcgtacgccttgaccacgcgatttgcggtctgcgggaacacataatcggagccaaccaagaacagcttcttgtagccttgctccttaaggtaatcaagcgcaggcacaatctgctggttcggggcagcacccgagtagaagatgttcgggctggcttccatgccctcgtattgcagcgggtagaacagcagcgcgttatccgcctcgaacacaggcagcatggccttacgcgaagaggacgtccagccgccgaacaccgcggccacgcattccttttcgatgagggtcttggctttttcggcgaacacagccggctcggacttgccgtcctgctgcactaccttgagctgcttgcccagcacgccgccctttgcgttaatctcatcaacggccatgtgcagcgaatcactcaccgtctgttcggaaatggccatcgtgccagacagcgaattcacgaaaccgattttgatggtgttgcctgaggtgtccacacatgatgaggtgtcgcttgccgcagtcgcgttgttctcttgggcctctttctcggccacggtgcgaccccagccacaaccgctggtggcaagcactgcggcaacaatgcacaccgcagcacccatcttcagtctttgcaatcgagtcatatgactcttcctccccacatacgactacattccgcgaacgttgcccgcccgcggaatgtctacgctgattgccgtaccgtgccctgatgcctgatatcgtgctgaaccacttgccgtatatcgacggctggcttccggccgactgcactatacgatggcagtgcctgcgtgaatttccgttgcctgaatatttcatatgcgtctcatacataacgctcacgttacaaaatcaacggtgttacgcggcccgccgtcgaacgctgtttacattggtgtgcgatacgcgcgcgactgccgcccaagtgacttccccgtgaactacgggtaggctggggagtatggaacttcacgttttgaatcatccgctggtcgagcacaagctcaccgtgctgcgcgacaagaacactccttcctccactttccgcgagctcgtctcggagcttgtgatgctcgaggcctatgaggccacccgcaacctgtccgtagttgccgcaccaatcgaaacaccggtcgctccgatgaccggtaagaagctggccaaaccgcgtccgatcattgtgccggtgctgcgtgcaggtctgggtatgctcgatggcatgacccgtcttatgccgaccgccgaagtcggcttccttggtatgaagcgcgacgaggaacaccccactcagcaggtcacctatgcgaaccgtctaccggaggacctgtccggtcgtcagtgcttcctgatcgacccgatgctcgccaccggtggcacgctggttgctgccacgcactatctggccgagcgcggtgccaaggacgtgaccgcgatcaacatcatcgcggcgcctgaaggcatcaagttcgtggaagagcacatcgatccgtccatcgacttcaaggtcgtggtgtgcgcggtcgacgagaagctcaacgacaagtgctacatcgtgccggggttgggcgatgccggcgaccgtctctatggcgtaattgactgattttcctggctcccctcagagaggggagccaatgtgatgggctttttatgcaaatcgacattattgcgccgggacgcgtgaaggaacgatatcttcgcgacgccatcgacgagtattccaagcgactttcgcgctactgcaggctcaacatcattgaagtggcagatgagaaaacgcctgaccacgcctccgaaggcgttgaccgacagatcaaggccaaagaaggcgaacgcatcgccaagcatctgaaggacggcgcgtttgttattgcccttgccatcaatggcaagcagctgtccagcgaagaattggccgccaaaatcaacgaccttggattgcgtggcaccagccatattcagctggtcatcggcggctcaatcggccttgacgacgcgattctgcgtcgtgctgattttctgctgagtttctcgaagatgacgttcccgcatcagctcatgcgcgtgattctgctggagcagatctatcgcgcttataagatcaacgctggcgagccatatcacaagtaaaacgccatacctcatggggcgggaaatcccccatggggcggtaattgccccatggggcggtaaaaccctcatggggcggtatgccaaaatggcttaattccgcggtttcacatattcttcaaaccgccccatgggcaagttaccgccccatgggcacatcaataacgccctcaacctcacactgcgtcggggacgaacgcttcgaagatgtggcggtcgaagtagggcgcgcactgggcgagttcatcgctgctgcgcacggtccatgaaaccggcatcgcacccatcgaacgagcgagcctgacttgcggcgaagtgccaccggtccagtcataggccacgaaatcaggacgagacagccagtcgaacgccagtaagccggcggcccattcagccgcaccattcttgctcagcttcgccggccagctcagctgaccgcggcacacctcagggtgatgctccttgtaccaattcaccgcgcccggatggaaggattcgatcacgtacgggccgtcatacgcctcaagcaaggcgtggcccttttccatgagctcttcgctacgctcatcccaagccttgttgtcgctgaacttgtattccacaatcagcggagcctggccggccaccacgtccagcacatcggagaacagcggcacatgctggtagtaccgttgcaaactagtttgttttggtttgtaggacggtcttgcgatcgtccgctccaagtctcacgccgcttgcgtggctgcttggttcgcacttcaccggggtctgcgttgcacgacgtgatgcgtcgttccgtcttccgtcccctccatgcgcgtttagggtctccggggcactcccggcgacctggatgttgacggccgcgttcaaatcacggtcgatggacagtccgcactcctcgcaatggtagacgcgctcggacagggacagtttggttttcaccgtcccgcagttcgagcaggtcttcgagcttggataccagcggccgatgatgtggagtccagcgccggtgcgtgcggtcttgtaggtcagttggcgtcggaactccgcgaatgcggcgtcctgaatcgattgggcgagcctgtggtttttgaccatgcccgccacgttcagatcctcgatgctgatgtccgagtacgtgtcggcgagccatgtggtcagcttgtccaacatgtcgcggcgctgattggcgacacgcgcgtgcagtcggacgactcgttcccgcgcgtgggcgcgccgatgcgagccgggctatctgcggctcagcgagcgttgcgcccgcttaagacggcgttcattggccttgagcgtgtgcgggttggcgatcgtggtgccgtccgagagcgtcgccaaggatttcacgcccagatcgatgccgaccgccccttccctcggcgttcgtctcgccgttgggtcggcgcgttcgacggtcaacgcggcgtgccagcgtcccgcacggcacgacaccgtcatgcgcagcgccctggccccgtccacgcgtcctgcgacgttctccatgcagtgcacgcggccgatgcgcggcagtctgagcgccttcggatcggccctgacgaggccgaagctgccggtcgtgtacgcgaaccgcggcgtctcccgatccttcgccttgaatctcgggaacccgaccctgcggcccttccgttcgcccttgcggcttttcgaccagttcgacagggcgtcggacaatgcctccagaccactgttgtaggcttccttgctgttctcccgccaccacggcgtcccgtccgcatccacggccagcgtgcccttgttcgcgttccaccagcggcgcagcgcatacaatgtccattccagcttcccgccggtttcgatggtctccttgacgtgggcgagccccgcattgtacgcgaacctggccgcccccgcgtgcgacagcatcaggcgttcctgcacgggcgtcggatccaacgccaccttgacggcctcaagcatcatgcgccgccttcaacgcggccttcgccttgttcctcgccgcgcgccgaccgtacaggcgggcgcagaacgaggccagcacctcggtcatgtcccgcacgagatcgtcgtccagctcggaatcgtccacgacgatgagccgccgcccctgcgccgtcaacgcggattcgaccagtcccgcgttcatgcgggccaggcggtcgcgatgctccacgacgatcgtgcccacggtcgggtcggcgagggtgcggttcaacttgcggcgtttgtcgtccatgccggaaccggtctccgacaccatctcgacgtccgacgcgcccagatcgatggcgaacgccttacgcgcgattctgttgaagcacggcgtggcagcggacgagatgtattacgagccgtttgcgatgtgatgttcgggagcgcgggagcgtagcgtatcgaacgtataggtaacgaagtgggaggtgtctcgccggctgattgcttggcgagacacctcccacttggcattgctcccctcagcctcacctcgttcggcagctcccctcagagagggagcaatatgggtcatatcatggttctggaatctccagcgggaagctacgcagacgccttagcccaaacgcagtgttggctcctcctcggagagggaagccaacactgagatgggaattagtgctgacatgagtcagcaatcattcttagtggcggagcattttgcgggcggtggcgagggcggcacctgcggcgaggaacagcacggtgatgccggcgaagacgctcacgtcagcgccagagttggccagcttgccgttggccttggacgcgttcttggacgtgctcggcttcttgttgccgttgttctggttctggttgttggagccggcgttgttctggtcgttgccggtgttggaaccattgttgttttcgttgccgttgttgttgccaccgttgttgttcggggccttctgcttgacgacttcagccttctgaccgggctcgacgctcaccacgttgccgttggcgtcaagggtgaccttagagctgaaggcggcggcgaggttcaggcgctgccagccgtcggaagtagagtcgagcgggtagccggactggatttcagtgcgggccagcacttcgcggcgctggtcggcgctcagggtcgggaacacggtacgcagcagggcctcggcgccagcaggcacgcgggcggcctgatcggtggggccgaccgggtcgaagccgtaggtgaggcgctcggtgtacacgtccacggcggacttgacatcggtgacgggctcagtggcgacctgatcggtgttgaggttcttgtagccgttggtggtggtggccttcgtgttggcgataatctcgtcaagggtgttgccgtatccggcttcttggccgcgcttggtcaggtagtcgcgcagttcctgctgggcgggcttgacgacctgctcgaagaagacgtcgtcgttcagacggccggcggcggaagcctcaccgacgatacggccgcccatgatgtccatcgggtagtgcacaccaagcacgatgcggttgttgccaccctcggcggcacgggctgcaatctgcggggcgagctcaggcatcagggcagccagggtcaggccggacgtgtagaacgccatcgtgtggccggacgggaaggactcggactgcaccagaccgccatagccattggcacggtcgacattgcggaaatcatcgtggaagccggccacgcgcttcagagcgagcgcaggagccagtcccttcaggtcgttttcaccgttggcgctgcggtcgatagagtcgccttcagcggtgttaagcgacggacgcgggtaattgaaaccatgcttggcgccagtcaccgggatgtagccgaccatgtcgttgagcagcttgctggtcttggccagcggcacattgccattggcatctgcttcgtagccttcatagaaccattcgccgataatcggaccgaaggcatcccagtaggtttcgcgattgttctgggcaccatcaatgacggcacgctgctgctgggtgtagtggtcgtccaccttcacaccattggtgttatcggcgtcagccttgttgttgatagccacggtcaggtcatcgctcttgccaagcactgcaacgccggcatcagtgacgctgccgtgggatgcagtggtctcgtcattgttcgggttggccaccggagtccagtagttgttgaactccttgagcagtacctgcggatcggccttagcgatgtcagacgggtaggtcggctggtcgtcggccatggcggccggcaccacagccgcgaagctggcggcgatggtggcaacggcggcgatcccggcaagcgcacgctcgcactgagtgaatacggacattgtccctcctcatcaatatcggtctgtattgatgcccttcctcttggcatcgatcgacgaaaacgccggcacccaaatgcatgagcgctgatgggaacgctttcggtgaccaacgttaggaatgcgacatggccgcaatggttaagaaccatgaatgtcatatggccgctaattgaacagcacgagccaacaatgtagtcatggttcagcgactactgcctgtggccaaggtgttttccggcaaagctgcgggtaggctgggagctatggaattgcatgtactgaatcacccgctggttgagcacaagctcaccgtgctgcgcgacaagaacaccccctcttccattttccgcgagctcgtctccgagcttatgatgcttgaagcctatgaagccacccgcgacctgggcgtcgtggccgcgccgatcgagaccccgctcgcgccgatgaccggcaagaagctcgccgaaccgtgtccgatcatcgtgccggggctgggcgacgccggcgatcgcctctacggcatcatcgactgatggagcgtaccccccttctccggaaacgtacgctgaatctctgtgagcgtacgtttccggagagtttttcctcccctttctcagcaaacgtacgctgacggcccttcagcgtacgtttgctgagacgaaggcagataatcccgcacgaaacgtacggtagcgacttggcagcgtacgtttccggagaaacgactatgcaaatcgacattattgcgcccgggcgtgtgaaggaacggtatcttcgcgacgccatcgacgaatattccaagcgactttcgcgttattgcaaactcaacatcatcgaagtcgcagacgaaaagacgccggagcacgcgtccgagggcgtagagcggcagatcaaagccaaggaaggcgagcgcatcgccaaacatctgcgcgacgacgcgttcctcatcgccctggccatcgacggcaagcagctctccagcgaggaacttgcagcgaagatcgaagactggggattgcacggcgtcagtcatatccagttggtcattggcggatccatcggactggatgatgcgattctgcgccgagccaacttcaaacttagcttctccaaaatgacgttcccgcaccagcttatgcgcgtaatcctgctcgagcagatctaccgcgcgtacaaaatcaacgccggcgagccgtatcacaagtgattattccccacaaccccgtgcacagggttggccaaccttccaccgtgtggcaactcgcgcaccgtgtggcaactcacgcacggtatggaaactcgcgcacggtgtggtttgccaaaatggcgttattctgcggttttatggttcttgacaccttgtcgaaaaccacaccgtgcggattttgagccgcatcgcagggaaaaaaccacacgacagcgagcggccgactgcatgaatacagccggccgctcgctaataaaatcgccaataggtcactgcgcgtcaggaacgaacgcctcgaaaatatggcggtcgaagtactggtcgcactgagcgagctcgtcgctgctgcgcacggtccaggagacagtcgtggcgcccatcgaacgagccagacggacctgaggcgtagcaccaccggtccagtcataagccacgaaatcagggcgggacagccaatcgaatgccagcagaccggcaccccattccaacggaccatccttggccagtttggctggccagctcagctgaccgcggcacacctcaggatgatgttctttgtaccagttcacggcgcccgggtggaaggattcgatgacgtatggaccgtcataatcctcaagcagggcgtggcccttctccatcagctcctcggtacgagcatcccaagcgctattgtcgctgaacttgtattccacaatcagcggagcctggccggccaccacgtccagcacatcggagaacagcggcacatgctggtagtaccccttcggcgcggcggacggcgtgaccaccagcggcgggttcgcgtcggcacccggcaacggttcggccttcaa

SEQ ID NO: 2801 - DNA, 3796 bp, Unknown
  R36_18m  MAG No. k141_19462
cgacgcggccaacgcctacgccgccgaacaccttgagattcagaccaaggatgccgatgctgtcgtcaagcgcatcaagaacgccggtgccatcttccgcggcccgtactccccggtgccgctgggcgactacatgtccggttccaaccacgtgctgcccaccggcggcaccgcccgcttcgccgcaggcctcggcgtgcacacgttcatgaagccggtcgaagtcatcgaatacgacgaggaaggcctcaaggctctcgccgcccgcatcaacgccttcgcggtgtccgaggacctgcccgcccacggcgagtgcgtgctctcccgcttcgtcaaggatccgtatgacaaggccaccctgcgcgagcaggagaagggagccggtctgcgatgagctcgattcccgaaaacctgccgctgcgcaacgacctgatcggtgaggagccgtacggcgctccccagctggacgtgccggtgtgcctgaacgtcaacgagaacccgtatgcgccggacccggccgtatgcgacaccatcgccaagcgtgtgcgtgaaatcgcccccacactcaaccgatacccggaccgtgagcacattgaattgcgtcaggcattctccgattacctggcccgtgaatccggtacccgtctggacgtggacgagctgtggggcgcgaacggctccaacgagatcatgctccagctgttccaggctttcggcggcccgggccgcaccgcactcggtgccgacccgacgtactccatgtacccggagtacgctcgcgacaccttcaccggttggaagctcgcccaccgcaacgccgacttcacgttgaacgtcgacaaggtgcttgaggccatcgccgaggtcaagccctcgatggtgctgctcactagcccaaacaacccgaccggcaccccgttgccgatggaggatatcgagcgtattctcgccgcctgcgaaaccgccgaagtggccggcgcgggtgagggcgtgcacccgattctcgtcatcgatgaagcgtacgtggaattccgcaagcccggcaccccgagcgccgtgagcctgatcaaggaccacccgaacctggccgtaagccgcaccatgagcaaggcctttgccttcgccggcgcgcgagtcggctacctagccgcatccaagggcatcatcgactgcgtgcgcatcgtacgtatgccgtaccacctgtccgccatgacccaggccgccgcactggccgccttcgaacacaccgatgaacagctgagccgtgtcgagcatctgcgcgaaacccgcgaggccaccgccgcatggctcaaggaacagacctacaaggaccagccgcttgaagtggccgaatccggctcgaacttcctgctgttcggcgggcacttcgacaagcgcgaagccatcttcgacgagctcctgaagcgcggcgtactcatccgcgtggtcggaccggacggttggctgcgcgtgtgcatgggtaccgacgaggagatggaaaccttccgtaacgcccttgttgaagcgcttcgtatagtggaagcagcataagggacgtttctttccgattgcggcgagacccgaagcgattcgagtcccgccgcaatccaatatgacgaatcacacaggagacatgatggcaagaaccgcgcacatcgtccgcgaaaccagcgaatcacacatcgacctcgaactgaaccttgacggcaccggcaaaaccgatatcgatacatccgtgccgttctacaaccatatgatgaccgcgctcggcaagcattcgctgatcgacctgaccatccacgcccacggcgacaccgacatcgacgtgcaccacaccgtggaagatacggccagcgtgttcggcgaagctctgaagcgggccctcggcgacaagaaaggcatccgccgcttcgccgacgccaccgtgccgctcgacgaggcgctggccaaggccgtggtcgacatttccggccgcccgtactgcgtgtgcagcggcgagcccgaaggctacgaattctgcatgatcggcggccacttcaccggctctctggtccgccacgtcatggaatccatcgccttccacgccggcatctgcctgcacatgcaggtgctcgccggccgtgatccgcatcacatcgccgaagccgaattcaaggcgctggcccgtgcgctgcgcttcgccgtggaaattgacccgcgtgtagacggcgtgcccagcaccaagggagccctgtgatggccgacgacaagttcgatccggacgaatcgcacttctccgacgaggagcttgaggccgcgctcgtcggattcgagaaagaattcgcggacgattcggcatccggcgatgccagtgataccagtgatgccgataaaacggcggacgctgcttcagcgaagtccgattccgacgcgaatgatgatacggctgataaggcttccgctgattccggccagcctatggccgacgacgtcaccgggtcggtcgctgatgcggtgaatgaggccatggccgacgtggtcgacccctcgctcggcttcgacaacgaactcgctggactgttgggtaacaaggcgaaggtggcgctgatcgtcacccgtcttgcctccgccgaactgttggccgcgttctgccagctgtcggacatctccgccgcatgcgtcggtgccaatcagggggccgtcgcggtgctgaagaatctggacggcgacggcccggaagccgcagccaaggacctgaccaccgtggtatccggcatggccgtgattcttgcagtcaatcgtgccgacaagctcgaagtggccatgtacgtgcagggagaggccggacaaagtttcgcgccgcccgtgctgttcacctccacaccgcgcttcgtcgaggacctgatgctcggcatcgtaaccctgaaccaactcaagacccaagggttcgaagtggtggattccgctggactcgaccatgaccaggcgatgcagattctcgccaaccataccaagcgtgggcgtggcggacgcggctcccgcatcgaatagacgccaaccaaccagtaggggataggagagaatatgaccacagcggttgttttcgattacggtttcggcaatgtacgttccatggtgcgtgcgctcgccaatcttggcgtcgacaccaccctcacctccgactaccggcagtcgttggaggccgacggtctggtcgtgccgggcgtgggcgcgttcgccgcatgcatagaaggactgaagaaggtcgacggcgaccgtgtgatctatgatcgcatccgcgccggccgcccggtgcttggcgtgtgcgtgggcgagcagatcatgttcgaacacggtctggagcacggggcccatgccgcgggcatcgggctgatcggcggaacggtgaacctgctggacgccgacgtggtgcctcacatgggatgggacacgatcgaggccgcccccgattcggtgctgctcaacggcgtggagaatgaacggttttacttcgtgcactcctacgccgcgatggaagtgaagccggcggatacgtcccgcttcgacattgatctgagcggtgcgcccgaacgcgtgagctggtgctcgtacggccggtcgcgtttcgtggccgcctacgaacacggcccgctgtccgccacgcaattccacccggaaaagtccggggacgctggctcccagctcctcaagaactggatcgccacgctgtaaaaaagcatgaagctccctctgacgagggagctcaaattgtgtataagtaactgaagaaaggctcttcttatgtcgttgactctgc

SEQ ID NO: 2802 - DNA, 9878 bp, Unknown
  R36_18m  MAG No. k141_19535
accgaaccatgtatatcccatgccataggcgatgggtgcctgcaaactggcataatcagccgaaccggcaccgcaatagttcagcagatcgggcaaatcgtattcattggaaccccagccgtgcaacagcacgaacaccggggtggtttcaggaccggtcaaacgggtcaaggccttggcaatcttcatggctcccagtgtatccacgtgaccgccgcgaccgcatttgaacggtccataagcaacccatatagcaacgccgttccattcaagtgtccgatacgttatcgtcgtagacgtgccgcacggggaacggcctcgtgcacagcagccatagagaacaccataaagggggtgcgcaatgaccaggttcaatactcagctcgtccacggactgccggttggagacaacaacaccggagccgtgaacccgccgatctacaactcaacgacatatgccttcgagaaggtcgacgcgatgccccgctatgactacgcacgaagcggcaatcccacgcgcgacttcctggaaaagcagatcgcacaactcgaacaaggcacgcgaggcttcgcattcgcctccggacttgccgcgattcatgccgtgctcagcattttcaagcccggcgatcgcattgttgtgggggacaacatctacggcggctcgtattcgcagctcaatgagttcttcacccgttggagtgtgatcgtcgaatccgtcaacacccaggacatcgcagcattggaggccgctgtcaagggcgaccgcgcgaacggcatcgcgcctgcccaagccgtctacttcgaaaccctgaccaacccgctgctcaaagtcaacgacgtgcgcgccatctccacggtggcccaccgttacggggcgctgtcgatcgtggacaacaccttcgtgaccccgtacctgcagcagccgctcaccttgggcgcggacgtggtcatccactccgccaccaagtacctggccggtcactccgacgtcaatgccggtctcgtggtcgtctccggtgaggatttggccaatcgcgtgtacttcgcccagaaccgtcttggaggggtactggcgcccactgaatgcgattcggtgcgccgcggcatccagacgctgggcctgcgcatggaccgacagcaggagaacgcgctgtccatcgcgcagtacctgctggtccatccgctggtcaagtccgtccactatccgggcctgcccggtgcaggcgaccaaaggctcgcctccaagggactcaagggcgccggcggcgtgctgagcttcgaggtcgtgcctggcgtggacccggccgacgtgctcaacaatctgcacgtgttccgactggccgtctcgcttggcgcggtcgaatcgctcgccgaactgccgtgtcgcatgacccacttcgaactgccgcgcgaggagcgtttgaagatcggcatcaccgacgaactcgtgcgtctcgccatcggcatcgaggatgcagtggaccttatcgaagaccttgatcaagccttcgaaatcgcctgctcccgttacctccagaactatgctgaagcggacgtattcaaccagttgacctcgggggtgttcgcctgatccaataacactgccattactgctcattactcctgcgacgggccggtgctgacattcggtgccggcccgttcgtatacgccggaaaaggtgagaacaatacgaataaagagtgcctgagtcggggcatggactcgggcagccggggtagagggtttccgctcttatacccatccataaccaacccatatagcaacgccgtggtaggcgatgggcttttgcattatggtcgtaaccatgccgcacggggcgtcggccgagaccgcccgccgtgccgccaccacgcttcaacctactgataaggggacaattatggcaaggttcaacacgcagctcgttcatggtctgccggtcgacgacaacgacactggagccgtgaacccgccgatctacaactcttcgacgtacgccttcccctcggtcgactccgtgccgcgctgggattacgcgcgcagcggcaatccgacccgtgacttcctggagcaccagatcgcgcagctcgaacacggtcgccgcggcttcgccttctcctccggcctggccgccatccacgccgtgctctccatcttccagcccggcgaccgcatcgtggccggcgacaacgtctacggcggcagctactcgcagttgaacgaccacttcacccgttggggtcttgaggtcaccaccgtgaacacggccggcgacctcgaccgtctcgaacgcgccatcagcggcaacggcgacactgcccccgcaaaggccgtctacttcgagaccatcaccaacccgctgctgcaggtcaacgatgtgagccgcatcgccgccatcgcccacaaatacggcgctctggtgatcgtggacaacactttcgtgaccccgtatctccagcagccgctcgacctcggcgcggacgtggtcatccactccgccaccaagtacctggccggccactccgacgtgatcgcgggcctcgtggtcacctccagcgaggatctggaaggccgcatctacttcgcgcagaaccgtctcggcggcattctggctccggccgaatgcgacgcggtgcgccgcggcatccagaccctggccctgcgcatggaccgccagcagaagaacgccaaggccatcgcccagtatctgctcaagcacccgctggtggccagcgtgcactatccgggcctgggcgaggacggcgagcacgagcttacggtcaagggactcaggggtgccggcggcgtgctgagcttcgaggtcaaggagggcgtggatccctcggtggtgctcgacaacctgcacgtgtttcgcctggccgtctccctcggcgcggtggaatcgctcgccgaactgcccgcccgcatgacccacttcgaactgccgcgcgaagaacgcctcaaggtcggcatcaccgacgagctcatccgactgtccatcggtatcgaggacgtcgacgatttggtcgaagacctcggccaggccctcgacaaagcgtacgaagccctgccgctggatgtcaagcagaccatcgacgccgacaacgacagccagatttccaagctgatcgcctgatatcggccgattatccaatcgaccgcgctcggcaaccatgaggtcgggccaggtctgacggacagggaagccggtctggaatttcaagcaaaaccatcgcaggtggcccgcacgaatccaatcgtgcgggccacctgcgcatatggtgccatatccgggtgaacggcatggtatccgaatgaaaatcgatagggaggagcggatatgtccgtgaaggaacacaaccgagtgcaggggctgcagccggaacttgaggaatactaccggtggttccatcggcatcccgagccgtcgtacggggaggtcaaaaccacggcccgcatcaaggagatcctgaccgtgcacggcatcgaaattttggacacgggactcaaaaccggcttggtgtcacgcatgcaaggcacggcggaccccaccgcggagccggtgccgggccgccgggcatgtggtggcggtgcgcggcgacatcgacggcctgcccatacaggagcaggccgggctgccgtgcgcttccgaaaccccgggatacatgcacgggtgcggccatgactacaacatgaccaccgccttcggagccgtgctcttgcttcagggacgccgcaaccggttcgccggcacggtgaagctcatcttccagccggccgaggaatcccgcggggccgcaggcaaccccaccggtgccggccgtgatcaacaccggcgcggtgaacaaattccgcatcaccatccacggccgaggcacgcatgccgcccgcccgcaccgcgttccccgaagaccgcgcgataatccataatcgcgttcaggccatcgtggaaggcatcgccgccacctacggcgtcaccgtggacttcatctgggaggacagtgcgcccgccgtgatcaacgatccacgttggttggcgctcgtggcctccaccgacgaaagcctcggactcaccgtgaccggaccgaacgccacactcggcggcgaggacttctcctattatctggacagggcgccgggcgcgttcttccgcattggcgtgggcaacaagggccgtgccatgcacggccccaccttctatgtcaaactcgatgcgctcgccgacggcgccgatctgctcgccacctccgttgtgaacacattggccgcattggggagcgactgatctggctatcagcctggttataagccaggttgatagaaaacctcttcgctataagctggccatatatcgccctatcggatatccagaaccccaaaacgttgaaatctcgcggttcctgagactcgggggtctacgatgaaagtacttccgcgcagggcgtgaatcggttgggtatgagacatgacgatggcgggaacgggagcggttcgctcccaagcgttaccacacagagagccatttcggggggagttctgtaccccggcgtgagacggggtggctcagagaggggaatggcgaaatgcttaccgagcatcgtcttaccatgaaagccactgccatcttcggcatactgcttaccaccttgacgttcggaggctgtggcatcagcaccggtagcagcagcaatgctgcgtccaccaccacggacaactccaactccaagaccgccgactacaagtacggcaccgtggaattcccgaagtccagctcgctgtgcagctcgccgatcgccatcgccctggagaagggattcttcaaggatgagggcatcaacgccaagctggtcacggccgatgccgaaacccgcaaggtgggcctcgacacgggccgcttcccagtgaccaacggtgacttccaattcttcccgtccatcgagcagggcgtgaagaccagcgtggtgggcgccctgcacaagggctgcatcaagatcgccgtcaagaagggctcgccgatcaagactgccgaggacctgaagggcaagaccatcggcgtcgatgagatcggcggcaccccgtacatggccgccaacctgtggctcggcgacgcgggcctgaacgtggaccagaagaacggcgatgtgaagtacctgccgttcgatgacgccaacctcgaattcgaggcactgcagaacggccagatcgacgcggccgccctgtgggacccgctgcccaccatccaggaggccaagggcaccgtcgacatcatcttcgaccttggcaagaacccgaagtttgccaagcgcttctgctgcttcctctacggctccaacaaggtcatcaaggagaagcctgacgagatgagcgccatcctgcgcgccctcaacaaggcccgcgactacatcgcccagcatcctgaagagtccgccgacatcatcatggcgaagaagtactccaccatcaacgacaaggacctgatcgtcaagctcttcaaggactacgactacgccgtgcagcccgacgaggccaagcagatcgaaagcgacgtggactacttctccgaaggactgaagaagatcggcttcctggagaccaacgacccgtccgcctttgccaagcaggcctaccagaagattgatcagtgagcgcggccagcggccatccgattgcatcaatggtatgacggtaggacctgaacagggccggacggcattgaccgtccggtcctgttcaggtccgtccgccctgttgttgcagggaccgcattgatttcgatttctcattcaccatcattcgttcgttcatcgttcgtcatcggaaggaacaccacccatgagcagtatcaccgccaaccttgtggagccgcgttcggccgcaaggctcgaaacgcgggacccggcacgtccgcaatcagcgcgggcggcatccgtctccgccgccgatcccgtagcggagcattcggaggcgacggcacaggccgtaagccggccggccgccgaccagcgcgccgcgcggagcctgccgtatccgttcgtggtggcgctcactgcggccggggtcgtcatcgccgtcatcgtcaacgtgatcttcccgcagagcgcccccgtcgagttcaagcaagggcagatctggatcttcctgctcaacggccaggaactgtatctgacgctgctggccgtgttgacactggtgtacgtggtcatcggcatcgtcgacgcccgtaatcccaaggatgcggctcgattccgctaccgcgcccaattccggttcgcagccggactggcactcgctctgtgggacgtcaccggcaccaaactgcaggtcctgccgcagccgttcttccccggcccctcccaggtgctggagccgttcctgaccgacggcagctacatcgccctcaacacgttctattcggtgcgcctgttcgcggccggattcgtgaccggtgtggtgctgggcgtggtgaccggcgtgctcatcggctggttcgcccgcgcctactactgggtgttcccggtgctcaagatcacgggcgtgattccggcggtcgcttggatgccgttcgccctgacccttatgcccacgccgttcattgccgccatgttcctgctggtcatctgctcgtggttcccggtggccttcctgaccgcgcagggcatccagagcacgccgaagatgcttgtcgaagcttcgcgcacgttgggcgcggacacgcgctacatcctgttccatgtggccattccgcactcgatgcccagcatcttcaccggcatcggcatggccaacagcctctcgttcctgaccctcgtgatttccgaaatgatgggccagcctggcggcctcggctactacatcgatcaggcgaaggcatggtccgcctacaacgaaatccttgcggcgatcgtcatcatggccgtgctgttctccctgattatgaaactcatcgaactggtgcgcggccgtgtgctgcgctggcaggagggactggtcaaatgagcgctgcaatcgcagaaacgacggcgacggcgggcaatgccgtggacaccgaaaacgccacgaacccgattatcagcatcagccatatcgaacgcgacttcgtggactccgacggctcggtcacccaggctctgtccgacgtaaatctggacatccgaccgggcgagctgatctccatcatcggcccttccggctgtggcaagaccacgttgctgcgcctgatttccggactcgaccggccgcagcgcggcgaggtgacgttcaagggccgcccgattgaggggccgaacccggaacgcggctacgtgttccagcagggcagcctgttcccgtggctcacggtcgaggagaacatcgccttcggactgaaggcccagggcaagtacaaggaacgtaaggacgaggtcggcgagtatctggagaaggtggggctgaccgggttcggcaacgcctacccgcaccagatttccggcggcatggcccagcgcgtggccattgcccgcgcgctcatcgaccaccccggagtgctgctgctcgatgagccgatgggtgccttggactcgttcacccgcgccgatctgcaggaccgactgctcgacttgtgggagaagtaccacatgactatgattctggtcacgcatgatgtggacgaggcgatctacctgggcaatcgcgtggtcatcatgacgccgcgtccgggccgcatcaaggagatcgtgccgatcgacctggcccagcgcgaccgcgtatccgacgacttcgccgcctaccgcaaactgctgctgaccaaactgcactttgatgtgcacagggaaggtgaggaataaataataagtgagttggctcccctcaggaggggagccaagaacggcacaagaagagggcgactgccatgtggcagccgccctcttcttgtgccgtatgtgattactccccatacacggcatcaaacgcctgggacagatcggcgatgaggtcgtccgggttttccagtccgatcgacaggcggatggtcgtgggactcacgcctacgatggcacgcgcctccttggtgaactcgcggtgcgtggtgttcaccgggtccacgatcagggaacgggcgtcgccgatattcgccagataacggaacagcttcacctggttgatgaacgcggcggtctgttcggggccgccctccagctcgaaggacagcacggagccgatgccgttcggatagttcgtggccaccagttccgactgcgcgccgccgggcagaccggcatagttgacggccgtcacatgcctttgtccggcaagatacgcggccaccttgccggcggacgcggtctccttggacacgcgctcggtcaaggtctccagaccgatgagctgcagatacgcctcaaacgggcccagcacggcaccggtcaggcgcagatacttcagacgcagacggcggatgaacgccagcggacctgcggcctcgacgaagctgcgcggctcacggcccgtggcctcgcccagaatgtactccggcgcggtgaactgcgggtagcggccattggcccaatcgaacgaatcgccggaagtgaccacgccgccgatggcgttgccatggccgctcagcgccttggtagtcgaatacacgacgatgtcggcgccatgttcgagcggacgatacagatacggcgtgggcagcgtgttgtcgatgaccagcggaatgccgtggcgatgcgccagttcggccagcgcctcgacatccgtgaccacggtggtcgggttggagaccgactccgcgaaaatcgccttgacgtccgtgccgccctcgccgtccgagccctgctcgatcagcgactcgatatgatccagatcgttgatgttctccacaaacgaggtggtcacgccgaactgcggcagcagcgtgcgcagcgagtcgaaggtgccaccgtacacgtcatagggggcgataatacggccgccgccctcagccgtgttgagcagcgcataggtgatggccgccatgccggaggcgaccgccacggcttctttggcgccatccagttcggcgatgcgcttctccaggaacgagaccgtgggattggatacgcgcgaatacaggaagcccggcacatcgccattggccacgtcatggcctcgctgcgaattctccagccagaacgccgcgttcgagtaaatgaccggcgtcaccgaatcggcgttggcggccgggtcgaaaccggcatgcacctgcgccgtgtcgaattgatgatcagacatgaattcccctttttatgtggtcgataacggtgggaaccgtgatggtccctattcccggcatccccggccggtccatgtggctcacaatctatcaggttcgcagcgaagccgttccgtgcaacccatcggtaaaacttatgatggcatcaatgaaatgattatgggccgtcggcatccggaatcggccgtatacccgttgcttatacccggcccaccggtgagcttatagcgcggtgggcgggcggccgcaaacgtgaacgctggggccgcaatggcacccattcatgattttgcttataccccaaaacggcggaaacgcgagggttttgccgtttgacgaggctgccggcatcccatacgattcgagtcaattcaacacatcgcctgccgcccgaccaggggagagcggccggcgaacatcatcgggaaatcacacagggggatcgctttgaccatcagcgtagtagatgtggacgtgctcgggaacgagactgcggtaaaagtcgagagcgtcgagaacgtcgaaagtgttgccggacaggccgtcgccgacgccatcgatgccggcgacgaaaccgtcgcgttcctccagcggctgatccgattcgacacccgcaacgat

SEQ ID NO: 2803 - DNA, 6054 bp, Unknown
  R36_18m  MAG No. k141_19536
aagcctgaaaccggctattgcctcagcaatattcagtcggtttcaagctaaatcgttaatcctctggtgaaacgacggtctacttcttcagcagcggcgcgacctgttcctcgtaggcggtcagggcggtgtcgatcacctggtgcatgtcatagtacttgtaggtgcccaagcggccgccgaacacggtgttcggctcggccgcggccttggcctcgtaccgcgcgtacagggccttgtccgcgtccgtgttcaccgggtagtacggttcgtcgccgcgctcggcgaaacggctgtactcctcccacaccacggtcttgtccgggttctgggcatcgcggcgctccgggttgaagttcttgaactcgatcgcgcgcgtgtacggcacgtcagcgtcggagaagttcatcaccgggcaaccgaagtggtcgccctcgtcgtaacggacctccttgaagtccaccgtgcgccacttcaggtcgccaagctcgtaaccgaagtaacggtccaccggacccgtgtacaccaccggcacgcccgcggccttcagcgcctccttgttgtacggctgggactcgtcgaagaagtccacgcccagcgaaaccgtgatgcgcggatcgtcgatcatgcgctccatccacttggtgtagccgtccgcgggcaggccctcccacgtgtccttgaagtagcggttgtcgtagttgaagcgcaccggcaggcgcttgatgatggccgccggcagctcggcagggtcggtctgccactgcttgcccgtgtagttcttgatgaacgcctcgtacagcggtcggccgatgagctggatgcccttgtcgttgaggttctgcggatcggtgccggccagctcgcccgcctgcccggcgataagcttctgcgcctcggccggcgtgtaatgcgcatggaagaactggttgatggtgcccaggttgatcggcagcggatagacctcgccgtcatgcgtggcatacacgcggtgcacgtaatcggtgaacgaggtgaacctgttcacgtactcccacacacgcctgttggacgtgtggaacaggtgcgcgccatacttgtggatctccgcgccggtctcctcatcgaagtacgagtacgcgttgccgccgatgtgatcacggatatcgatgatgcgcacgcgcgcgccggtgtgctccaccgcctgctgcgccaccgtcagaccgaacaggcccgcgccgacaatgactaggtctgggtattgagtagtttccggcatgcgcgcattccctttcataaagtcaatacatcaattattatgttcgatctccgagaaaatatcttactcacccaattgcaaatcggcaatcttcctagacttaccagcagactggacacaatccaagaccagacgacagactcaaggcaaaacgatggcatgttcttacatttctgcgtctttgcccggacccgttcgccgccacaaagacagagtgcagaacaacgcaaccaccaatataagcccccgcactcaggcaaacctcaggttacgattggtagatatgagcaattccgaacaggccctcgactcaaccaacgaagcagtcaacaaagcatccaacgaagcaaccaacccatcattcgcgccgcaacacattctggttaccggtggcgcagggttcatcggcgcaaacttcgtgcactgggtggcgcgtaaccatccgcaggtccatatgactgttctggatgcgctcacgtatgccggcaaacgcgagaatctcgatggcgtgccggccgcgaacctgacctttgtgcatggcaatatttgcgatgccgagcttgtggaatccctgttttctgggctgaaccaacgctctgcagccgcagtacccccgattgacgccattgtgcacttcgccgccgaatcgcataacgataattcgattctcgacgcctccccattcctcaatacgaacgtgaccggcacgtacgtgttgctcgaggccgcccgccgccatgatattcgattccaccacatcagcaccgacgaagtgtatggcgatctggctctggacgaacagcgcaaattcaccgagctcagcccttacaaaccgtccagcccgtattcggcgtccaaggccgccagcgaccacttggtgcgcgcctggcaccgcacgcacggactcaagaccaccatcagcaattgcagcaataactacggcccctatcagcacgtggagaagttcattccccgccagatcacgaacattcttgccggcattcgcccgaaactctacgggcaaggtctggctgtgcgcgactggatcagcgtggaagatcactgcagtgccatctggacgattctcacccgaggccgcatcggggaaacctacctcgtgggagccaatggcgaatacaacaacattgatgtgctgcgcatgattttgaagctcatgggccgcgacgccaacgacttcgaccatgtgaacgaccgccccggtggcgataagcgctatgccatcgacgccaccaaacttcagaccgagctcggctgggtaccaaagtacaccgatttcaaggaaggtctggccgcgaccatcaactggtaccgagcacacgaaaactggtggatgcctgataaagccgggactgaggaaaagtatcggaagcaagggcactgatagccattgacaggccgccgataggtcactgacagcgcaatcaatgaataccgattgcgagatttggtggcgaaaatatatcttatgttgtacaataatcatgtatttcaattataaattgattattatgacttttaaagaacggtaatgcgatgattcgtttacaaagacttgttctagacaacatgaggaacatatcgcacggcgtcttggattttgacgatctgcccgctggcggcagcgtaacgggtatctatggacagaatggatcaggcaagaccaccgttatcgatgccatcgggatactgcgcgcgctgctatccgggaatatgctgccggacaccgccggcgatgccattagcgtcagcaccggtcttgcaaccttgacggcgacgctcctcatcggaggaaaacagaagcccagctaccttgaatacaaggtgtccctgcgtaaagcgaacccggattcgacgcgagcgcgcgtcgtttccgagtcggttcgcatcggcgacgatctctcacgcctaggcagggaggcgttggggcatcggacggaggattctgagaccgatggtttcgtgtcaactccggtatatgtgtggcgctccatcgaggcggtcacctcggtgaaaaccgtggtctcacgcaccgctgatcgtgcgtacatggaggggcgctcattcctgttctcgcggtgtgccacgcttgaagaccgacccgatgccgagttcctcatcgactgggcggtctcccgcgtacgggaagcgaatggtgtgtccgccagatcactgacatacatcaacgaacgtttcgatgagttcgtacgcctacgcaaggccttatgcgattacgcgaccaatgatgtcttcgtatccactacccgtcgtggctcctatgccgcatatgcgttcatccccatcatggaggaggattccgcaggtcgcaacacagagtttctgttcgacctgttgcaaccgaacccgctgaccacgggccaggcgaaacgacttggacagaccgtggagtccttcgaccgcatcctgcccaccctcgtgcctggtctgcatgtcctgctgaagatcggaaccgcgccttccggcaaagatggcgaggatcgggtcaccgcggagctgttctcgcgtcgtggcgatatcacggtcccattccgctgtgagagcgaaggcatcatacgcatcaccgcgctgcttggctatctcaagcacgcgtataacgacgagaacgcgctggttgccgtggatgagttcgactccggcgtgttcgagttgctgctcggtgacatgctgtaccagttggcggacgggtgcgcagggcagctggtgttcaccgcccataacctgcgtgcgttggaagtgctgccgaacggctgcattcgcactacagtgaccgatcccaataaccggttcgcgatcatcccccgcaagtcctccacaaacaaccagcgccgacggtacctgacggccagcgagctcggatggagcggccccgacatctatgattcgcccataccacgcatgttcggcaacagtctctatgccgccggccatcccgatgaggacgatgacatcgacgacgatctggcagcactcaacgcctccggaacgaaggtgaaccgtggctaaacgcaagatcgtcctgctggtcgtagaaggagcaagcgacgccagcctgctcgtgccggcattctcgtcgttaatcgagaaccgcctattccaagggcaggaattccactgcgacgtgttgactgcgccaaaccaccgtgaggagttccgacgtcgtaacgggttctatccagcggacaatcctgcccagacggtgcgcgaacttgtggagtactacctcagagaccacgaccgcgcctggggccagctcggccatgtcatccagatctgcgacctagacggggcgttcacatctgacgaccgagtgcgggaagacccattggtggatggaacgcaatattcaacgaccgacatcatcacgccaaaccgcactatcctgattgcggatcgcacgaccaagcgaaacggcgtggatgccttgctgaaactcgatgggttcaggaagaagaacggccgcgccacgctcatggtcccgtaccgcctgttctacgtcagccgcaacctcgaacacgcatttcgcggtaggattgacaatctagacgcacagcacaagcagagcagcgccatcaaactagcagaccgctttacccgcaacccgaacctgttctctacaacccttcaatctcttcggcgaatacacggcaatccgacaacgtgggaggaatcttggcaatatgccatgcaagacctccactcactcgaacgcggtagcaacctcgcattcgtggagccatacttggcaggcgaactgcggtaaatccatcagaatagtttcagaaccatagctggttcgagctcagctagacaccaaagttggaaaacgtagcccagtgcaccttattctggttataaaacgtaagaacagggctcaaatttggttggaaaacgtaaactatggcgctattgctgttttcgtgggtggggtttctccgttgagttgttgagggagtaagagaagagcgctttccgggtaggatgttttcgaccaagataaacaaacaaccgcaaagcgcctgatgaacagcatattcaaccaacttctcaacgtccccgggttctaggtagaagtgcaacgcctgtctatggttggaagtgttcaagtccacaaccgaagagaaagcgttgcactcgatatgaaagcctattcccacctgtcggcacaggaacgcatccggatcgacgagttgaggaaccgtgacgggctcggggtccgccagatcgtcctggggattggccgcggcaagtccaccgtcggacgcgagccgggacgcggcccgtggttcgcgtccgacgagaacgggtcctaccggccctacaggccgaaacggctgaaggctgtatttcgtcaaattgaggtggacgtgttcggcacttaatctgaacaccgtcggcggttggttccttgttttgttgtttgtctggtttatttcatgagggagtgttcgttccggtaggattcgccatggaagcggaggatcccgccgtggtggacgatgcggtcgatgaccgcggcggccatgtccccatcgccgaacacgtcgccccatctgccggactcgaggttcgagtcggagatgacgctgcgggtctcgtagctgtccgggcagccgccgccgtttggatccggcccggctcgcgttttccttcccgaacaggttggccaggaagccgagccggccgggcgtggcgtcctccagggccttcccgggcacgccgtgcgtcaacggcaggttgcgcgccaaggcccatgacct

SEQ ID NO: 2804 - DNA, 12226 bp, Unknown
  R36_18m  MAG No. k141_19567
atggcaagacctgctcacacgcaccatcgccaccaatttcaccggcgatatcgaacaagtccccaatacgttctccgccatcaaaatcaacggccagcgtgcctacgacttggctcgcgaaggcaaggatgtggaactcaaaccccgcccggtcaccatcagcgaattcaccgtgctggatatccgcagcggattcgtagcaggggagcaggccgctgaaccattgcgggaagacgcgaacacgggagcgattcccgcacttgatgttgacgtgcggatcagctgttcatcgggcacctatatccgcgcgctcgcccgcgatctcggcaaagaacttggcgtcggcggatacctgacccgtttgcgccgtacgcgagtcggccgattcgcgttgccggacgatgccagcggacttatcgctcctgaggcgatgcttgacacgcgaacccataccgtcaccgcacataccgatcagaagacgttcactaatcgggaagggcaaaccgtcacgcgcaacaagtgcgtattggacactcctgaaggtcttgccggtgacgagcgccgcaactggctgcttgaccatgcccttaccatggaacaggccgctcgaggtgcgatgccggcgcttgacatcactcctgaggaggccagcgaattacgcttcggccgccgtattgagcgtacaatcagcgagcccactgccgccattgtgccgcaaacgcatgatgtggcggcgattatcgagcgtgccaacgctcatcaggccaagccggtcaccgtattccccctcgcgtaaagtagacgcggtgaaaagtgcagcttgatacaggccgcgcacaacaacgcctatattgcatgaataacatcgcacggataaaaggaacagcacactgatggatatcacgcacctgacccctgacgccgaaggttcgattgaatggccctcgttcagtaacgacaagaaggccgtggtgacattgggcgcatttgatggcatgcacttgggacatcaggcggtgatcaagcgtgtggtggaactcgcgcaccagcatgatgctttttccgtggtgattctgtttgacccgcgccccgcattcgtgcacggctgggccgcctcgcaccatggcgaggaacccgcggtgcagaacgtggatgccgaagccttgaccagtgtggatgatcgactgcaccgcatggaacagttcggcgtggaccatgtgttggtggtgcactacacgctggccttcgcagacatgtcatacattttcttccttggcagactcaccggcaagctgggcatgcgtacgctggtcctcgggcaggatgccgccatgggcaaggggcgagaaggtgatgtgaagcatatcgccaatcttgccgccgccaccggtgtattcgaacttgatgtggtcgatgaccgtggcccgggtgaagtgcgcattccgcgcgatttcaagccggaagccccgagcgaatggggagagcccgtcgacccgctggccaatgccaccaaggccgagcgccgcgcatggagcaagaagaaccaggccaaggcaatgcgcgcctggagctccaccaatgtgcgctacctgctggctcatggccgaatccaggatgccaacgccattctgggtgctccgcacgccatcgaaggcgaagtggtacacggtgaggagcgcggccgcaccatcggattccccaccgccaatcttggctccgacattgcaggctacattccggtcgacggcgtctatgccggttggctggtagatggtgagaaccgctggcctgccgccatctccattggcaccaaacccaccttcagcgagaaaacaggactcaacgaacgcgtggtggaggcctattgcatcaccgatgagtggattgatctgtacgaccataaggttcgcgttgaattcgtcggtttcctgcgcccgcaggtcaagtttgatggccccgaccaactcgtcgacgaactcaagcgcaacgtcgaagagaccaagcgtcttaccgcctgaggcatatctcagggctatttacgcactcccaaggcatctaaggcgtcggacaatgtgttggactccaccagccgaagtccctcgacatgcaccggcttgcgcagcggaggaatgactgccgttgtaaagccaaggcgcgcggcctcgcgaaggcgatattccatacgcggtaccgggcgcacctgaccggtcagggaaatctcgccaatggcgcacgtggctcgcgcaatgggttttgacgtggcggcgctcgccagtgccgccactatcgccaaatcggaaccgggctccttggcctggcccccggcaatagtggagatatacaggtcgttggacagcaggttgagcttgctgtgacggtagagcaccgcgaccagcatggcgatacggctggggtccacgccattgaccgcacgtcgaggtgtgggcagcaccgacgtggtgaccagagcctgtacttcgataggcagactgcgatgcccatccaatgtgaacgtcacacaggtgccttccatgggtgccgcgttggccgcatcagggccgtctccagacaggaacaatccggcgggatcggtgacctcttcgatgccctcaccgctcatgtcgaaacagccgacttcatcggtcggaccaaaacgattcttcaccgctcgcaacattctcagcgcggtctcgctgtcgccttcgaattggcagaccacatcgaccagatgctccaatgtgcgcgggcctgcaatcgaaccgtccttggtcacatgaccaaccagaaataccggaatgtcaagcgtcttagcggtatctatcagcgcgcttgccacttcgcgcacctgagtcgaaccgccggaaatgccatcgacctcctgcgagacgatggtctgcgccgaatccacaatggccaaggccggcttgttctgttcgatcagccccaatactgtggacagatcggtggtggaggccagtaacaagttcggctccaccgcgttgatgcgggaagcgcgcaaacgaacctgcgcctgtgattcctcgccggaaatgtacagcacggtattggcatgtaccgacggtgcgttgccctgtactgacaccgtgtttgatgtgccgccctgcgcccggcccgactgttgggcagaccgctgaccggctcctcggaatgtactgtctcccgccacaacgcgcgcgatattgccggccgtctgcaacagcaatgtcgacttgccgatacccggttcgcccgctatcagcgtcactgaacccggcaccacgccaccgccgagcacacggtcgaattcggaaaacccggtaccgagccgctcgacgctttccgtgcccacttcggtaatcggacgggctgcagatctggcgttgttggcaaccgtaaccgactgcgtgcgtgatgttcggccgggagcggccgtgcgagagcctgccgccggccgagcctcgtgaaattcctcgaccgtgccccactgaccacactcggggcaacggccgtaccacttcggcccgttccaaccgcattcggaacatacatactgcacacttgatttcgccatggtctcaccctaacccaaacaccagcggacggtaaatttttaccgttcacaagagtttcacgcggcttgcgcacaacgactaagattacggccgtctagcgtcacgcggctgtgagagaatcggggtatgactaatagtgagaactcctcgaccacacaatcccatggcaagttgattgcagtggtggttgccgcagctgttgtgattatcctggcagtgctttcggcctttgtgtggccgggttgggccatccagaagaatgatggcacctccactaccacccaaaacagccagcagaaaaccgaatcatccgagccgatcaagccgaccatcgacgccacagctttgccggatgatgccagtgagctgttgaaggccatgccggacagcgtgctgaattacgcgcgtaccaaggcggatgcctccacgacgtggaattccgcgtcgccgctcgaggagtacactctgacctactccactggtgatgccgccaaggatgtcacgctggtcgccgcgcagtggtcgtcggcggacaatgccaagacccagtacgatgcgttggtcgctgcgcagaccggcgatgagtcggcatccggcaacgtcaaggtttccggcaacgtcacgggcgcgtacgtggtgaaggccgatgcctccaacagcaagaacgccgttgccatctggcagaacgataccgtggtcttccaagctaccggcaccaaggaagcggtcgatcgcttctaccagaagttcccgatgtagcatctagtatcggctgtcagctgctgcacaaacttatgaacgttggggcatccacattgctgatgtggatgccccaactgcgttcagggcatatgcggactatcgacaacatactggtttcctctgtctggcaacacgtgtattatggtgcaagttgcaacttttacgattaatcgaaatggaggcttcagatgggttctgtcatcaagaagcgccgcaagcggatgagcaagaagaagcaccgcaaactgctgcgtaagacccgccaccagcgtaagtagtcttacctgcaatcaaggcattagaaaccccgtgatcgttatggtcgcggggtttctctttttggctcctttgccttgttcgggcaacagtaaagcccgcacctgcgatgtacagatgcgggcttggaaaagttcagtgatgtgagacgatcacttgttggcgttggtcaacacgcgcgggccgttcgggtcgccgacgatgaccttgtcgaccatgttgaggaacaggccgtgctccaccacgccgaccgtgttgatgaggtcttcggccagctcctgcgggtgatcgatgcgctccaggtgcaggtccaccacgaagttgttctcgtcggtgcgcacttccttgccatcggcgtcaagacgaagcaccggcttgtagccgcggtcctcgaacttcttgatgacgtggccagcgccgaacggaatgacctcgaccggcagcgggaacttgccgatggtgtccacaaccttggactcgtccacaatccacacgatctggttggagttggtggccacgatcttctcccacagcagagcagcgccaccgcccttgataccgttgaagttcttgtcgacttcgtcggcgccgtcaatggtcacgtcgatgtggtccacgtcgtcgatgtccacgatcttgatgccgtagctttcagcctggacctgcgtgcggcgagacgtggttacgccagtgaactcaagaccttcctcctgatgacggcggccgagctcgtccaccaggaacttcacggtcgaaccagtgccgaggcctgcgatcatgccgttttcaacgagcttggcggcttcgatgccggccgccttcttcagcgcatcctgctgtgccttatccatggtttctcctttgccatccttgcctccgccgcatggatcaacggcgtgaagccttatctcctatcctaacgcgaatgagcgattttgtgtcatcgtgtccgattgcggtacatattcgtgtgtttgggtgttagtgtcgtacgaatggtgcgttggcgatggtcaggttgccgtcgccgtccacatagccttcgatttcgatgctgcctttgatcggcatcggctgcccgttgaaatacgggctcgttttcggcgcgggggagaaggtcagcgtaccggataccgtcagtccgcttggctttgcggggtgtacggggtgcgctgattgtacaggttgcgctgattgtgtcgctaagggtgacgaagacttggtctctggccttgtggcatccgtcgaatccgtcgccgcagccggcttgcgcaaacttgccgcatccgccttgccatccagcaccaactgcacgtctggaggcacatcggtgccatgtgcgtattcggagcccagtagcgactgccagccttcaatcggcagatagccgtcgcgcgcacccgaacggcaatcgcccgcataggtgcgtgccaattcatcgaccaactcattgccctcgttgccggcgtgacctttgacccatcggaaatccaccgggccagggcgttgtgagatctcacggtcgatcgcctgaataagctctttgttcttcacaggctttttctgcgaatttttccagccgttcttcttccagcctttgacccacttggtcgagcaattgatggcgtactgcgaatccgattcgatgagcaatggctcagggcccgggtgcgctcgcaaagcttccagcactgcgcacagctcaccaatctgattggtgccgttggtcgcgccgcccgcatcataaccatggtcgtcgtgcttatggccgggcttgccgccggcgttctgctcatgatcggcccaggcccagcccattggcccgtttggattccctaatgcggaaccgtctgtggatactgtgatagtcatgttctccaccctaacgcaagctgtgcaatctcttgctgaagtggggttgcccagtgcgaggcaaaacaacgtagtgaagagtgtgaataacatcacacctattgactttgcttgaaaaacatgccatcgcgcgtgaataggtgagcgctcacaagaaaaacaagacatctcctctctgcgggtgaggccggcaacaatggcgcatccggtatctggaatgagaataagggactgtacaaaaccagtgacggcaacatcgaaatcctcaaaccagaggcggacagcgatggttcgacggccacggccgcatccaagggcaccatgcttatcgcaggcaactccaaaaccgtggcactcggtccaggcggcatggccttggctcccggcctgccgctcggtcttggctggttcatccgacgccgcttaggattggatgcctccgacattctggaccgtaagctcggcttgaagtaacggctggttcggacgtgattgctgtcacgtacggatcatgacgacagcgcgaaggtcctcatcggtttacgtcgatgaggaccttcgcgcgcattaggggagtctgttgcgggctgcgctacgcgggtcatgctgcgcgggcgtgctatgcggacaaactacgcgaacaagtcgttcagtgcctcggcaatcgtcggatgcgtgaacaccatatcgcgcaacgtgctggccggcgcgtcaagatccatcgccaacttgacgatattgatcacctcgtgcgactcgacggaaagcagcatcgcacccagaatgcggccagtattgcgttccacaatcgccttcatcagaccatccggtcgccgcattacctgggccttcggcacagcggccaccggcaatcgcttgaccacataatccaatccggccgccttcgcctcgcgctcattcaatcccacgcgcgagtaaggcgtggcgaggaatgtgctcgacggcacatgcttgcggtccttcaccgtgtacggacggtcggaaccattgagctgcgaccacaccacgcgatagtcatccagcgaaatgtacgtgtgctgcgggccgccgttcacatcgcccagagcccaaatgtcggctgctgtggtgcacagaagctcgtcgactttcacggcaccgcgttcggtgagctccacgccagctgcctcaagatgcagtccctcgacgttcggcgtacgtccggtggccaccagtaccgcgtcggtggtcaggcagaatcgggcttcagccggctcggcgaaccgcggctcgccatcgtctgatggtttcgtttgaacgtgtgacatcgtggcgtgatcggtcgggttgctagtggggctggtggttgttgtagtgtcggtggcgccggtggcgtcggtggcaccggtgatatcggtatgagcgttcccggtgccggcgggggtggaatcgcaagcttgcgatgcgccgcgagtcatacccttcaccgcaacggacaacctgacgccgccgtcagcagcaggcgcgatggccttggtatccgcgttgaacaggaacttgacgccctgcgcttccaactgtgcgcgaatcgcggccgccacatccgcatcctcgcgcggcaggaactcggcattgtgctgcagcacggtaaccgccgtgccgaaatcggcaaacatcgaggcaaactcaagtccaatgaatcctgaaccgataatcaccagtcgctgcggcatatcgtcgagatccatcagtccagtgctggtgtagacgccgggcgtagtgtggataccgggaatatccggaatgcgcggcgtggcaccggtattgatgaagatcttgctggcggtcacggcgaccgggccctcagcggtggcgatttctacgctatgagggccggtgaagtgagcgcggccggtgattacggtgatgttgtcttggtcggcgagcttgtgatagttcttgtcgcgcagcatcgaagtgacgcggcgcttctccttgatagcagcctcgaacgctgcttcgcgggtttcgggagtactgttcgcgccatcccgccgcgcctgttcggcggacaaaatcagtgacttggacggcaagcatccgatattgatgcaggtgccgccgtacatgtcggcgcttgcctcggcgacgacgaccttgcggccggctgcactgagcttggcagccaaggttttgccgcccttgccgaatccaatgatcagggcgtcggtggtgatagtgggggaggtgctgggtgtgctgatggcattgggtgtgctgatggacatggttacttccttacgtattcgagtgataagagtgcgttgtgctgatgtgttgtgtgccgtgcggcgtctgttttcttctttgactgccgaagcgttatcgactgatgctggctaggggaaacgcgcgggattattagcctttgcgctcgctgaatatctgttcggtgatgtcgtggatggtggtgtgttcgagttgttcgaggcaagtgcggttgagcccggcatagatgtcgttcatcactgcgcccattgaagatgacaccagacagtcctcgtgtacgtcgcccggtgtccagttcactttcacaaaagtggtgccggtggcttccgctaccgcgcgcaaagtgatttcggcggcgggccgggccagagcgtacccgccttcagcaccctctttagtggcgatgagtccggctgaggcgagcggtcgcattactttgcgcacgcgcgccgcattggtacatatgttctcggccaggatctgactgggcaggtgtgtggcgcgatggtcaaggtagaccaatgcgtgcactgccagtgaatggtcgccgttcatgaaacgacctccttaccgagtcgatactgtaactatgatgtgtacagttatgatactgtaatcatatcagatacagttagtgtgtcaaatcggggttgaagaggtggatgactatgtgtataagtgaggtgtccacatggttatccacaatgaatgtgcgtaagtgaagctaggaccacatacctcggatcggcttccgtttccgcacccactacccatatggtggtgtcatgaacaggatgaccgacggcatcaccaactatggagctctgccaggctctatatacgatcagcctccggaagaatcggaggcagtttttgttccgcccgaatttgcggggtcattttctactgactcgaaatacccgacttctcgcgactcgtcatcgccgaacagtggtgcacatgattctgcagcgacaccgaccatgagcgaaagcctcgcccagcgcagacgcgacatggtcgcacgctgcaccgaggaagcgaaacgggcgggcaagaagctgcttttcggcatgaccacttccctcgctctgcaatccgtaccgattcccgccgattgcgacctcgactcggccaagctgcacactgtatccagcgttaagggcaagcggtttcgtacacgccatgcaccactgcaaacgcatatttggaaacatgcggctaaagccgccaatgtggaaatgaaccaacacgtgtttgcgctggacctgtttcacgtatgggcccaacttgccccgtatgtttcttttgagtccctgattgtgctcggggatgccgtcatcgctgctacgagcaaacagccagtattggccaaggatcgtgatgctgctgcaatctatcaggatctggtgaagttcgtggagcaatttacccgattcagagggcgcccgtcctgcgttcgagcattgcctctgatatcacctggtgctgattcgcccaaagaatcagaagaacgactctctctggtagcgcatgggattccacagccggttgcgaactatgtggtgccggatgcggcttttgcatctggagctcccataacgttggacttagcgtggccagagttcaaggtcgctgttgaatatgatggcgatcatcatcgtacgagtaagactcaatggcgccgtgaccaagagaaaaggggtgtgctggtcgggcggagatggctggtcttcgtcgccacggcggcaagtatcgctaacgaggacgctcgtgctgaattcgctttcaacgtggcgagggcgcttgcttcgcgcggtgccgtattcgagtttcatgtagttgccatgtctcttgaagagttggcgcagagcctgctgtgaccataatgtccgaaacggactgatgtaaaggcaatatttgtacgacctgttgttgtggtgtgtgcttgatattgcatgccgttcgattgcgatgcctcgtagtgatggatttcgtgaatgactagtgttcgattgtggagggaaatgtgtcatagtggtcgattgggggtgttgtcggtgcattgagcgtggatttgcgccaatgggtgtgggacgctacgcatgttttgccgatttttgcgtggcgtcccacggcccctcgggtaatggctgtgacgggtgtggcaggaatggcgtctttccggggtttccagtttgagtgtgtgggatgggggaaatgtaaaacgattgacttagctgttgtcccacgcttttgtgggatggcagctctggaatgggcaaattcgtcgtggcgtcccacaacgatgttaaaactcgaccatgatgcaagccgaccgaacgcttcggcggtcatctggccgctgtgaccccacaatgatgatggtaggcaggcgaacgtttcgcggtcatctggccgtcctgccctgcagtgatgttgagaaaatgcagtcacggtgcatgaggagaaccgttgacctgcgtgtttcagtggtcgcgaactgcatatgcgctaaaaaagctctgcagtggattgcatgaatccaatgcagagccttattagttgcggtgaacgcgactaacgcagcgatttcactcgctcagggccttgtcgaccacgacggtggcctcgtcgagcaccttgtccagagcctcgggggagacgaaggactcggcgtacaccttgtagatgttctcggtgccggaggggcgggcggcgaaccagttgtccttggtggtgaccttcagaccgccgatcttggcgtggttgcccggtgcctcggtcagcttggcggtgatgtcttcgccagccagctgcgtggcggccacatcatcaccggtcagcttggcgaacttggccttctgctccagtgtggtcggggtgtcgacgcgcttgtaccaagactcgccgaagcgctcgacctgctcctggtgaagctgggccgggttcttgccggtcttggcagtgatctcggcggccagcaggtcggggatcagaccatccttatcggtggtccacacgcggccatccttgcgcaggaagctcatgccggagctctcctcgccgccgaaggcgacttcgccgctgaacagcgggtccacgaaccacttgaagcccaccggcacttcgatgaccttcgcgttgatcgatgcggccacgcggtcgatcagggaagaggagaccagcgtcttgcccacggctgcgccctcaggccagcccggacggttgccgccgaacaggtactccacgcacacggcgatgtagtggttcgggttcatcacgccccagttcgggcagacgatgccgtgacggtcggcgtccgggtcggtgccgccgaccagatcgtacttgtcccaagcgccggcgttgagctcgtcgaccaggcccttcatggcgtacggggaagacgggtccatgcgaatcttgccgtcgtggtcgatggtcatgaagcgccaggtcgggtcgacctcagg

SEQ ID NO: 2805 - DNA, 5144 bp, Unknown
  R36_18m  MAG No. k141_20309
tcctgcttggcgaggatgaagccggagcgcgggccgccgaaggtcttgtgcgcggtggaagagactacgtcggcgtacggcacaggactcgggtgcagacccgcggctacgagtccggcgaagtgggccatgtcgacccagaatttggcgccgacctcgtcggcgatctccttcatggccttgaagtcctcgatgcgcgggtaggcggaccaaccgccgatgatcatggccgggtgggtttcgagcgcacgctggcggatgatttccgggtcgatgcggaaggtctcggggttcacgccataagcctcggcatggtagaagcggccggagaagttgattttcatgccgtgggtcaggtggccgccgtggtcgagggccaggccgagcacggtgtcgccgggcttgacgagcgcctggtagacggcggcgttggcctgggcgccggagtgcggctggacgttggcgtattcggcgccgaacagggccttggcgcgttcgcgggcgatggtttcgacttggtccacgtattcgcagccgccatagtagcggcggccggggtagccttcggcgtatttgttggtcagcacggagccctggcattgcagtaccgctcgcggcacgaagttctcagaggcgatcatctcaaggccattgcgctggcggcccagttcggagtccagcagttcggcgatctcaggatcagtttcgcagatcggcgcgttgaaagcatcggtcgctttctgcgcaaggggtgaagcggtcatgggtgctcctttttggtatgggcgacaattgattcgccgttgccgccttactgtatggccggtttgtagccggcctgtttcatgatatggccggtccccgttcgatggcaatggtgattttcgccggtttgaccggtcggctacgcgagacggacggctcttctgcccacggcccacgctaaactggtgtggattcatcatccctttcaggcagaaggattcatcgtgacaaccaccttccattccacccgcagcaccaccgattcgctgaccgccaagcaggcgattcgtaagggcatcgccgatgacggcggcctgttcgtttcggacgcgttgggcaagaccaaggtggacgtggcctccctgccgggcaagtcgtaccagcagatcgccgccgaggtgctgggcgcgctgctgccggacttcacggccgaggagctgggccagtgcatcgccgactcctacggcgaacagtggtccgatgagcgcatcaccccactcaagcccctgggtgacgattacgtgctcgaactgttcaacggtccgacttccgcgttcaaggacgtggcgctgcagatcctgccgcgcttcatggcgcacaccacgccggccgatggcgacgcggacgagaagatcatgatcctcaccgccacctccggcgacaccggcaaggccgcgctggccggcttcgcggacgccccgggcaccgcgatcaccgtcttctacccggaaggcaaggtctcccaggtccaggagctgcagatgaccacgcaagccggctccaacgtgcaggtggccgccgtggaaggcaacttcgacgacgcccagtccgcggtcaagcgcatcttcggcgaccgtgccctggccgagcgtctcgccggcaattcgcacgtggtgctttcctccgccaactccatcaacgtgggccgtctggtgccgcaggtcgtctactacttctccgcttacgcccagctgctcgccgaccaggtgatcaacgtcggcgatgaggtcgagtttgtggtcccgaccggcaacttcggcgatatcctcgccggctactatgccaagctgctcggtctgccggtcaagcacctcgtggtggcttccgacaagaacaacgtgctgttcgacttcctgaccaccggtacctacaaccgccagcgcccgttcttccagaccatctccccctcgatggacatcctcatctcctccaacctggagcgcatgctgtactacttgtccgagggcgacacccgtctgatctccatgctgatgaacgacctcaacaagtggggcacgtacgagatcccggaagaactgctggccaagattcgtcagatcttcggcaccggttgggccgatgaggatcaggtacgcgagtccatcaagcactgctgggacgagaaccactacgtgatcgacccgcacaccgcctgcggctactacctgcttgagcagatgccgcgagacccgctgaccccgcgcgtgctgctctccaccgccagcccctacaagttcccgcgcgtggtgaacgaggcgttgggcttcgacgccaccggcaccgacttcgagtgcatggatgtgctggcccgcgaaaccggtaccaccgctccggccgccctgcgtggtcttgagaccgccgacgtgcgcttcaaggacgtcgtggccatcgacggcatggaagattacgtcgaaaaggccgcccagacgctgtaaacataccagcacattggctcccctcagagaggggagccattttttacatcagaattgcgtttacatcagtatcgcggcgactggcagtcctatggcgattgccaacagcacgatagtgccgatgatcacgctggggcgtgcgaggttgacggtccagccgacgccgaaacgtttggggatcatgatggcaggatcgtcacggttgatgtagatgatgccgccaatccagtgcaggtcatcgtcatacggcatggcattatcgtccgaaatgtcaccgccgtcactgtgccgaacaccggcatagacgcgcgccccgttctgcccgtaatacacgccgatcatcagcgcgccgaccagagccgccacggcgatgaacatgccgatgatgccgattagattgatatccagcacgccaatggtgacaagctgaacgcctaggcccaatccaccggctgccagcagtccgatgaccagcacgtagatgctccagacccgcgagaacacaccataggcatacccggtggcggcggggtggtcgggatcaatcgggtgcttggcgtagatgatcgcggcatggctggccaccatcaccgctgccagcaccacctgcgcgagcacggcgtaccaaatcaccatcggactcttctcggcccaaccgttcacattgccggcgatatccgcatgaatcggcacccgctccggcatccggtcatagcccagcaacccgacagcaatggtgacagcgagacaaacgacttgcagcaattcccacttcaagctcatcgggtcgggattgtcccgctcacctatcaatgctgcacggcgggcactggacgcctcccatccctgatcgactttgatggatagtactttgcggcgaaacatctgctgcagcacgaaaccacatatcgcaatcgccaccgctgcgatggacacagtccagaacgccgcgtcgactccgcagagttgccaaacggccagcgagaccagtatggcgcatacgccaagcgccaccgtaattcccgaaaacgcgactttaaatccgcgaatgcgcgtattgacatgggcggcggccggcactgtgacaccgaacacctcatgccggtcggtaacccatggaacccctgccaggccggcggtcactatcaccggcaacagtaaaaacgcacacaacgcgatgttcatcgacacgactgtattattcatcgttatctcccctgatttccttttgttgcaccgtcagtaacgctctgcgaggagcgcacgccgtatgcccgttcgcattgccgtttggtggcatcgaggaatgcggccgaatcaccgccgcgcgccctgtaggccaaggcaaggcgatagagttcctcgcccatccgctcatcctgtgcttcggcagttcggttcggtgcttctcccccgccgtcatgctcggcgacggttgcaccggcaccacgacgcataacgatgtatccctcgtcacgcaacagcgcataggccttgttcaccgtgtgcaggttgatgccaaggtccacggccagcgagcgcacggacggtaacgagtcacctggcgacagctcatcgcccgcgatggctgcgatgagctgcctgtgcagctgctcgtaaatcggcacgtcactgcgctgatcgatttccacaatcacggtcaattccacccctctcaagaactgttctatttgttctacatcaaatataacagttttgccgtatgagtcaagatatgcgaatctcggttgaacatccggcaatgggccaacggcgtgttgcttgaattttctaggaaggcgggaatcgccatgctgccggcgaatgggaaaatccatgtggcttgtcagattctgttcctgcaactgaatagtcccatgagggagtagacagcattgcggcgaagggctcggcccaaaccgcaataaagcgtgccgagcgccaaagccgccaacaccggtatgacgccgctgcaggagaagctcgcgaagctggacgaacttcatgggcggcaccgccgaacagcagtcgaccattctgttcacgctgttcgtggtattccagctgttcagcagtcgaccattctgttcacgctgttcgtagtattccagctgttcaacgccttcaacagccgcgagctgggcaacgccagcctgttcgccaatctgctacgcaataaggtgatgatcggcgtgttcgcgctgatgttcgcacttcaggtgctggtggtgcagttcggcggagcgatgttccgcaccgtgccgctgccgatcgacatgtggctgaagatcatcgcggtcggacagatgcgcggttagagttctttggctcggtagatgcggatggctataagcatggagccaaaatatgcgagcagacacaacacggcgagaacaagcgccgtatgccaccagatcgtcaggaaatcggtaatattcagcaaaagccattgccagtcaacaggcaatcgggccagcagcgcaatgacggcatacaagccaaccaggaccacgccagaggccaccatcatcttgcggaaggtgaaccggtatgcacaggccagcagcaccgacccaagaatgatagccaaagcgaagatgaaagcacctgctgccaaggtaccgatccaccccatatctgctatatcgccaaagacaatgaaga

SEQ ID NO: 2806 - DNA, 6335 bp, Unknown
  R36_18m  MAG No. k141_20484
accagcaaacggcccatcaggtccttgaacgggccgggcatctgacctatcgcgagtattccggcatggcccatgccatctgtgatgaggaaatcgccgatatccgggatttcctacgtgccatatgatgccggaatagcttcaatatggaatatctccgttcaaagaggtaccggtccaagtagaagcggctcaacaatggcggaatggcgttggccacgcccattcatcgcgcgatggttctgcgatcagctcaattcccctgccggctgatgccgcccttatgaccggtggccttgaatggcgtggcgcgtgccgtcaccttcggccccggcagattcgtactggtattggatcgaccgcggagcccggcagccggctgggactcggagcgtcgaccagtacccgtgatgttggtatgccgtttgccgtcgtgtgcccgtttctcatcagcaccttcagcctcgtcaatatcaatgcctttggcgcgcaaagcacgcgcccaccgctcatccatcgaactcctcacacatcccattcgggtttccacgtgtactgcatgtcgtaggcgctgggcgaatggcggcaggtggttcagagtgatcgggccgaatgcgacggcgtcaaaagtcatcgttgctcccttcgatggtgttggccaacaggttccaagggtcaggcacagcgcctttctcaacccgttcgccgccacgatggccggcagcttgcgttcacgggttcccctgcaatgcgcctcattatggcaacacgaaccgacaggtgccggctgcgcctaggatgggaaatcattgctacacgccgaaaagggaaggcgactgtcatgaggtatttcacgaccgacacgcatttcgggcatccactggtcacggtgttgcgagggttcacgacgttcgatccgacgcactcgcgctatgaggaggtgcggcgcgcatgatcgcaagaccgccgaggattgggccaaggaggagacgttcggcgcgggtctgacgtttcgtcaggtcgccgatacggatgcgcatgacaaggcgattgtggatcatatcaacgctgtggtcggcccggatgacgagctgtggattctgggtgatatcggtttccgcacatcgctgacccatctgaagaactgcctgcgagcgctcaattgcaagcatctgcatggtgtgatcggcaaccatgatgactggtggcgggaagaccgccccgcactcaacctgttcgaaagtttggagccgcacgatacggttgagattgagggactcggtacggtcaatctttcgcattacccgtatcgggaggatctggcatacagttggcccgatgatgtggcgaagttcagcggcaaggcgttgccgtttgacggtcgcaggctgctgtatggacatacacatcagctttcgccagatggtgcacgcccggaggcactgaatgttggcattgacacagcattgaccgccgttgagatgtatgcacgctgaacacgcgcctcaacggcattggtctcgtcatctctcgctcacaccaacggattgccggcaagacgggtcaattcggcgttcagctcggggaaatgctcgttgccgacgaacggaccgtattccgtgccggattggaatgggcaccatgcctgaatggtcatatgcttcagccgtgaataaggcaggatgccaccggtgcaatcggctgcgggatcgctcgccatattgaattggatttcagcgtcgagcatctgtgtatgcattccgccgtgtcgaaatagtcgatgccggaatcatgggccacggccacggtacgtgccgcatcggcggcatccaacgcgtccatgcgcatcacgcccagcgccactcgtgacgcaatcatgccggattgtccgatttcctgagtcttcatagtgtctcatttctgttatcgcgaatcggcgaacgggcactgtccgcctcgttgccgggcagcaatctccattgccgcggcttatgtcaccttatcgcttgaagtgcacttgaaggcaactcgcaggcaggcagcgcgcgctgccgggcgcgtcttcgcgtcttcatgtcttcgctgtgatcgagacatcgttgtgccgtgatcatgcctatttcttgtatgatgacctctatagcaacagagctagggggattccatgaacactaccgattcatccaaagtcagtgatgccaacgccggcgcaaacaatgtcatccatatcccgcacaatcccacgcttgccggattggccacgctgacccgcaacgtggcgtacaagaccggggccgataacctggtgatggatatcatctcaccacaatccaccggcgatgacgatgaccgccgctaccccaccgtgatattcgtgcaaggcagcgcctggaccacgccgcatcgcgactacgagatcccgcagctctcggctttggcccgcgaaggctttgtggtggccacggtgaatcatcgcgatgcctcgagcgatccccatgacatgttccccgcatatctcgaggacgtcaaagcagccatccgctatctcagggcaaacgcgcgccaatggcacgtggaccccgaccgtctcggtatctggggcacgtcgtccggcggcaacacgtcgctgctggtggggttgaccgccgacgatccgcggtatgaggacggcaccaatgccgatgagagcgatgcggtgaagtacgtggtcagctgcttcccgcccaccgacatgcttgaagcagtcgacgcattcgacgatgagaccaatccattccggctgtattatttcggcccgttcgcggccgtggtgggcgcgacccatgagaccggcatcaatgccgaggtccgtcagcgcgcggctgacatgagcccctacctgcaggtgcgggatgaccaacagtatccgccgatgctcctgttgcacggtaccgccgacaccgtggtcccctaccatcaatccgtcaagatgcgcgaccggctggtcaagcacggcgtggacgcgcagctggtgctagtcgacggcgccgaacatgagtacgatttctggagccagcaggtcttcgacgtgatcttcgatttcattcgtgagcggagctgaacgtaagggcacacgggcgcgtccttgttataggttgccgagttctcttttagccaattttgttggagcccctgtctgcgtgaacatgccatgacagttctagactgtgttctaggactgtcaatcggcaatgtgtatgaaagcgtgatgtgatgggtcagacggcgattgatggagttgagggacttaatagggccggtgaactcggtgaactcggcagatttagccgttcgcggcagctgatgtggggtcatgcgctgtatctgatttggtggtgtattttcttccgcccgaatgcgcaggtcaaaggcggcgcgctgcgcgtattcggtattgcgtgcattcttgtggccgcggtggcgggcatcgtcggagtagtgctagaatgttttggcatcagtaagttactttagcacgcggccgatttcctctttgagtgcataccgtctcgggtactttgccatgatctccttggcgagagccttggcttggtcgagtccgaaaacgttgcgatattgctcaatccacatggcaacgaatcggtattcgttgcgatttccctgttgcagatcgcgatccagcggcagctgctttctgatcagtcgttctgcttccgcgctgtgattgaggctgatgggcttgagcaaatcacgcaggagttccggccgctgcccggctaaggtcaaggcctcatcggataggcgctcttcagtcatgagtcgtgcaaggactttcccaccgaaatcatgctcatgatagttgcgcaggatgttctgaatgctttgaggccagcccgatttgccgaccatcgatttgaggatgggaatgcaacgttcgtccgccactgaatcactgtgagcgacgtagtactcatataattgtttgatgccgttctcatcgttcagtcgttcatagcaggcctccagcatggtaagctcgccatgcggcagttgagcggtgagctcccaataccccgcatgcttttgcgcggcatcccaatcgtaagtctgttccaagaaagcggcggcccaggcataatccccgtccaggaatttacgtgcgatgacggcaaatctgcattcggccacgtccgtgtttttggacagtagctcatcggcactaattgcgtcgccgccgtacagcagaaagtcatgatggagtttcagcagatagtcctgtgcagctcgccaatcgtaatcggtcaggttcgttcgatggccgtcaatggaatcccccttcttgtcatgaaggaattgttgggcaacattcaatgtggactgcgcataggtgcggcacatgaacgaggtcgtgccaatctcgcggggctgatgctccatctgttctatgtccgccgtacctcgtgcgtgaatatccgcgaatgggatgacgcattccagcggcgtgtgcggccaaaacagcatctcgatcataggggtatcacgtatgaatcccaacgctgcaatcagcatctgctgcgcttgctcgcctgtaacgattggtgccgcggcatacgtataagcgaggatccgctcattgaggtgttcgatatatgtctgtagcacaccctcttcatcatcgacttgtctcgcgaaccacactgtttttcgcaaagccgcgcacatgcgtcttatggccagcggatagtcgttcgattgttctgcttcctcgaatacggccatcacgccgtttatggcggcatctccccatttgaatttccagccgtagtccttgccgagatgtcgccgcatgggagattccatgacgcgatccacggtgctttcgggcatcaatggttccatgccgctcgcgattgccggattcgcagtcacgatggcattgatttcgtcctgattccaaaccagatagaaatgctgagcgggcgtccaccgttctgatttgcgcagtcccactcgttctcgaatatgttgcagcactcgattgaacacttcaggtttcgatgcgagaggatttgctgctacgggtatgtctggccgagagtcgtcctgctttgcaatcatcgcatcgtatgtcacgttctgctgatgattaccgccgtgtttgtaatcacgcaacgtcaagagcaccgcaccaatatgcttgcagtatccgtcatagtcgtaggggcaggtgcaggatgcgaacacgatatcgttgccacgaagtcgaatatcgacatcgtagagttcagaaccgtgcacttcggcgtggaatagtccggccgacacttcctctaatccaccgatcctatgctcgtccacgtaatcatatgctcgctccaggctgcgggaggtcatctcctcttcgaactcgtcgaaatgggcagtcatgacgggcctcctaatgattggtcatacattacggtgtgggacgtagtagcctaatgcagttcggctatcatctgttcagcatcacccatgcaacatcatgtcacggtgcttgtgccaacggaacagacgctcacgatggcggttcagcgtgaaacgatcccacatctggtcctcggcccactcaaccatgccatcatgttcttcatcttcgggattgcccaaggtatcaaggaaccgatcgaacccatacaccccgccgacatcctccggaggcgcatcccccgccccatcccaaagctgaggatccgcaacgtgcacgctgcggtaggtacgcagcagcttgatgtcatggatccaatcgtcaccataatcgtagtaatagcgagcggcacgcgccttgggaaacacgtcgcccagctcggtttccgaagcaatgcgaacttccggcaacggctccaccggcatatattgttcgtatttcgcctcatggtatgagggctcttctccccacaattcttccacttgcacctgcttcccatccgggaatgtggcgcagaagcagaacagatgctcgccgtaccacataaagcattcctgcaataccgcatgcaaatcgaagaacgtcaatgatgccggcaccagaatctcccgccagcattcacgcccgtcaaggcgcaaagtgactcggaaacgaaatgccgtgttgccattgcctgccatgaagactcccttatcaacgatgaagttattatcaccgtaacagagtctggggcaaaccactgcgttacgaatctgattcgcgccctcagaaaaggccgaatcatctgttcaatctccgtgtcctgtggaaaagactctaacaataaccggtactgttcatcatcagcaagtccaatatgccatgtgac

SEQ ID NO: 2807 - DNA, 3314 bp, Unknown
  R36_18m  MAG No. k141_20797
agttgcgccggtgtccataaccgcgcagtcctgtgcgtccagccgggagagaaaacccggcagcggccgcaaggctgactactccgcggcaataccaaggagaacattatggatgatctcaaagatcaatccgcagtgtccgcgaccgcaacgaacgaggtcgtggaatcggaagaagtgcgcgcgcaggaagcgctattgggggaagctgatccaagtctggccagtgccgacgacgtggccaaagccctgaatgtcgacccatcccagggcctgagcgaggaagaagccaagcgtcgactggccaaattcggcccgaatgagctcgccaccgccccgcccgtaccgaaatggaagaaattcctggcccagttccaggacccgctggtctacctgctgatcgcggccaccatcatctcggtgatcgcatggttcatcgaaaaggccaatgcgcagcccggcgcggaaggcggtgaagtgctgccgttcgacgccatcgtgatcattttgattctgatcgtcaatgccgtgctcggctacatgcaggaggccaaggcggaggccgcggtcgaggcgctcgcccaaatgacggccccgcagacctcggtgctgcgcggcggcaaagtcatgcgcatcaacaccgccgacgtggtccccggcgacatcatcgtccttgcggaaggcgactcagtctccgccgatggccgactggtcaacgcggccagcctgcgcatcgccgaggcttccctgaccggcgaatccgtgccggtcggtaagaagccggacacactcaccgaagccaaggcgctgggcgaccgtgccaacatgatcttcaacggcacttccgtgacgcaaggcaccggccgcgcaatcgtgaccggcaccggtatgaacacgcaggtcggcaagatcgccgacatgctctccgccaccgaagatgagaaaaccccgctgcaaaaggagatggattacgtctccaagatcctcggcattgcggtgtgcgtcatcgctgtcgtggtgctggtggcgctcgccgtgctggaaggcttcgacgacgtccatgacgtgattgattccttgctgttggccgtctcgctggctgtggccgccgtgccggaaggcttggccgccatcctgaccgtggtgctggcgcttggtgtgcagcgtatggccgcgcacaacgccatcgtcaagaaactgcattcggtggagaccttgggctccgcttccgtgatctgctcggataagaccggtacgctgacccgcaacgagatgaccgtggagcgcgtggtcaccccgtccggcgcagtgcagatcaccggcaccggttacgcgccggaaggccgcatggttatgaccggtggcgtcagtcctgaatccgagcaggcccagattgtggccgatgaagtcgtcgccacgcttgtggccggcacgctcgcgaacgacggcgaactacgcgaggagaacggccgctgggagatcgtgggcgaccccaccgaagtctcgcttatcgtggccgcccgcaaagtcaaggccgatcgcaagatcacgcgatacacgcgcgtgggcgagattccgttcacctccgaacgcaagcgcatgtccatcatcgccaaggacagcaccgattcagacaagctcaccgtgttcgccaagggcgcgcccgacgtgctgttgagctactgcacgcgcatccgcgtgggtggtcaggtccgtaagctcaccgaaggcgatcgccagtcgattctcgccaccgtcgaacgtctctcctccgaggcctaccgtacgcttggcgaggcctgccgtccgctggaaaccagttctttggctgatgtgcccggtgtaagcgtcaacgccgcaggccaggtgtccgacatcgccgatcaggccgaagccatcgaaaccgatctcatctggaatggcatggtcggcattatcgatccgccgcgtactgaggtgcgcgactccgtgaccgaggcccatcgtgccggcatccgcacggtgatgatcaccggcgaccacccgctgaccgccgcccgcatcgcctccgaccttggcatcatcgccaaggacggcaaggccctgaccggcgaccagctcgaccagctgcccgatgaggccgcactcgacaaggccacgtccgaagtgtccgtgtacgcgcgcgtggcccccgagcacaagctcaagatcgtcgaatccttgcagcgccaaggcaacatcgtggccatgaccggcgacggtgtgaacgatgccccggcagtcaagtccgcggacatcggcgtggccatgggcatcaccggcaccgaagtgaccaagcagagcgccaagatgattctggcggacgacaacttctccaccattgtggccgccgtacgcgagggtcgcgtgatcttcgacaacatccgcaagttcctgcgctacctgctgagttccaatgtgggtgaggtgttcaccgtgttcctcggtgtggtgtttgctggcttcctcggcatccgccagccggaaaccgtgggcgtcaccgtgccgctgctcgccacacagttgctgtggatcaacctgctgaccgatgccgcgccggcgttggctatgggcgtggacccgcagaccgacgatgtgatgggtcgtaaaccgcgtaaggtgacggaccgcgtgattgacgcctccatgtggggcgacatcatcttcgtcggcgtcattatggccatcgtcacgctgattggtatggacatgcacctatccggcggcttgttcaccgaccgctcggtggatgccatcggccatgaagcgcagatgaccgaggcccgtactatgggcttcacgatcctggtgtttgcccagctgttcaacgcgctggcctcccgttcgcatctgcagtccgcattcgtgggtctgttctccaacaagtggctatggggtgcgattggtttgtccgtggcgctgcagctcgtggtgatttacgtgccgttccttaacggtccgttcggcaccgtggcattgagcccgatggcttgggtggaatgcatctgcctggccgcaatcgtgctgattgcctccgagctacgcaagattgtgctacgcgcgatagccaagcgttaagccatcgcaatagccctgattgtgggcatatagcagtgggccgggctctggtattcagggcccggcccactgctatatccaaacggctcctcatggggcggtaattatcccatggggcggtaatttcctcatggggcggtcgctgaaaacggcattattccgcgaaaaaggaaaatgtgctaaccgccccatggggaagttaccgccccatgggaaac

SEQ ID NO: 2808 - DNA, 9025 bp, Unknown
  R36_18m  MAG No. k141_20861
agagcgttcagggtcttctccggcatggtgttgacgatgtgcttggcaacgagctcgtcaacgtacttgcagtcggagtaggcggcgttcttggtaccggtggaggcccacagcggacgctgaaccttggcacccttggcagccaggtcggcccaacgcggatcctcggcaaacttcttctcgaagagctcgtaagccaggcgagcgttggccacagcggccttgccctccagagccttggcctcgtcggagccgttggcttccagcagcttgtcgacagcggtgtccacgcgggagacgaagaaggaagcgacggagccgatgtgcttcaggtcgtggccgttggcgtcagcctgggcgatgccctcgatgaaggcgtcgatgacctgctcgtagcgctcgagcgagaagatcagggtgacgttgacggagatacccttggccagggtggcggtgatggccggcaggccttcgagggttgccggaatcttgatcatggcgttcgggcggttgaccttctcccagagttccacagcctgcttggcggtgttctcggtgtcgtgggccagacgcgggtcgacctcgatggagacgcggccgtcgacgaagtcggtagcctcagcgatctcgcggaagatgtcggtggcgttgcgcacgtcggtggtggtgagctcgcggacagcggtctcaacgtcaaccttgccgagctccttgagctgagcgtcgtacgggccgacctggctcagggccttctggaagatggacgggttggtggtaacgccgaccacgttcttgttggcgatgaggtcctgcagggagccggactcaatgcgggagcgggacaggtcgtccagccagatggaaacgccgttgtcggacgtacgctgagttgcttcagtcatttattttctccttggattcaagccctaggctcccctctcctaggagaggggagctgtccgcaacgcggactggggggagtgggctcaagcattgctcccctcagtcaggctttcgcctgacagctcccctcagggaggggagccaacaattattgaattattgcttagttgctcacttggcggcttcgacttcggcgatggaggccttggcggcttccaccacgtgctcggcggtgatgccgaggtcgatcatgttctgagcgccgtcaccctgcaggccgaactgctcgatggagacaggcttgccgtaggaaccgaggtacttgtaccacggcatggcaacgccggcctcgacggagacacgagccttgacagcggccggaagcacggcctccttgtactcggcgtcctgctcctcgaaccattccatggacggcacggacacgacgcgagccttgacgccctcgccggccagggtcttggcggcagccacagcccactggacctcggaaccggaagccatgaggatgacgtccggagtaccctcggtgtcgaccaggatgtaagcgcccttcttgacaccgtccttggccttggcagcggtctcggcaagaaccgggacaccctgacgggtcagaaccatggcgccaggcagggtgttcttcttctcgaagaagtaacggtaagcctcggcggtctcgaaggcgtcggccgggcgaatgacctcaagctgaggaatcgcgcggaaggaagcaaggtgctcaaccggctggtgggtcgggccgtcctcgccgacggcgacggagtcgtgggaccagatgtacaggttcgggatctgcatgagggcggccagacgaacggcggaacgctcgtagtcggagaacatgaagaaggtgccgccgaacggacgggtgtgggaacccagcaggatgccgttggtgatgcagcccatggtgaactcgcgcacgccgaagtgcagctggcgaccgaactcgttgcagttcggccactgcttagtggcgcactcggccggggcgaaggtggcagcgcccttgaggtcggtcttgttggagccaccgaggtcggcggagccgccccagagttccggcatgacggcggcgatggcgttgagcacggagccggaggcgccacgagtggcgacacccttgccgacttcgaaggtggcctcaaggtcgtcaagggccttgtcgaagccttccggcagttcgccggccttcagacggtcgtacagggcggccttgtccgggttggccttgcgccaggtgtcgaacttctcgtcccaggccttgtgggcctccaggccgcgatcggcgaccttgcgggcgtgggccagggcttcttcgtcgacgtggaaggactcctccggatcgtagccgaggagtttcttgaggccggcgacggcctcggcgcccagcttggagccatgggaggacgggtcgttggtcttgcccggtgtcggccaggcgatcagggagtggaccttgatgagcttcggctggtccggggcggcggcttcggccttggcgatgacgtcggccagaccctcgatgtcctccttgtaggagccgtcgggctggatgaagctgaactcgtcggtgtaccagccgtaggcctggaagcgcttgagcacgtcctcggccagcaccaggttggtgtcgccttcgatctggatgcggttggcgtcgaagatcacggtcaggttgccgagcttctggttggcggccagggaagcggcctcgccggagatgccctcctcgatgtcgccttcaccacagatggcccaaatcttgtggtagaacggggaatcttccttcggggtctccgggtcaagcagaccgcgctggaaacgctcgccgtaggcaaagccgatggcggaggcgaagccctggcccagagggccggtggtcatttcgatgcccggggtcaggccgtactccgggtggcccggggtgcgggtggcagcgccgccacggaagttcttaaggtcgtccagggtcacgccgtagccggagaagtacagctggacgtactgggtgagggaggcatggccaccggaaaggatgaagcgatcgcggccttcccagttgggatcattcggatcgtgcttgatgaagtgctggtacagcgtgtaggcgacgggcgccagggagacgggggagccggggtggccggagcctgccttctcaaccgcgtcagccgaaaggaccttcgccatcttgatggcgcgctcgtcgagctcggtctccttgaattcggtcatggattactttccttccaattggtcgggccgcgtatccggcttgtgccgggcgcttgacgccctcacattgcgattaccatgctagcgtcggtttgcgacgttgcggtgcaattttggcgtgttttggtagtttgtgttctgttagcgttcacagtgaacattgctacgctgcaaacgaacgcattagcactcaagcctaaggagtgctaatacaatgttctaaggtgaagtgcgccacctgcacgtggcggagccaagaaagaggcaatatttctgggttcccgcgtgtcgcggcgtggcgaaccgaccgtcggggtacgccctgagtgaaccgtgactgatatgaatatgtatgcatatataaggaggcgcgcatgacgcaatcaagacgcatgctggtgctgcgcgccgtggtggaggattacatccgttctcaggagcccgtgggctccacttcgctgacgcgcgaccatgatctcggcgtcagttcggccaccatccgtaacgacatgtccgctctggaggatgaaggatatctgattcagccgcacacttcggccggtcgtgtgcccaccgaaaagggctatcgatactttgtggaccgacttgctaccgtggtgccgctcagcgaggcgcagcgccgcggcatcaacagcttcctgtccggatcggtgagtctcaaggacgcgctgcagcgttcggcacgactgttgtccgaaatcaccggtcaagtggccatagtcacctcgccatcgctggccaaggccacattgcggcacgtggagatggtgcccgttgccatgaccacgttgctcgcggtggtgattaccgacaccggccgcgtggcccagcacggcctgaccatcgcatccatgcccgccgtggacgagatcaaccggctctccaacaccgtcaacgaacaatgtgtcggactgtccctatcgaaatccgcggagaccgtgcgatccatcgccgccagcgccggctacgagtcggtgcgcggcgtggccgacgcgctggccgacgccttcgaatcgatggcattggacgaacgcgcggacgaactgtacatgtccggcacctcgcacctggcccactcccggtccctggccgatctggccccgctcttcgacgcgctggaagaacaggtcgtgctgatgaagctcatgagcaacctgagcgaggagacgaatgcatccggcgtgggcgtggccatcggctccgaaatgcacacccccggcctactgcatgcctccgtggtcagcagtggctatgggcgcagcggtgcggcgggcgaaccggcggggaacgatcccgtaggcgaacccgaaaccgaatccgagacggagagccagacgaacgacacggaacccatcgccttcgtcggctccatagggccgacccacatggactatgcggccactatggccgccgtcagggccgtagccagatatttgaccgccttcctctccgagggccggacccaagactgaccgccgtctgtggcacaatgacccgcagaccaaacgaacacaaaggatcaatcaagtggcagattattacgagacgctgggtgtggaacgcggcgccagtgacgacgagatcaagaaggcataccgcaagctcagccgtaagtaccaccccgacatcgcgggccctgaattcgaggacaagttcaaggaagtgaacaacgcctacgatgtgctgtccaatccggacaagcgccgtatgtatgattcgggcgtcgacccgaacgatccgaacgccggtgccggcggcttctccggggcgggcttcggcgatatgagcgacgtgttctccacgttcttcggttccgcgttcggtggtggctcacagggcccggtgccgcgtacccagcccggccgcgacgccctggcctccgcgtccatcgacctgaagaccgccgtgttcggcggcaccgcgcacgtcaagatcagcacgttctccctgtgccaggagtgcggcggctccggcgcccagggcggcgcacagccggtcacctgccccgactgccacggccagggattcatgcagaaggtcgtgcgcaccatgctcggccagatgatgacctccgccccctgcgaacgttgcgagggccacggtaccatcatcaagaacccgtgccccagctgcatgggccacggccgtgtgcgtaccacacgtaccgtgggcgtcaccgtgcccgccggcatcaacgacaacgcgcgtctacgtttggccaaccagggcgaagtgggtgagggcggcggcgctgccggcgacctgtacatcgacattcgcatcaaggcggataagcagttcacccgcgatggcgacgacctgcactgctggattcaggtgccgatgagctgggccgtgctcggccacaatctgtccattgacacgttcgatggtgagaagaccgtgtccatcccggccggctgccagcctgaggacactgtgacgcttaagggactgggcgtcacgaacatccgcaacaaggacgagcgcggcaacctcatcgcccacgtcaatgtactgattcccaccaagctcaacgaaaccgagcgcggcctcatcgaacagttcgccgcctcgcacgattcaggcgccacgcacgtctcccaggcatcccgtccacaggctggccaaaagaaaggcttcttcagcaagttgaaggacgcgctgagctgagagtggatgcgttcttggctcccctcagagaggggagccaagtctgttacttcagcagggagcggcacatggagcggtattcgttgacgtagccgccgccgaagaagacacagtgaccggcgatggggtagagctgccagagcgtgatacgctcctgccatccggccttcaacggatgcacggactggtagccctcggtgatttcgctcagatagctcatgccgaacaggtgcagcatagccagatcctcctcgcgatgaccgccatgtgccgccgggtcgatgagcacagcctcgggctgcccggaatcggcggtccacatcacattgccgctccacagatcaccgtggatgcgcgccggcttgtcggacgcggctcggcccatcagatccggcaacgcttcaatcacgcgctcggtcagttcgacatcgcgcttatccagctcgccacgcctcacaccaaggttgaccatcgggcgcagacgtccatcagcgaaatagctgatcgggtcggtccactcgccggtatccattttcactgggtcctgcaatggtccgaaatagcatgtgccgttatatccgtcaggcgcagacccgaaatattcggcacccacatcatgcatatgggccagagccgcaccaaaagctcgtgccgcctgaggcgtgggggacgcgctgcccacacgttcgatatccagataatccttgccccagccgtatacctgcaccacgcgcgggccgccctgcgcatgagccgcccccaaccattcgagtcctcgaccctcgcattcgaagaatccttccggtgcgaatgccctgcttttgcgatacgtggccataatgctcccttcgtcgcttacgtactatatccactttcattgtagaagccgtggatgttaccgattcttagtgttgttctacacccccttgggtagggtgttcatcgtcataacacatcaaatacttagaaatcacgaggggttatgaattttttccaagcgatcattctcggcatcgttcaggcgctgaccgagtatctcccggtatcctccagcgcgcatatccgtattttcggcgatttgatgctgggctctgatcccggtgcggcgtttaccgccatcatccaaatcggcaccgaacttgcggtgattctgtatttccgtcacgacatcatcaatatccttactcactggttcagctgcctgttcggcaagaacggcaaggattggaaggcccgcatgggccgcggcgacaattacgccacactcggctggaacattatcgtcggctcgattccgattatcatcctcggcttcactctgcagaacgtcatcgagacctcgttgcgcaacctgtggattacggtaaccgtgctgttggtattcggcattctgctgtggatggtggatgccaaggctcgccagaacaaaaccatgaatgatatgacgtatcgtgatgcgttcctcttcggtttgggccagtccatggcgctgattcctggtgtgtcccgctccggcggcaccatcaccgtcggtcgcgcactgggctacacgcgtgaggccgctgtacgtctgagcttcctgatggccatccccgcggtgttcggctcaggtttgctcgaagccatcaaggccgtgaagaactacaaaaccgatgcgatgttccccggctgggggccgaccctcgtagccatggtcatcagcttcgtactcggctacatcgtgatcatcggattcctgaagttcgtatcgaacttctcctataaggccttcgccatctaccgcatcggtttggctgtggtcgtcgccttgctgctgattgtgggcgtgctgccggccatcgatccctccgtggcggctgcggcataagacgggtcgatagacgactccaatataatggtgctcccgctggcgggagccgtcagcgaagctgactgggggtggtcactggaatatgccagcagaaccaccctcagtctcgctacgcgagccagctcccgacattttgtgcgacgtgcacatggtgcactgctatgaacagcccacagggctgttcatccagcgggagcacaccatatatgggctaattgcccatctggcgcagaaacgcttctgcttctttgactagttgttcggcctggggcgctcccaaggaagcctccgcctcggctttctgctgcaagtcgtagtcgtgctccaaatgctccacgtaatcgtgaagctggtcattacaacgaaccagtatcgaggcttgcgccttccactgttcggctttctgcttcagatctgccgtatcgaaggtgaagccgatatgcttgcccaacgcatccagcaatcgcatagtgccggcagaacattcgtcgctgcccaaatattgggggatggacacccacatcgaggaatgagcaaaaccttgctgcgcggcggccacatccaaaacggtaggaatgcctaccgggccgttatacgaccggtctccttcgcattgacagtctccgtcgctgacggcgatgggcaacgggcgggtatgcgggcaatcggagaacatcgaacctaacgtaatgatccgattgacatccagctcatcggcaatggccagactctggctacagtattccttccaccgatagttcggttcgggggcgatctgcgcatagatatgcttgcctgcgtccaacgtgatgtcgtagaacgtggtctgcggccagataagattggtgcgtcccgcaacatggcacagcataggacgggcaacctgatagtcatagaaatcatcacatctaatatgacgaatctcgcgggactcatatcgcttgaccagatggcgcaccgcgttcgtcgccgcctgacaggcatcattccatccctcgaatgcggcgatcaatactgcgccggtgtccttcgctgcttcactcatacctctagagtaactggaattcattgcccgaagcgcacgctttagccataagcgagagtatgcaattacaggcgacacgccgcagctggacgaactacacgcatgtgagtatagtaaacactcgtgcttcggcagggagacctcgccaaggaaacacacgcggacatagcttagttggtaaagcgcaaccttgccaaggttgagaccgcgggttcgagtcccgttgtccgctc

SEQ ID NO: 2809 - DNA, 2972 bp, Unknown
  R36_18m  MAG No. k141_21258
gatatcgatgcagatccaaacctagtcgttgtagagcatcaatgaataaagatgtcactcataagctatcaagagaatccagaacctttttgaattcatatgctcgacacgcaatgtatccagcgtcgtttataatgattcattgtgccttaatggcgcatcgggctatagcgcagtttggtagcgcgcctgctttgggagcaggatgataccaaaccagcaaaactatgaccctcgctgaggtctactgccgcttaggttttgggacttcggtaaaaactgaaaaatggcatccgttaacaatggttaacaatgaccgcagacctccgagtttgcggatgtttcagggcttgatcccttgggtgcctgaaggtacagagtgtcccactcggtgcgtataattaaaaagttatgccttaaggcatgaaaacgggctgtggcgcagtttggtagcgcgcttgctttgggagcaagacgtcgcaggttcaaatcctgtcagcccgacaatgaaagccctactcccacttgggatgtagggcttcttcttttttgctctgggggcgtttgctaacacaattccagtgttaacggattggctgaatccgttaacattttctgttaacgcagcttggtgcctgtaatccttgtgattccaatggtttcggtatgatcgatggatcgtcgcaatccctcacacgctgtgagccaattcgtgagccaactgaccggaacgacattcatgtcacgataattccgatacctcccgatcacatctcactgccacgtcaaattgtcgagatccacaccgaatcttgtcgcgttggcttcaatcagtgcaagcagccactgggccaaacccggttccaaagcatcgtaatgctgtacgaaacgctcgtcggccacgtacatgcggccgaggcacacgtgcattgacggggtgacatcgaaccataccaaggaacgacggtgggcttccgccagctcattgccctcatcgctgccgggcttcacgccgtgacgcatggcatcggcgagccgctgctcgatggcttcgaattgcttcatgtcgcgctcctgcatatcagacgttctcctcacctggtattccgcaacctgcatccactgccggctcccgccccaacggctctgcgcttcttcggcccattctcgggattgctgcgtcgcatcattcatatcgattcctttctgtgcaacgttcataagccgatcgatatcggccaatgcctgattgatatgttccgccttgcgtgcaagttggccccgacgatccgccaactcgcgtattacctcactcggcttggcatcgagcagctgcttgatacgcggcacgggtatgccgagctccctgtacagcagcagcctgcgcagtcgtctgagatccgaatcggaatacagccggtatccattccagtcgcgttgcggagacaccagacccatttcgtcccaatgccgcagcatgcgaatactgatgttcgtcagccgcgacacatcccctacgttgagatgggaaatacgctccgccggagtgtccatgtcgtgtgattgccggtcattcatggttacaggctaaagtatgacatcatgtgagggtcaaatcagcatggcgacgcgaacacagacatcgatttcagttcacggtatccacggctggagtaaaaatccgattatactgaatcgcacatcacactaacggctaaaaccaaccgtctccgacaatccatagggagaacacatggatgacatgaacccacgctgcggctggtgcaatctcagcaatcccgtctatgttgcctatcacgatgccgaatgggcggttccgtcgcatgatgaccaccacctctttgagatgctggtgctcgagaccttccaagccggactgtcatgggagacgatactgaacaaacgcgagcgtttccgtcaggcgttcgatgggttcgacatcgaacggatccggcgctatgacgagaacaagatcgccgaactcatgaacgatccgggcatcatccgcaaccgtcgcaaaatcgtcgcgacggtcggcaatgccaacgcattccgggatatccagacgtcgtacggcagtttcgacgactatatttggcggttcaccggccgtcacgtcatctacgagacaggcatgactacatcccctctgtccgacgccatcgcagcggatctcaagacgtacggcatgcgattcatcggctccaccatcgtctacgcctatctgcaatccatcggcgtcatcaatgcacatgagcctggatgcttcctgcaccgggaaaggtgacccgcgcaaggatttataaggtcgctcgggcagaatctctccgagaggaaccagtgcttctagttattttgcttatcgagttcttggtagcgctctttgaccacggtgaggattccggcagattgttcgcgctactgcgcggtgagcgcttcgagcagttcgctgaaagtcaacccaccttcactaccggatgacggatgatggttttgagattttccggtttggctcggcgcgggtcggataggtagatctcgtgatggcggcgggcgtcggagaagtcgagcccgtagccttgcgaacgcgcgtagccgtccagcatcgtcacgggtgcgggctcgtcgtcgtacgggcctttgtgcatgacctgcgcgaccacgccttcatcgaagtcgaagagatatgcacgattgatgtcgacttcgggatgcttggaggcaaacgatgccttggcccacgcaaagacctcatcggtcacgaattccggcagacgaatcatcgaagtccaatagaagtcggttttacgcgtgtaatcgacgccgggcacacccttctccatgctccataagccctccagcggaggcacggtgtagtcgaagtacccgtcgatatgctcggccgggttctttgacttcttgctcattttgacggtgaacgaaatgccgta

SEQ ID NO: 2810 - DNA, 5509 bp, Unknown
  R36_18m  MAG No. k141_21269
ccgcggaccagcgacaattccatgaacgttttccaaacggagttcttcatccttcgccccccgcactccaggctcctcgtcttgtaagctcacgcaacactagcgcgcgattcatagagcgtcacccaatttcacaaaaaatgtcgcgagttctcatggtttccccagactccgttcagcacctgttcacatccggtctggacgtccgcagctcaaggccagtgtcagcgctggattagcggcgcgcaggcttgtcccagcttcagccggaagcagggaatatgctggtggatatgactcacgcaaacgaacaacgtccagcagcgaccggcaatgccgccgataacgtgtctgacgcccctactggccccgcgacgagcgcggcggcaaggcccacgaccgtcacggctgatggcacaacagccacaaacgccgcggccagttcaacagcaaaacccgcagccagcacctcttgggccagggaaaccaacccacgtcgagcactgttgacgattatcgtcacggtggtggttgtggtggccatcgtactggggctcggattcttcgtgaactggggattggcggcccttttggtgatcattatgattccgggggcgatttcgctggccgttctcgccaagcaccctgaatccaccggcgggcgcagcatgttcggcatctccgatccgaatacgctgcttgacccgattcgccgcccgtccgagcgccgcggcgagtaagttgctgctgcccatcgggcggtaatttacccatggggcggtaaaaggcccatggggcggtttgaagaaattgtgaaaccgcagaataaagtcattttgggataccgccccatgagggttttaccgccccatgggattattaccgccccatgagcaaagccaccccgctatttgcgcgcactgaccaagtaattgagcaccgatccggcggccaccagcagcgcgccacaccaaaacggcagcgacagcgccaaacccagcagcaccgcaccggccccggtggacagcaccggcgtggcataggacgcaatagccagccgctccatagacccatgcagaatgccatagccccagcaggcataaccgccgccaatcgccgccgcggcaatcaacacaaacagccatgcgaccagactcggcggctcggccggccacccctgcccggacgcgaagtggataatccacaacgccacggccacgcaggggaagaacaatgaagtgccgtccaccccatgactcatggctggcgtgaacaccgcgtacaccgaccaagcgagcgcgcccgcgaacgccagcgcatagggcaaagggttggcggcgatatgctgcacggccgcatgccagtcgagcccggaattaccgccgaccgccagcaccacgccggcagtggccacaatcgcgcccggcagcaccttgacgaccgcgtgcttgcgatgggatacgcccgccgacagcagcaccatcatcgtgggccacagatagttgaccaggctcacttccaccgaggatgcgtcggtagaggccagacccagcgagagggatatcgacgattcgtaaaatacgaacaacaggccgccgataatcaggtatttcttggggaactcgcgaatcggggccgggcgccggaacatcagcagcaggatgccgccgaccgtgtagatcagggccgagccaagcgtggcgccgaagttttcggagacgatgcgcacggtgccggccatgaagctccacagcaggattgccatcaggccgatggtcgtggcgcgcgcggatacgacgtggccgccggaatggcttgccgccggtgccggtgtgccgcttgcgttctgtgcgccgttcgccatatgtccgcctctctcgcatcgtttcgaagtcactctacccatcggatgtgtacagcggcagaacggcacgcgaccggcgcgcgaacagggtggggttcggtgattgaaacagcaaaatgccgggtagggtaaatccctacccggcatttgcattggctatgtttcccgccgtctgtcaggttagtcggcgttgaaagcgtagggcagacggcgtgggaagcatggtttggttacgatttatctctcccccacccgcttcgcgggagccccctcgtcagagggggcgaagctactcgaagcgggacttcgggacgaatcaagtatcgtcagccctcaatcgcgatttggtgcttggactcgacttgcggctgggcctgcatcttcggaacctggatgcacagcgtgccgttccggtagctggcgtggatgtcggactccttcacgtcctcgccaacgtagaagctacgcgagcaggagcccatgtagcgttcgcgacgcagccacttgcccgaatcggacgcgcaagcacacttgctgtcggaagcctcgtcctcagcggccggagccttgtcctcatgctcgctgcaacgcgaggcggacacggtcagatagccgttgttgagctcaaggttgatatcttccttcttaaagccaggcatatcgatgtcgacgtcgtaacccttgtcggtctcgcgcacatcggtagtcatcatgttggcgggcattacggcactcatcgtgttgtccgtgttgcgccaaccctcaaagaacggatcatcgaacagatccgagaacatcgtgtcattcatcaaagccggaaacattgccataatcggtactccttgattaggagagaatcggcttggctgccggccgccaacccgtatcgcggggctagcagcggttatcgtggccggttccggaaccctcccgggctctcaacctttaaccttcacttcacccaattcccgagcgcggcaatcattccgggattatgcccacagagaaattgcggcgggaatggctgccggtaaagccggccgagccgagcgccgtgaccaccctcagccagtcttacggctgccagctcccgccagcgggagcatatatacgcacaccagtaggcgtactcatatacctctgccaacgggagcatggttgcacgttcccgcaaactccgccaacgggagcatgctggcgcgcgaacggctcacatctgctgggcgttttcgagcaaggcgtttttgaggtcggactcgatttggcgcatcttgacctgggcggtctcgcggttggcctcgccttccttctggatctgcacggtctccttcagggtggcgatgagttcggcgttgatcttctccagcgtgtcgatttccaccacggaacgctggttggccttttccgcgtccactgcacccttgtgcagggcggccgcgttacgcgccagcagcttgttggtcacatcgtcggccttgttctgcaggtcgagaaccttgcgctggttggacaggcccagcgcgatcaccatctgactcttccacaccggaatcgtggtggagatggtggtgtcgatcttgtccacgatggtctggtccgcgttctggatgattttgatctgcggcgcggtctgcaaggtaaccacgctgatgcggtcgaggtcgtcgagtcgcttggcaaaacggtcgagcttggacttgaagtccttcagcacttgcgcctgcatggcgtcgccactggcggcggcctcggcctccagcgctggcagctggttggcgttgaagtcggcgagcgccttcttgccggccagtacggtcattttcagctcgcggtattgctgggcgttctgcgtgtacatcgtgtcgtacatggagatgtcggccacgagtttggcttgcgcggattggagggtggtgatgaggtgttgcatggcgtcgttgttgggcagttcggatacggccgggatctggtcgagcgtgccggccacgccgaatcggctgatcgaatcggtgccggcgaagttggccgcgcggaagccgtggcgctcccacgccagcttctgcgccgccggtgttttcaacaggttcagcagtgtgtcgcctttctcgtccaaggccatcagcgtgtgggtgctccacacggtcggcgtcgggtagacgatgaccacgtcgtccttgatctgcttgaacgcatccgtctggttcacggccaaatcaagcacatgtgatacgcgcccgaattgtccttggtcacaagtccgccgttcacgagcccgtccgccacggccttgtgcgtgtatagcacaatcggtgagttgaagacgatgtcgctttggggggccttgacgcctttcgcattgccgtattcgacggccgcgcgcgaggaggggaacaggtaatccatgcctttccggtccgcatccatcatggccagcgatccggccttgcgatagtcgatggcaatgccttgcttggcggcgagcgccttgaacttggcgtcatcgaacaggccgattttctcgccgcccaggtagccggtgatgctcacctgttcggtcggttcggccggcgctggttgcgattgccgccacaccagcgtgccgcagaccacgcccactaccgcaagcagggcgatcagtccgatgatttttgatttggagagtttcattgtgcgtccgttttctggtccgactggtgagccgggccgccagatggagtctgactgggtgcatgccgtccttcatcagcagccgaggaaggcacaggcgaaggtgcgacgtcgtcgtatccatccatgcgggccaaccgttggatggcgtcggagtcggccgtaatgcccaacgtcttggcgcttaccgcccggctgagttcgccggcggcggtctgttcgagcacttgcagcgcctcgatggtttcgattcgtaccgtggctatctgatcgcgtgcgccggaactttccacgtccacgtaggagcgcaacagtttctcggtctgctcgccgtacacggtgatgtagtggcgcaacgtcgggtaggcggaggtgtctcgggtcacgtattgcactcaatctttggtagcggcgatgaagtcgttggcttcggctttgacggctgggtcacgtacttgcttggtgagcatggcgatcgagttgagttgagcgttcgccgcgtcgatcgtatcggcggtcttctgaccgttgggcaaggcggaaaccagcattttgccgatgcgtcgctccggctcggtgagcgtggaggcggcgatatacccaagtgcggccagtaccacggccacgatcaggccgggcactccgccgccgaccagtccgaaaccgagcccggcgagcagcagtccgacaacgaatccacagattacctggagcatcagttgaagcccttgacttggcggaagacggcggcgaggtcgccggagcggccgtcgaataccttggcgttgctcagggtggcgagagacttcagctggctgggatcggcatcgccgaacagggttaagggtcaaaaagtgtgtccggaatcgcggattttcacggattgacctgtaggtttccggaaagtatatgctccggaagcatatatctagcccccgacgggaaatcctcggtgtggcagccgtgatgtgctatgcg

SEQ ID NO: 2811 - DNA, 3265 bp, Unknown
  R36_18m  MAG No. k141_21425
gtcgccgtaggcggacttcagcgtgtcatcgtgaccggccaggccgtccgggatgaaggagtacatcggggtgtaggtgcccttgtagaccttggtggagagctcttcgcggtcgatgaggttggcgacggcctggcgcacggccttggccttgttagcgtcggcgtcgggctgggattcaccgtagggctgaatcttgaagttgaaggcgatgaagcgctcctcaccgcccgggcccttgacgaccttgaccttggagtccttggagaggtcctcgatgtcggtcgggctcagggagcggtaggccacgtcgacctggccctgctggacggccatcttcaggttggaggcgtcggcgaagtacttgacctgcacggcggagttcttggccggggtcaggcccttgtaggagtcgttcttagcgtaggcggcggactcgttgatcttgaaggcggtcagcgtgtacgggccggcgaaggccttcttggagacgatggtgtcggcgtcggtgagcttgtcggcgtcgaaggtatcctcatcgacgatcgggccggcggggctggacatgacctgcttcaaagtcacgtcgaaaggcacggaatccttgaacaccacggtggtgtcgtccttagcggtcacggattcgacgttggcgagcagggagctcgggccgttcgggtcgttgatcttcttgatgcggtcgtaggagaacttgacgtcggaagcggtcaggtcgttgccgttggcaaacttcaggccgtccttgagcttgacggtgaattcggtgccgtcatcgttccaggtaccgtcatcggcggcgatgtccgggctcagctcggaggtgttgtagtcctgggcgtacaggaacgggaacacctggatctgtacggcgtaggagccgttgtcgtaggagccggcggggtccaggctggtgatcttatcggtggtgccgatggtgatggcgttgccggaatcggcgcctgcggtggtgtcatccttcacaccgccgcaggcggtcagggatgcgatggcggccacggagacggcggcggccagaatcttcttggaattcaacaggaatcctctctcataacttgtttccacgccatcactgcgggcgtggattaccgcctgactatggtgaggatgtgttactcctgcgtttccacagccatcgacttatgtttcgcttgtggcgaccatggccggttttatgcggtatcgagcagtattacggattcttgtattacgacgtgaataacgttcaaatggtgagatgaacatgctatcatgtcaccatttgaacatgcttgtagacgaatgctttccattcgtcaaccggtcggcctactgctacttgagcttgcggcccgcgcaccacacctgttcgaccgtccaatcggtcggatcggcaaggttgaaatcggcggcgaagccgggggcgatgaggccgataggcaccccggtgaccgggttcggccggtcgaagccgaacgccttggccggcgtcaatgtggcggcctcgaccgcgtccaccgggctcaagcccagttcgcacaccgcacggcgcacggcgacctccagcagcagagtggagccggcgatggcgccgttggaaaccaaacgcgcatgcccgtcgaccacgttcacgtccagtgcacccaacttgtaggcaccgtccgggcagtcggtcgcggccattgcatcggttacgaaggccgtacgatgaggcgcgaaccggaaggagaggctcaccatcggatcctgcacgtgaaatccgtcgttgatgagctcgatggtgacgcgcggatcctccaccgcggccggaatcggaccgggctcgcggtggtgcaggccgttcatcgcgttgaacatgtgggtcatgatgcccgcgcccgcgtcgaagccggctttggcggtctcgtagtcggcgtcgcagtggcccacggccggcaccacgccggcagcggcgaactggcggatggcggagatgccgtggggtagttcgggggcgatggtgatctggcggatgcagccaatcttgccgttcgccgcgcctgaagcctcaagcatgtcgtcgacgatgtcgggtaccggatccttgagacattccgggtcatgtgcgcccttgcgggccagagccaggaacggaccttccagatgacagcctaggatgtcggggcggccggactccatcttggcgcggacggtgcggatgttccggcagatcacgtccacgggattggtgatcagcgagagcacctggcgcgtggtgccgtgcacggcgtggccggcccgcgccacatcgatgccatccgacccgtcgtcgaagctcttcacccatgcgccgtgcgcgtggatgtccacgtagccgggggtcagaatacggccttcggcgtcgatgaccgcgttgcgatcggccgggtcgagcctcaccgtgcggcagtagtgctcgaaggcctcctcccccgtgccggccgccacgatgacgccggcggcatcggagacgacccaatatccgcgccgttcgccgcacgcatccaccttgcgcgcgttgcgaatcgccaccggagccggcttgccctccagtgccgcggtcacgcgcgagactatctcgttcctatcagacatgttgttctccttaccgctcatgcgctcccgccaacgggagctggctcgcgaaacgagactgagggtggtccaatcgggaagcaatacacatatgccgccgccgataaccaccctcagtctcattacattcgacagctcccctcacacaaagagggaagccagcacacgataactcagatgccctgccaggccggcttgtgggtgtaggcgtagcgatagtagtccttgtggcgcagacgagaggcggcctcctcatccacgataatcgtggcgtgcgggtgcatctgcagcgcggaagccgggcagaacgcggacaagccgccttccaccgtctcctcgatggcttcggccttgccggcaccgaacgccagcagcacgaggtgacgggccttcatgatcgtgccaataccctgcgtgatgcagtgggtgggcacttggttgatgtcgttgtcgaagaagcgcgcgttgtcgatgcgggtctgttcggccaaggtcttgacgcgagtgccggaggccaacgaggaaccgggctcgttgaagccgacgtggccgtcggtgccgatgccgaggatctgcacgtcgatgccgccagcggcttcgatggcacgatcataggccgggccggccagcgcga

SEQ ID NO: 2812 - DNA, 3459 bp, Unknown
  R36_18m  MAG No. k141_21464
caggcaaaagagatttcgttggaaaatggccgttttgggatggtgttggcccgaaatgtcaataacgaagcaaaagagcgaggagcgctgctctccgcgtccggcgcgcgcggcacaataggggattatgactgatgctgcaaacaccaaacccgaactccccgcgaacgtccgcgtccgcttctgcccgtcgccgaccggcaccccgcacgtcggcatgattcgtaccgccctgttcaactgggcggaagctcgcgccaccggcggcacgctgatcttccgtatcgaagacaccgacgccgtgcgcgactccgaagaaagctacaaccagatcctcgaatccctgcgttggctgggtatcgactgggacgagggcatcgatgtgggtggccctcacggcccgtaccgccagtccgagcgtaccgccatctacaaggatgttgccgccaagctgctcgaagccggctacgcctacgagtccttctccactcctgaggaaatcaaggagcgcaaccttgccgccggccgtccggccgagttcggctacgatggctacgaccgcaacctgaccgatgaacagaaggccgccttccgcgccgagggccgcaagcctgcgctacgtatcaagatgcctgatgaagacatcgccttcgacgatctgattcgtggcaccatcgagttcaaggccggctccgtgccggactatgtgatcgtgcgcccgaacggcgacccgctgtacacgctgaccaacccggtcgacgacgcgatgatggaagtcaacgtcgtgctgcgtggcgaggacctcctgagctccaccccgcgccagatcgtgctctaccgttaccttatggaactcggcatcgccaaggagatgccgctgttcggccacatgccgtacgtgatgggccagggcaacaagaagctctccaagcgcgacccggagtccaacctgttcaaccaccgcgacaacggcttcatccgcgagggcctgctcaactacctggccctgctcggctggtccattgccccggaccgcgacgtgttctccatggacgagatgatcgagaagttcgacgtgcgcgacgtcaaggccaacccggcccgcttcgacatcgacaaggccatctccatcaacgccgagcacatccgtatgctcgagcccgaggacttcctgcgccgctcggtgccgtacctgcaccgcgatggtgtggtttccgccgacaactgggatgccctgaccgaccgtgagcgtgaggtgctgaccgccgccgctccgctggtccagccgcgcgtgcgcctgctgggcgaggtcgccggcatggtcggctccctgctgtccaccgaggagtatctggagcctgcggatgacgccaagaagcagctgaaggattccgccggcgaggtgctggatgccgccatcgccgctctcgaaggcgtggatgaggtcgattggaagaccgacaacctgcatgagaccctgaacaaggccctggttgaagacggcggctacaagccgcgcctcgccttcggcccggtccgtgtggccatgtccggccgccgcgtctccccgccgctgttcgaatcgatggagatcgtcggcaagccgatcaccgtcgcccgtctcaagggcctgcgggcgcatctgtgatgcgtcgtccaccgcacgccggcggatgatgggagcgtgacgcatggcgggcatccgtacatacggatgcccgctttcgcgttgcatggggtgttcccgcagaacggcggaaaatggcgcgacacgccgggatttgcgtgagagcagggtagcgcgtaatatatctacctgttgcgcggttcgcctcgcagccggttgaaaaactgaatatgcccccatcgtctagcggtctaggactacgccctctcacggcgccaacaccggttcaaatccggttgggggtacgacgaacaactcttcggagttgctgcgccaagccaaattggggtgtggtgtaattggcaacacagctgattctggttcagccattcttggttcgagtccaggcaccccagccaataaccctcgcggattagcgagggttttttgtttttacacgtcctgctcatgagatacggccgagagggtaatcctgaatagacaactctggggcaaagactgggctatagtcccaatccgtgactcaaaaacggcagaaatcccgcgtccgaacgtaaggggcgcgggatttctgccgtttcgggccgtgcaggaccggccgacatcgcgcgttgccgcgacttgagcgctgttcgatcctgaaaacgtgagggagaccgacctcgtcttacttcttgaccgcgttgacggcgtcaacagccttctgcagcgacgtggtgtgctcgtggtaccacgtgacctgctgttcgagtttcttggtcgcggcctggtagtccttggtgtcgtcggccacgcagccttcgtacgtcggcagttccacggtcagttccttggacagcgcgtcgagagcggaggcgtccgagacgtctgccttggccagagcggcggcttctgcagcatcgccattgaccaagttgttgtagtcgttggtggcgttacgtacgtcttccgaggcggcggcgcaggcggccactgcgctatcgtactgagacgcgctgtatgcgcgggtgccgaacaccgcgaccgcggcgataatcgccaccgccacgatggcaatcactatagcgacccacttcgtcactcgcttgttgtgcggctgtgccgtcgcttctgcttggttctgggattctggctggttgccgttcgcctgctgtgcgtcagtcatatttacctctacttctcactgcctctgtttgtatcttgcggagggcctgtttcaaacaacgggtatccaacatatcgaggagagccgagattgccgggcgtttcctactggttgcgctgtggcgtggccgtttttgtctcatatggcgaaagtatgcgccagaggctattgccggccggtgacccacgtcgcatccgaatggacgtgcggaatcatcatcgcgatgaccgccagcagacacccgagcatcaccatcaagatgatgttctcgtgtccgtgcgcctgcagaagcgcgccggtcagcgcgccagacgccagcgccagcattacgaccgcacgccgcccgagcttcgactgctggtggccgtgtgccgaagcgtctgcgacgacgccggtcagcgtcatcgtgagcacggtggtgggcaggtccggcaccgacagcttgcgggcggtggagttctggatgcccattgccggggcgagcagcacgatcagcaggatgatgtgcaggtcgatgtgccgtgcggtggggaagttcaggctcggctgtgaggcctgtgaggcctgggtggtctgtgaggcctgtgaggcctgggtggtctgtgcaagccgtgcaatcgaggagacgccggacgcatcgtctgcg

SEQ ID NO: 2813 - DNA, 9603 bp, Unknown
  R36_18m  MAG No. k141_21568
atggactatgacattccgatcagcaaggtcgccgccgccgtggccgtgacccccggctttgaaagcccgacgatctccccgctgcacgacaaacagtggaacgccgtgcgagtcatggttcccaaggccaaggtcaaccagctgatggatgatttgtacgaagtcggcgcacgcggcatcatcgttaccgctctgcaagcctcccgcatgtagactgttagtcgatatgaccaaccagaaagtcaacgccagatacagtccggaagcacgtgacatctatttcaccgtgcccaatttgatcagcgcgctgcgaatcatctcgattcctttcatcagcgtgctgatctccaagcatgaggtgattgcggcgctagccctgatcgccatttcctcggcttcggacggactcgacggcatcatcgcgcgcagattcaaccaagtgagcaagatcggtcagattcttgatccgatcgccgaccgactgctcattttctgctcgattctggccctcagcgtcgccggcatcatcccatggtggatgctgattatcgtgggactgagggatctgtggatggcgattcaggtgctatggcttgcccagtacggttatggtccgctgcccgtgcatttcgtgggcaaggctggtaccgcgctgctgatgatttccatcgtcagtcttattttcgccgatttgggcaccagtacgttcttccacttgctctacatcgccgcgctggccgccggcatctggggcatcgccatgtattggctcgccggatatatctataccaagcagggcgtcggattgctacgcaaggaactgggggagaagtatggcgcttgaggccacggccccggtctcgttccccatacccaaggagaatgagccggtacgacgccgcgccgtgttctcccactcagtccgaggcgcggaatcgcatcatgcgctttccccggatgacgccgccgccatccgcaccagacgtcgccgtaaaaccaacgacgattcgcttcagctcatcgatgatcttgtcaatcgtccgatggatccgatgttctccgactcacgactggtccatgagcatcgttcgaccttctccatctggtttaatcgcatcgtcgtattcatcatctgcgtcggcgttggctttgcctgcagcctattcgtgcaacagttgcaatccgatccgcgtaagcaggtacggcagactttggccacgcaattggagaatcgcaactcgcaaatagacgaactcaccacggacgtcaataatttgcgctcccaagttgacgaacagtccaagaaaatatccggcagcgtgaaaagcgatacgcttatccaagacgaaatggtcaatggtgccacggtggtcgaaggcgaaggaatcaccatgacgctggccgatccaatcgcggcaagccagtcggatcaatcctcctcgacgagagtcggcacctccacgaacatccgagtcatcaccgatctggatctgcaacaactggtctccctgatgtttcaaaacggagccgaagccattgccatcaacggtaataggctcggcgcgcaaacctcgatacgcaaggccggcgggcatattctcatcggcatgaccgcgatacaaagcccctataccattgaagccataggcgataagagcgccttggccgaagcgatgggggagaagagacttgcaagtctttacgattccttcaaggaagccggtatctacccgcaggtgagcaaatccaattcgattacacttgaggcagcagtcactggagaagtgaagtacgcggaaaggaatgaataatggcagccgttctgggactgatcatcggcgtcgtcatcggcgtgttcgtcaagccggacattccgatcatcgtgcagccatatctgccgattatggtggtcgctgctcttgacgccctgctgggtgccgcgcgagcctatttcgagcgcagcttctccgaccgcgtgttcgtgatctccttcctcgccaacgtggtgacggcaacactgctcgtgttcctcggcaaccagctcggcgtcggttcgcagctgcagacggccgtcatcgtcgtactcggcatccgcatcttctccaacgtgtccgcgatcagacgcttcatcttccgaggctgacaagggtactgacgtatgacacgtaaagcacaatcagacaacatgctggagaaaatgcgcgaccagcatgcacaagacaaggtcaacgaccggatggaaaccgggtcgttccccacggtgcgcaagaagccccggaaggatctcaaccgtgccagcaacaaatcacggttactatcctcgattctcatcgctctgatgtgcgcgttgttgggtttcgcctacatgagccagatcaataacactaaatccacgtacgaaacgatggacgagagcgaactggtaaggctgctgaacgagtcgaatacgcaaatctcgaatctcgagcagcgtaaaacccagttgaacagccagctcaactcgctgaaatcggcggctaacgaacaggagcaggcgcgtaagatcgccaagcaaaacgaagagaccagcggcttgatctccggcagactcccggcgaagggccaaggcgtgaccatccggatcggacgaggctcgacgactaaagtggacgcctcaatcatgttcaacctcatcgaggaactccgcaatgccggcgccgaggtaatcgccatcaataacgtgcgcgtcatcacctccacctacattcaggacgccgaggaaggcttgatcgtggatggcaccaccatcaagcccacatacacggtgaaggccatcggcaatccgcaggagctgtccaacgcagtcgatatcgccggcggtgtgggcgctcaactccaggtgaaatacggatccaacgtcaacgtgcagccttctgacagcatcattatcgacgaagtacgcgaagctacgcaaaaccagtatgcaaagacggtagaataggggattatgaccaacccgattcctagcgcaggcgaaaccaccattatcggcctgcccgcgattaatgtactgcccattaccaccaccggcgatcgaccgctgactcaagaggatctggacaccatcaccagattgtccgagggaacggcattgctgatttccgccaggggagcggtctcaggttctcgttacttgcttgacgaggatgaaatcaccgtcggtcgtgatccgcgagctgatattctgctcgacgactccaccgtatcccgtcagcatgccgtgttccgcagggtcaacggtcagttctttgtggttgacgcaggaagtctgaacggcacctacgtgaaccgtcagcgtgttgatcaggcgtcgctgaagaacggcgacgaaatcatgatcggtaaattccgtctcgtgttcttcacgaaatccgccattatttcccaatagtccacacccagcacggggttagactgattgcagaaattgcaatcatgtgattacaccagtgtgagtcacatgcgagacacgcatgagttaggggagtgccatgggacagacagggctgcatcttcatgtttcgcttgaggaccgtcagaatctgaacgctgacgcgattcagggggagttgttctccaatgtcgatactgaggagatcaagcgcggctaccgtggcactgtggcctccaaggtggccggcatcacgtaccgacagctcgattattgggcacgcaagcagattgttgagccgtccatcacgccgtctcatggctccggttcacgccgactgtactcgtttaaggatgtggtgattctcgctgtatccaagaagctgcttgatgccggtgtgaatctgcagaacgtgacggcggccatcggattcttgactcaacgcagcaccgatcagctggccaatgtgaccatcatgtgcgatggtcaaaacgtgcacgaatgcactaccagcgaacagatgctcgaactgttgcaaagcggtaaggcagtgttcgccgtgtcggtgggttcgttgtggcaccagattgagacggccttggaacaggaagaatatgttgatcttgaggccaagccgctgacgattgccacgggccgtccgattgatgaactgactgccatgaggatgcgcaagaagctcgaggcacagcgcttgcaacgcgcaaccgcctgatacatgtatggttgttggcgacttgccggctttggtcggcaggtcgctttgttgtatgtgttgcttttgttgcctgccatcttatgtttttatatgttgcggtgattattatgactgattggaggaccgggtgaacgggattgttgtcggattgttgccgggcgttctgtggatggtcgccgtcatctttgctgtgtccatcatcactataacggtcagccgaggccatctgttcacgccgaaacgccggcgaccgccggtcgatccggtcgactggtcgatggtgaaaacgcatttcatgtcgtttgcggcggcgctgattccgtttcccgtattgacgtttacagcggatttgatggatgctcgcatgctcgcgttctacgaccacgcgcaattgcccggagcaatcatcatattcgtgctggtgctgctggaactcatcgccatgtatctacaggcacgcaacgcctcagaaaccgaaatggacaagcgtttgggcgttgcttctcaccggaataaggatgatgttgcgaagtagccgattctctgcggcgaggctaatccgcagctagatactactggttcggctaaaatcaccacatactattaaccgataatgtacgttatgtcagattagttatccttgacgaggattcagtcgcctgtatcaactagtccacgcataccaggccgacagccaaaaggccgacagccaaaggagcaccggagcgaccaccgcaattgcaagaatcgccgtgcctttcagccaatccttgtcatctcgtttccagtggaatgctcgccaaatgaaccatatcagcatgggaatctcatacagcgacagcaatggcaaaccgatgaaaaccaggtcgaagcccgcggcgcaggctccatcgcatcccatcatgaagaagtcctcgccgttgtgtttcagtgcgtttggaaataacggtttacggcgtcttcgatctgctcgggcttctcgaggatctcgtacgcgccgtgttcctccatctcaccggccggagcgtagccccagcggcagccgatggcgtccaaattacaggcgtgggcgccgtcaatgtcggtgtagcggtcgccgatcatcacggccctgtcccccgctgcagcatcaaaaccgattttgtcgaagcagtaccgaatcacctgatctttgtccagacgggaattgtctttggaagcaccatagatgccgtccaacagttcggtcaggtggaaatggtcgcagataggcatgcactggtattcgggcttacagctggccagtgccaggtagtaaccgtcggcatgcagtttgagcagctgttcacggatgcctgggaatacgacgttcaccagtcgtccgggcaccttgttgccgggctcgttcggatcgtcgaacacggcacggtctccgtagtagctgcggtagatgtccacggcccgatccagatcttccgcaggcacatgattgcgacgcagagattcaataatcgccggtccgatgaagcgtcgcagttcggcggcgtccggaaccggtcgaccgatctcttcgaaggtcttgatgacggagccgataatgccgccgtcggacttggtaagcgtgccgtcgagatccaacaggaccactttcatcggatgctgtgccattgagattccactcccccttgttcatgtcgactgctttgaatggtcgtcaaacaatgcgacttgttccaacaatgattatgcccagtcgggatgactgggcatcaagttcacgtgttgttcagtaggagatcactcgtagtcgggaatccaaccgtcacggtgcatttgcaggcgcttttcgagcagggtggccagttcctcttcgctacggcgttccagcagcatgtcccagtgggtgcgggtgggtttgctgatttcgtcgccctcacggtcggcgtcgccctcacggtgggccacggaaccacaacggcactcccactcgtccgggatttcggcaccctcggcaaacggcaggatggtgcggtggcccttcgggcatacatacgccacatcgtttcgcgcggcgaaatcgacgttgtcgtcggactccagcgatttcgctccgatgctcatgcccctgaggctacgttctgccatatcggcatcctccttgaaagatctttaaccctactaatttacgcaacagttcggacttggccgctattccaagcttccgacgtcggctgacaaactcccatcaaacggccccccgtcagtccacgccggagtaggccaccacgccacgattgacccggtcggccgcttcgtgggcgaggcctgccagccgctctcccccgtcgaacggcagcggctgggcgacagcaatctgctgcagcacgtcagccagtcgtttggcagtgcgcacgaagtcgccgccggtcatgtcggtgccgtacaggcacgatcccagcgaaccgccatccgcccattcatacatgatgtcgagaatgccgaaatctggccgctgcatctcgtccagaccgtgatcctcgcacaggatatcgatgtcttcacaaatgcccttgagcttggacgaagcgatggcgatgggcccggagatgccgcccgggtagtgcctcggttcgccgtctcccccgcgtctggcctcgtataccagtgaagagagcacagcggccagtccgttggcgtcgagcttgtcgaacgtgccggcgagcagcgcctcgcacagttccaggtcatgttcactgtagatgcggcgcagcagcagacctttttcagtcaacgtcatgtcaatgtggccggccgcattgacatgacgttcgaggtaaccaagcccggtgagaatatcgcagatgcaatcgaactggcgtgccacggacccggtgcgggagtcgtagcgatcggtgacgcgctgcagttctcgagtctcgcgggcccagcggtggccccatttgaggtgttgctggaggtccgggcagttgcggcatggatgctcgtgttccgccttgcgcaaatcgcgaatgcgctggtcgaggttctggaaagcgcgtgaacgctcctgatcggtcaggaacacttcgtgcttcagtttgcggcggccttccttttcgatgtcgctcagctccatacgcagggtcatgaactgtttgaagtcgccgtgttcgcatgcgaacgcctgttcgtatccggccagcgcgttcttcagtgtgttaatctgcgattccagctgccaggccgattcgttggcctcccactgggcaaacgactggtccagggtgacgcgcgcggtctcgtagtcgctggagttgagcaggttcacggccatgttgaacgtgggtcggaagctcgagtgcagcgggtagacacgcttggatgacagcgaggcggccgtggcgggcacaaaaccgtgatggtcgaccacgatggcgtggccgatggtgtcgatgccgcgccgaccggcacgaccggtgagctgcgtgaattcgccgggcgtcaggcccacatgaccggtaccgtcgaacttttcgagtttctctaccaccacgcagcgggccggcatattgatgcccaatgccagtgtttccgtggcgaacaccattttgaccagaccttcttcgaacaatcgttcgactatctgacggaacagggcaatcatgccggcatgatgcgaagcgaagccttcttccaatgcaaagcggaacttggagaactgcagggctttcaggtcttcctgagtgagttgcccctccaccatctcatccacgatgcggcgaatcctggtcacttcctcatcggtggtgagctccagtccagcgttgatacactgttccacggcctggtcacagccgttgcgcgagaagatgaagtagatgccgggcaacattcccaggaagttaagctcgtccaccacggcccagcggcgcggggtgtggcgttccgctttcggggcacggtctttggcgcctttgccgccgcggcctctgccgaagcccttgcgcttatcggggcgttcctcgccgcgccggcgtgcggccttgcggtccaactggtcgagccggttgatgagttcggcgttgagtttggtggtctgctcgccgttgccgtcgcggcgatagaggtccagcacctcgggctcggtgtgttcgtccgcctgcacgatgacgtgctgttccaaaggcacggggcggtgttcgctgatcaccagttttgtgtcgcctcgcaccgaggcaatccagttggagaaatcctccacgttggacacggtggcggacaggccgacgatcttgaccgtcttgggcaggtggatgatgacttcctcccacacgggcccgcggaatcggtcggccagatagtgcacttcgtcgagaatcacgtagcgcagtgcgttcagcgtggtggaacgctcgtagagcatgttgcgcagcacttcggtggtcatgaccacgatgtccgcctcggaattgatcgaggtgtcgccggtgagcaggcctaccttgtccgggccgtacacgtcgaccagatcatggtatttctgattgctcaacgccttgatcggtgtggtgtagaaggctttgacgttgcgttcctgggcgaggtaaatggcaaaatccgccactacggttttgccggcaccggttggggccgcgaccagtacgttgctgccggcttcgagcgcgtcattggcttcggtctggaagtcgtccagttcgaaaggcagggattcggcgaatcgcgctgctgcggacgcccgatggcgttggaccttttggaatgatgcgtaccgctgcgaagggctcagcgtctgggaatcggcattgcccttatggtgttggtgacgtgccattgctgctttccgttagttgttgaatcgcttccagcgggcccatgcctgggtgtggcgttcgcgcttggcggccttgctgcgaatcacgttcgcatgggcctcggcataacgattctgtgccacgctgagcggctgagtgaacagaggcggctcgctggtgtcggcagaggtgccgggctcccccatcgcggccacgcgttcaccgagttggccgccgatgtcggacatgtctttcaaggcacggagtccatgaagggctgcatagatgagtccggcaacaatcatggccagcatgaacagggccagaatcagccatatccaccaaggcatgaaaggctccttacttgttctcgctgatgctcagttcgcgttcggcgcgtgccacgatcatggtgcgcaacgtttccggggcgaccgccgtgatatgacgcgcgtgggcgatgcagaaggccacgaaccaggaatcggaggaaacggtcagatgcaccttttcaccggcaccgcattgttcgacggtagcgcccggcaatgtcttgatgaatgccagatcgcgctgatcggtgatgaacaccgcgtcggtaccgttgtcgaaactccacttgcgca

SEQ ID NO: 2814 - DNA, 5443 bp, Unknown
  R36_18m  MAG No. k141_21905
caggaagccgacatgccccatgttcacgccgagaatcggcacctgggtgcagtggacgagttcggcggcgcgcagtatcgtgccgtcgccgcccaggaccacgacgatttcggtgtcgtccgacacgcacggcggctgcacaccgaaatcgggggcctcggtgttgtcgatgatggtgacttcgaaaccggccactcgcagctggctcaccgcctcggccactacggttccggtctgcctgagcctggtatgcgtcaccaccaccgcgttgcgcttggccatggcatcctcctgtcgattcggtcgcactgctcattattctagccgcagacaccgtcatcactcgtacaggtgttcgaaaaatgccgcttcgtggcgcgtcgtcgacaacgttccgcagagtcgattaacgtaaggcttcggcatacaatggcatacagccgcgcgatcaccgtacgcgtgccgtgcgcagcgcgatggcatgccgtatgaccatacagcagtatcagttgaggagcttgaggacccatggccaatgacttcgacgaatcctccgccaatgaggaggcctcgaagggcctgtcatggtggtattcggccgatgtactgagccgaggcaaaagcgataaaaccgccaagcgcattcgccgcatcagcatcaccgaccgtctgctcaggcacccgggccgtctgtccatggtgtatttcggcgcactgatcatcatcgtcaccggcttgctgctgctgccgatctccacatcggacatcatcttcaccaacttcccggtcgcgttcttcaccgccgtctcggccctgtccacctgcggcattccggtggtgaacaccggcgaatactggtcgacgttcggccaagttgtcatcctattctccatccagttcggcggcctgggcgtcatgaccttcgcctcgatggtggctcttggcgcttcccgcagactcaaggtctcccagcgcatgcttaccgcgaacgaactgggcaccacgaagctttccgaggtcaaaggcgtactcaccgtggtattgggcacctccatcatcgccgaggtgcttaccttcgtgctgctgctgcccgacctgttccgcgtgaaccacggcaatatgggacgtacattgtggcaggcgctgttctacgcggtatcggcctacaacaacaccggtttcacgcctgacgccaccggcctgcatgtgaaccgttggggcgtgggactgccgattctcatcagcgcattcataggaacgctcggcttccccgtggtgctgaatctggtgcagtgcgcacgccgacatctcagcccgaaacgttggacgttgcacaccaaactcactttggtgaccaccgctgtgctggtggccacctcactggcttggttcctgctggtcgagtggggcaataccggcctgttccccgcagacggtcccggcatgaagatgcgccgtgcgatgagcgccgccgtcatgccccgctccgccggtttcgatatttcctgggtgcccgaagtcacgaatgagaccaaggtgttcatgagcatactcatgttcatcggcgcaggctcctcatccaccgccggcggcatccgtgtcaccacgttcgcggtgattctcttgatttgccgcgccgcattcaccggccatcgcgatgtcaccgtgttccgccgccgtatcccccgccgcatccagatgaccgccgtgtccgtgaccacggcctgctttgcgctggttatggtcggtgcgatgatgctgatgttcaccaccggctgcgcgttcgtggacgccgtgttcgaggcctgctcggccttctcgttgggcggttattcggtgggcgtggcaagcgccggcaatccggccagcctgtttattctgtccgccgagatgattgtcggacgacttggcccgttgaccatcgcctactccatcagcagaccgatggctcccgaacctattcgttatccgcaggaaaacattatcgttggctgatcggccattcaatcggcacacagaaatccggcatagagaggaccatcatcatggcagcaaaaccgagcggcaacaaaagcgtgctggtcatcggcctgggccgtttcggcgggtccgtggccgccaccctcgaccagatgggtcaggatgtgctcgccgtggataagaacccggagcttgtggcccgttggtccgcgcatctgcccaccattcaggccgacatgaccgatgtgctggccatcgagcagatcgacgcctcccagttcgacacggccgtcgtggccatcggcgacagcatcgaggcttcggtgatcatcaccggcaacctgctggatgccggcgtttccgatctgtgggccaagtccgtgtcccaggagcatgcgcgcattctgcagcgcatcggcgcccgtcacatcatcaatgcggagaccgatgccggcaagcgcgtgggtcatctggtggccggcaattatctggattacatcgaaatcgacggcccgtacaccgtcgtcaagatccacacgcccctatacgcggtgggtcgcagcatcgaggacgtgcaggtgcacgacaaatacggcgtgaccgtggtgggcctcaaggccccaggcaaggagttccagtacggctccaaggaactggtcatgcatcgcaacgacgaactcatcctcatgggcaagcaggatcagatcgaccacttcatccaaggctaaccccctaactgcgctcgctataccccctatctgctcacatcgtgaccgatataaccccctcaacatggatgcgctcattattgtggcaataagccataaagctgtacgtccatattaataaggggagttttatcatcatgggcaagcatacgcagaattgcacgctgataggcaaaggagtctacggcaccataggagtggaccaacgttcccgtcttgccgatggcgcgcattttcacaccatgattgtgaccagcaccctcgaggcctcagttatagaaggggacaaactggtcatcaagagtggcattgtgcggtgtgatggtgatattcgcgtatccagcatcagcggcagcggcgacatcgaagtcggcggcgacattatttgcgatgaaataacctttaccggcaaactacgatgcaacggcgatatcgtttgttccggaaatctgtccgtcaatggctccctaggcacccgtcatattagcggtcagacagtccgcttgaacggcgtgttgaagggtcatgacgtcaacagcagggctctggaagttcatccactgcgcagtacgatgttttctcgttttgatatggatgggtatgaagatggcagcatggttcgccatatcacagccgtcacggttgaagccaaccatctgcaatgccggactttgacggcggactccgccatgctacgcaacggcagtgcggtggaaagcgccacgtgtgccaccgcactaggcatcgaccgtacctccagcgtgctgctggtgaacggagactgccaacgcattcatctcaagacagcgtaaagcaggtattcctcattaccgtgggtgccgatgatgggactatcggcagtggccaccacgtcaagtccgtgctgttcagcacaggcgaccacgtcgtgcaatgcccgctcccgcaatgccggatcttccacgatgccgtttttgccgagtcctgcccgcccgacctcgaactgcggtttgaccagtaacacaatctgcgcaccgggagccgcgatgcgcgcgattaccggaatcacataggtcagggaaataaaggagacgtcggagacgatcatcgccggccggtaaggcaggtcgtcggcctctacttcgcgaatgttgacgccgctcatttcgatgacgtgctcgtcattggcgatgcgcgggtcgagctggccgtggccgacgtcgagcgccacgactttggccgctcccccgcgcaacagtacatcggtgaagccaccggtggaggcaccgatatccagacattccaagctttccggcccggtaaggccattgccggcaaaggtctcgaacgcgcccaagagtttgtaagcgcctcgggagacgtagtcgtcgcccttatccacggcgagttcgctgtgcccggctttgaccatgaacgatggcttggtgatggtctcgccgtccacgcgcacatgcccggctttgatgagtcgctgcgctttggcccgcgattcgaccagtcccgaagccacgagcatcatgtcgagtcggtcaagtggggtcgcgggatcgatatgttgcttggtcatataccttcctttcgacccaccatccaccaacggggtggctcggcatggagccaccatccagcacttcacgtcatcttccgctggcgggagaatgaatctcctctgctagctgcggctgttatcaagctcgtgttgtaacgattccagcacgttgcgataggtctcaagcttgcggtcgttgtcttgttcatcaatatccgcaagttcggggtatcgctcggtgaccggcgcgtgttcgctatccgtaggcataggactatgcctcgatggcgaacaccggtaccgtggcctcgctgagctgtgcgccttggtcggaggcttcccatgcggcgcatacggcggcacgcaggccgtccatactggtggggtcgctgacgtgtacctggccgttttcaaaccaagcgctagccttgcggcattcccaagtaccgctctcgtcgcggaccggctccggttgggcttcgccgagttcacgcagatcaagggcgatgaatgtgggcctcaggtgtgccggagccagcatcagttcggtcgggttggtgacaccggtcagcaccgccagcgaatcatagtcaccgcggttacctgcctcgatatcagtgtcgagtcggtcgccaatggcgatggacgcctccttgggcaccagatcgtggccttcggcggcgttcagttcgcgggcctcatcgtacatgtacgcttccggcttgccagcggaggcgaccggttcgacgccagtggccgtgatcacggcgcgcatcatcgatccgcaaccgggggcgatgcccagttcacgaggaatcgtcaggtcgcggttggtcacgaaatacgtggctccggcctcgaccgcgaacgcggcatcggccatcatctgccaagtcatatccggataccagccctgaataacggcctgcgggcggtcctgaggaccgtccacgatggtcaggccgttgcgggtgacctcatcgcgcaaatgctcggcgcccaatacctgtacgcgcgcgccggcgggcaacgccttggccaccacacgggcggccaccaccgaagaggtgatgacctgccacggctccacgtccaagccgaagcccttgagctggtcggccaccacgtgctggaagcgcgaggagttgttcgtggtgtattcgatggtcatgccggcggcttcggc

SEQ ID NO: 2815 - DNA, 6665 bp, Unknown
  R36_18m  MAG No. k141_21949
caaatgctcatgcggccaagtatcaccgccaagcgccaaacccgccacaagcgtgccgcccaacgccgcatagtgccgccatgcaacgccgaacgccgcatagtgccgccatgcaacgccgaacgccaccggctagtagatttgcagcggccccgtttcctccggcctgtgggctgctccccaggcggccaacatgcagctttccaacggtgatgtaaggccggtgctgccacggcggctcacccgccatgcgtcgccggcccatttgcgcgccgagttcgcggcgctggcgtccaactcagcgtcggcggcgtgagtaaccgccttattcgccagaccggcgacgaaactctggccgatggtcaggtagtcggcggcgtccatgtccacgaaccgcaacaacgggtcgccagcgtcgtctgccatatggtgcaacctgtcggacaaatcggcggcggtgccgcgcgcgtcgatcaccaccggcgcgtcatatttctcacacaaccggttgagttcggtgggcgcgtacccggtgccgtccaagattctcaacagttgcaccgtaattgtgccgtcattgttggcgatgccagccgaaacgctggtatgggtgccgtccacgtccaccgcgacgccgaacaccaccggccggccgtccaagtcgccgggcgtcaccggtgccgttaccgtagccgcccacaacgcctcgtctatcgcccggtccgttatgccctcgtccctgcggttgccgaacgcgcgcgcccaacctgccgggttgccctggaactgttctcggaagtcggccagctgcgccttgtcccacaagagtccggcagctgggtgatagcgcatgatgctgtccagattctctggatcttcgtcggccggcaaaccgaagtcgaaccaacacgttcggcgcgattgttcgccagccctgcaagcgtcaaggcggcggttgaaaaacgtcgattccgccgtgccttctgtactggtaatccatagttgcggttgcacgccggtggccttgaaccttgtcgccatggtcggcatgaagccgtccaaaatggtgttgccggtttcctcggacaacgaaaacgcctcgtccaacgtgattttgtcgccttggacgccgtgccccgcaaccttggtcacgctcttcggcattatcacgctgccattggcgaacggctggcgcaagtcgcccgcgccgagatacggccgtgtggttattgcggcaagcggcgagctgccgagcgttttcaggtatttcttgaagtggtcgcccgcgtccttgcccgtctgcgccagataatagatgaaacgatctggtccccactgcgagttgcgcgtgtccaccgcgtccacaagcgtactttttccacactgtcgcggtgtgctcaatatgaccgtgtcatagtagtaagtgcctgtgtccgggtctatttcacccgccacgtcggctaccaaccgttgccatggcagaagaggcgtgccaagcaaccgggcgaacttggcgactataggcccgtcggtgcggcggtccgggtttcgctgggtgccgccgcgcaatggcgtcatgcctgtgcctcttccagcagactggcaagagcggggtcgatttcctgccttgactgaaactcggttttcaattcctggtaccacgccaagagctgggccatgacacggctcgtgtcgcgtcctttgacgttcagcgcgtcgaaattgcgggcaatgttgatcatggtcttgcacacgtacttggcgttagggtcaagctgcctatcgcccacgaaactctcgataagctccttggtagcgcgttcctgcaagccctcgttgggaccgtaataatcattgaaaccgtccaaggtcatttgcattttccaacctccttaatagctggttttcgttggtattccgccgtttccagaatttttttatccggttcgagagagtgaaaaagtgggcgcggggtcttggtcaaggccgatggcttaaaaaacaggctcaccactccggccttgacgcgactgtgacgcgatcactgcgaagccccaagcgtacgagcatggcgcggcgttcccgctgtcgtgcgtccaccaacgcctgtgagatgtgcaagccgtaccattgacgcaccaaccgcttggcctgctccgtcccggcccgctcccactccacgctgaagccggggtctatcacccgcacgtcataatccagggctatccactcgtccaacatgcgcggatgcctcttgctgcttggcgtggttcgtgcaagccacacgtcgataggctcctgagttatggcgaactggcgataggcagcagaccacgccatagccaccgcccgccgctgcgccatgctgggcgacgccggtaggcgcatggcctgagccaacgccgaccacgacacaacagggtcgccgtgctgcctgtgtgagtcaatccactccactgcctcacggtcgcatgcaccgggtggcgtgatgatgatatgcaagcgcgcgccatagccatacagcacgcggtcttggcgactggcgttgcaatgcttgcacgcacgcctgatgttcgccacggtatccatgccgccatgcgagtagggcactatatggtcgtcttcctcacccacgccggtgcaaccgggcaacctgagccaacaagcattgccccacgtctcgatcacctttgccctcacaagagggtcgatggtctgcctacgcgccatggccctgcctccgcttcctcgcacgcacccacatatcaagatcagccagctcgtacaagcaaggcgagttgaaagcgtcgccggccttgaaccatgacggcccacggttctcctccctcatgcgctccatcgtgcgcgccgagacgcccaagtagatggccgcttgcctggtggtcagtttcgcgcgcgggttcacagcacgcccacccaacacttgagcgatgtcaacagatcggcgcggtcgaacacctgcactccagatcgggatacgggctttcgcaagacgcccctgctgataagctcctgcaacacatggtcgccggtcgggtcggcttccggcgcgatcttgttcaggcgaagcaagttgataacaaagcaacgcctaaccatatcggttccgacggtgtcatgctccaaccgttcgatgttccacctgatagcgttcttgatgtccttagtacgctgcgctttgttcttcggcaccgcacgcttggcacgcttcctagtcggcctgtaatccaccgaatatcccataatctgcctcacttcctaaagcttgagtcggtctgtcgagttggtctgtagaagattgattccgaagccgcgatgctccgtttccatgtctctcaaattggtgaacagttagaacagggaacctcaaagcgaaacaatggaaacaggcgaagccgcaaggctccgccgtccaaagttccgtaaggttcgcactgcaaagcaagctctcaaatcggagccacagccgtcgcaatggtcagcggcacaatggccgcgcgcaaggtcacggcctgagacccgccacgcatggcggcaaagcaccctgttgcgccctcccaatgcgccccaagccgttcagtgaacccgcatggcagaccccgccgccgtcgtaaccaccggcccacagccggtgtgtttgtaacgcgctgggcaaggcgcggccggattcttcatcacgactccccagcaaccgacggtcggctggatcaaagccatattcagttaacgacggctacgaccgtcacagatcgccgccgcgtcttcgccgcacggcatcgtcacgagccaacgaatcagtcacgcacgagcgcaactgctccaactgcgggcgggtcagcaccaccgccgcgcgaacatcaccggagtcgaacgacacacggaagatacccggataggcctcgtaattatccacgcagaccctagtagccgtacccatagcgactcctctcgtcgtcatcacgccaaagccaatcccagaaggcgcaccagccaaccgtcagcaacaccaccggcaacaccaccagatcacccggcgcaactgtgccgggttccgtcgtgatctcgaaacgaacgctcatttcactgctcctcgattcatggatttaggctccttcctccgcagcgataggcttgtaatcgcacaaaccaaacctttcaaacaacgaaggaaggaagaacaatgagcgacgaaaccacgttcgacttcgccctttaccggggaacgaccacgccgcttaccatcaccggtgcgacggcctccacggtcagtgaactctccgaacgtctgaagtccggcaccagcttcgtccagaccgtcaggtttcccgacatgagcatccacgccatcaccatcaaccccagggccgtcccgtggtggcagatcgacgctggcgacgtcgtgcttcccatgcagatcttctaacgccgctggatcgtcgagcgtggccatgacaccacgcttgacaatcgcggcctgctctgacgtcaacgcctgattatggatgtacacggcgcgcgcattaaggacgatgcaaccctcgccgacaatcctcaccgattcagccgatacgacgacggcccccgaagcgtcatgaatcagcatcatttcacctccgatctgccatcgacggcggcacacccattgcctcgcgggccaagtcctccgcataacccgccaccgacaacgcttcgtcggccttccacttggcgtcgccggcgagagattcagcgtgcaaagcgacgcccagcgccacaattgaaacaatcaaagaaacaagcccaagcaccgtcacttcacctccaatggctcacggccgagcacgaaatcggtggagacgtcgaagaagtcggctatacgcgacacatcacgcaacgtgaaatttgagcggccatggaatttgtcgctgatggcctgctcggagacgcctagctcatgcgccagatcacgctgcgtgacgtgattgtctctcatgagttttcttatctgactaatcatctaaaaaactttcagactaaagatttgatgaagttctagaccaaagattaaccatatgacgtagccgacacgccgagtgctacgctaaaaccgtagtaaaatgaatttcatgacaatgctagatattcagccgagcgctacattgcgcaggcaggacgttgttgcgatgaacacgaacatgatcttgtccaacagcggtttaatgaagaaggaccttgctagagcaatggggctctcgccgcaatcgatggcgtcgaggcttcagagcaaggccgattggaccattgacgaaacttgcgcggctgccgacttcttcggcgtcccgttgatggctttactggatgagaacttaacgccagcaaaagccatggagtatataaagaaccgccgttccgataatgggaacgacggtcaattggtagcggggcatggatttgaaccatggacctctgggtatcccagaggtcccaaggttcaaatccatgccccggagcgccttccggctgattttggcttcactttagccgcgtaggtggtcaagatggtgtgccatgacgaaaaacagggtagcgcccccgttatggcgtgaggatattgatggttggctggctgcgctgaaggcgggcggtcgaagcgagcagacgcttttgacccgacggcgaaagatggcatatgcggcccgttgcctagatgccggcccctatgacgtgacctgcgaacgaatcaccgcttggttcgccgcacaggaatggaaaccggagacgcgcaaggcttaccgcaacactttgtccagctttttcggctggttgcaacagacgggacggcgcgcggataatccaagcgacggtttgccgaaggtcaagcgtccgcgcccccacccgcgtccttgcccggacaaagtgattctggccgcgttggcgcatgccacacccgaggagcggcttatgttgcggctcggtgccgagtgcggcttacgccgtggtgagatagggcgcgtgtccagcgacgacgtgatggacgatctggttggccaaagcttggtggtcaacggcaagggtgacaaacagcgcatagtgcccttgcccgatgatctggccgatgagattgccgcacatgacggttacacgtttcccggacgtttcgggggccacgtcgaggaaagctatgtaggtgaccgcctatcgcgtttgctgggcgatgggtggacggcccatagtttgcggcaccgttatgcgacggtgacgtggcaggccacgcacgatctgctattggtctccaagctgctcggccatgcgagcgtggagaccacgcaggtgtacgtggcgatgcccgacgcgcggttgcgcgccgggcttgacgcggtggtgttggccggttagccgagtcgctggtttacgatctgctgcaccttgtcgtagttcgctcctagtttcgcgcggcgttccgcgccgacgccgtactcgccgcgaatcacggcgtcggcgagggcgttgaggtccacgccgttggatgcggcgggtttggctcctagtcgctggtttacgatctgctgcaccttgtcgtagttcgctcctagtttcgcgcggcgttccgcgccgacgccgtactcgccgcgaatcacggcgtcggcgagggcgttgaggtccac

SEQ ID NO: 2816 - DNA, 2819 bp, Unknown
  R36_18m  MAG No. k141_22113
agagccgtacggtagccggccatgttggactgcttggacagcgagtagagcaccaggatgccagctgccgaaccttcacacacatgtggattcagggcacatggcgtggcggagagactgaatgcggtatcggaggcgggctcgttggattcggccaccggtgcggcaggcacagacgcagcagatgcagacgcggcaggcgcagaggacgaggctgtattgcggcgcaccgaacgccagtccatcaacgcatagcattcgtcggagagcaccacggcaccgatgcgacgggcagcagccacgatgtcggtcagccagtcagcggagatgacctcgccggaaggattacacggcgagttgatccagatggccttgacattcggaatattcacccaggaatcgacgtcggtcacatcatcgactttgaccacggtggcgccggcaagttgggtaccgatttcgtaagtcgggtaggagacggccggttggacgaccacatcgccttcgccaaggtgcagcaggctggccatcagcgccacggcctccttggaacccacggtgggtacggcggcagcgttgatggacttcagatccacaccgcgcagttcgcggaaccatgtatcgatagcggccttaaggtcggcgctgccggcggtgaccgggtatccatgggcgttgggggcgtctgcgccggcaaccagcgcctgctggacactgctcggcaccgggtccacgggcgagcctacggacaggtcgatcatgccacccggcacggttttggcggtggctttgaagccggcgatacgagaccagtcgtatggcgacgaatatgcgtggaagcccatgagaacccctttcttggacggtatgttcctaagatacgacgaaccctcggccgtgatagaccgagggttcaatccgaactatgcgctgtgtgcagcgcttatccgcaaatcagcttactggttctgcggcggcagcgcggcgacctgttccgggtctttgccgattgggccattggcggaagcgccgcccaaatcgccgacttcagcgaagaagttgacagcggcatccttgtaccaagcccactcgtccggcagatcatcctcatagaagatggcctcggtgggacacaccggttcgcatgcaccgcagtcgacgcactcgttggggttgatgtacagcgagcgggaaccctcgtaaatgcagtcgacggggcactcgtccacacaagccttgtccttgacatccacgcaaggctgagcgatcacatatggcatggaatcctccttaacaaatactgatacaagggtacgcgcccgttgggacgctcctcgctctcagccgttaacggccttatcggtttcggcggacagcgtttcggtcaggtcgcccttgccgaggcgcgcatgccagtagccgtagccgaagtagatggcgacgccgaccacgagccacaccacgaaacgaatccaggtgagcacggacaggttgagcatcaaccagaagttggccacggcgatgaggatcggaatccacgggtcgccgggcatcttgaaggcgcgcggcaggtcggggcgcttcttgcgcataatcgggatggagatggccaccagcgtgaaggcggacagggtgccgatgttgaccatgtcggagagcacgccgatgtcgaagaaggcggccacgagcgccaccaccgcgccgacgacgatctgcagagcggccggggtgccatgcttgccggtcttggacaggccgcgcggcagcagaccatcgcggctcatggcgaagacgatacgggtcaggccgagcaacagcaccataaccacggtggccaggcccagcacaatgccgaagctgatgatcttggcggcccagtcggcgcccaccagttcgaaggcggtggccagcgaggggctgtcttgcttggcgagatcggcataggagaccatgccggtggtcaccacggccacgagcatgtacatgacgatgatgagcagcatgcccacgccgatgccgagcggcacgttcttgtgcgggttcttggtctcctcggaggcggtggccaccacgtcgaagccgatgaacgcgaagaacacgagcgccgcgcccgaaaggatgccgggaacgccgtacacggatggggtcatgccggtggcgaactgccacagcggctgggtcatcacgccggtgacggcggaggaaccttccacggtggaggccggctggctcggcggaatgaacggggtgaagttggaggccttgacgtagaagaagccgacgatcaccacaaagaacacgatggcgatcttgagcacggtcatagcaccgtccacgcgggcgccgatcttggtgccgaatacgagcagcgtggtaaagaacgccacgatgatgatcggggcgatatcgatatggaaggagccgaacgccaggttggtgttggcgttccagcccatcaggcgcatgaaatcgttgaggtatacgccccaatatttggaaatcacggagccggccatcagcatttccagaatcagatcccagccgatgatccaggccatgatctcgccgaccgtggtgtaggtgaaggtgtaggcggagccggccaccggaatcatcgaagcgaattcggcgtagcacatcacggctgcgccgcacacgatgccggcgatcaggaagctgatgatcacggccgggccggcgtggaaggcggcggcctgcgcgcccaccgagaagatgccggcacccacggctacggccacgcccatgattgacagatcccaccaagtcaggttgcgcttgagcttgcggccctcttcacc

SEQ ID NO: 2817 - DNA, 5463 bp, Unknown
  R36_18m  MAG No. k141_22136
cccaacgtccaaaacccccagtcagtggaacaatcttcccgtaaaccagtcttccagcgggataaaactcccagtcactggaggaaacgggacgcaaatcgacctctcagcgtccgaaaaattccagtgagtggagaaatcaacccgttggtagacctatcaacgtcccgattcctccagccggtggaggaatcatcccggtgacggaccttttagcgggcaaaaaatccagcgagtggaggaaacgggacgcttgccacgctgtatggtgtggttcatttgtctccgagcactacgtgacctgccgttcccgaaccatacatagcctgtcgcttcccgaacaccgggcaacgcctcatcacagacatgacatcccggatatggcccctgccaattccgaaaggaatcccttcgaccagccacaatcggaaagtggggaatcgagaaaagattgcaattccaacgaacacgccctagcctcttaaaaaagtcgctagggggcgactatcatggcgttctggaattcttatgagggggaactccacgcattcagggcggtatttcgaaggcatcgctttggggcaactagttacgtaactaagaaagggtttccccaaatgtcttttagcaaaaagattattgcgggcgttgcagctgtagcgactctggctaccttggcaccggcagtcgcaatggctgaaggcgatgccccagccactcagcagcagactcaggctgctgacgcatctattaccgtaaacagcaatggcggcacttgggccggcggcgcccgcggcgacgtgtcggcatccggcaaggtcggcgacaagtttgcgactttcgcgtcccaacttccaaccatctctcgcgccggctacaccttcgccggctacagcagaaccaaagatggaagctccatcatctccaacaacgatgtcattatcaagaactggacgcagttgtgggtcgcttggaccaagaatgacgccaagcagttcaacgtgactgtcagcacgaacggtggcaccatcgccgacggcgaccataagggcgaagccggagatatccaggtatctgcagcacaggacagcgtgctggtaaacgctctgccgcaggtacagcgtgatggttacctgtttgctggatggtcctacgacaaggacggcaagagcccggtcgtcgcaactgacttcgtctccgccgacaccagggtctacgcccagtggaccaagcagaagccggtcgttgacgccaagaaggatgacagcaagccggccgacaccaccaagaacgacaccaagagcaacaccaagaagaccgttgcccagaagatcaagaaggccgttctcggcaacaccggcgctaccgttggtggcgttgcggcgttcgccgtgcttgccctgctcggcttcgctggcatcaccgtgctccgcaagcgcgcctgagtctaactcagtcaaggtggcattcgcctgaaagcgattaatttggctccgtgcaacggctcctctctggagtacttgcgcggagccaaattgccgtatttaatggcacgttatggctttattgaacacaccccgcaataaggtcgccgacatagctaagggtgtataagataagacttggctggctgccggcgagggctatacctcaaacgcagttgataggtgaggaagagccttcgaaaacacttcttcaccctgatgcgctgccctagccagcgaccaaccatccgcccctgggaatcgtacgattcccaggggtttcctgcattcagcggaaaaccgccgaacctcagcataccgtagagcaaattcccgcgaatatgctcacagccccctcagaatttcctgtcagcccaacagtccttaaaacagtaggcaaatcggaatcatcaaggtttttcaacacgcccacgcaaattcgcgctacgcatacttatcattttagggggggggtgacaactgaagtcatttgcggtatattaccggcgttttacatatgaataaacagctttcgcggtactatcagacaggcattgacgtcaccaagtcatccctatatacacccctctccataaaacacgcacgacatgcgcttggacgcgaattccgtggtttggggtacactagacatattcgaacaaacgttcgtattttggggaattctggggaattccccactatatacagtgaggaaactcacgacacaccactacctgtagtgtgtatgctagatagtggcttgcgtaagcgagcataaccgaagaacgtggccgacacggctttcgcaaacgacggaagccatttgcatagggaggaaatcgaatgaccgtgaccgtcttcaccaatccgagcaacccgcaatgcgaagccaccgaacaagagcttgcaaagctgggcgtgcgttacgacaccgttgacctgacgaagaacccgtccaccttcgaacagatcaaaaacgctggcttcaagcagattccggtagtcatctcaccaaactcctcatggagcggacacaggccagatctgatccgccagctcgcacaaagcttcgccgcataagcaagtagaagtcgcagtgcaccgagtccgcgaaggcagtgcgggcacaggtcacatgcagccgcgcagggcgcgaccaacagcggacgtcaccatccgcgttcttccacaaagcttcgccatctagcccataaagcagtcatccataaaacagtcagacactacatgcggctggccgtggacgggtcgagcgtcatggtctggaaccgattggccatgaagtcgtcgtcgaaatacgtggcgaagaattgcgaaacaggcgaattctgcgcaatacccgccatacgcgaataccaggaatccagcgccatcaacgtcatcacaccgtcaacgaaaatcagagcgaaacacaccgccgtcaacgtatagcgaatcttccacggaatacgctgaatcatcgcaagcaaatgcggcagaaccagcttcacccacaccaaaccgagtactccccagaaaaacatgtatttgccggatgtgcgcccatcaattgacagccattgacccgtgtaatcccacgcgcgaataccgaacgcaacctccatgaaccagctggtgaaatattcgaacgcgccgccaatcaccgcgctcgcgcagaaaatcagcatccaattcgaccgccacaagtggttgagcaacaccgtcagaatcaccgcgccaaaaccgtagataggcgagaacggcccccacaaaaaaccggcgcgatcctgccattcgccgaacagcacatagtggtacagcgtctccactaccagaccaaacacgcaaccgaccacaaacagccagaacaagttgaagaaatccaacgaaatgtagcccttgccagtcagatcacggcctgccatacccttcgaaacagccgtctcatactcgctgcgcgcatccaaacgacgaagcgcgaaccgcaaacgtcgttcctcgcgcagcgacggatcagccgtgatatgcaacgcaaccaatacaagcagctgcacggccgggctgatcagattcacgcccaaaccctgcaacgccaacgacaataggccttccgcaagcgtgagcggaatcatcaaatacgtccattgcgcgatatgccgacgcttgttgagaatcagcagcacgccgaaaatcgcaaggcatgcggtggagaccagcagcactgcagcatgaataatcgacagaatagtggtgagattcagcgcgccaaacgccagtttgccggaaagcgcggcgtggactgcgtacaggcaggaaatcacgatgatcggcaacgtcaccacgccttcgaccagcatgacgatgccgtagatgcgtgcaatcagcggcagtctgcgatcagccggattgtcatcatcttccgctgattgcgattgcgtaataatgcccgcttcttcgatggctgcgattttggtttcgtcggcgatggcctcgctcacatcttcaatcttgctcatgcttgttcgtccttcccagaacaacgctaccaaaacccaatcgcagtgcgctacacgagatgattgtttgcgcgcaacgcgcacaacctgcgatttctgtctgcgcaagtcacatgtcatcccgcaatcacaagatgtgcagacagcagactcgacttgtgcagacacagaatgcaagttgtgcggtcgccagcagcaagatttacgatcctgccgcggtttgtcgtgtttatttcagtcatggacggagcgcatttacgcctgtgcccaaatttgtccgagagcgggtattacgatacgggaggcgtagcgctacgaataacgtatcgctacgtgccaacacggtcgaacatccattggactggggagacaatgcgcaacgtactgcagattctgcgtcgcgacctcaaacgactcgtcaccgtacctgccgcttgggtcatcatgatcggcataaccatcattccgccgctgtacgcatggttcaacatctacggattctggaatccgtatggcaacacccaaggcatcaaagttgccgtggccaacgtcgacgagggcaccgacaacgccctgctcggcaaaatgaacctcggcgaccagatcgaagacacgctgaaagacaacgaccagcttggctgggaattcatgggcaaggccgaagcgatggaagcggtacagtccggcgactgctatgcagcgatcatcatcccctccgatttcagcgaggatctcgccaacgtcgtgaccgacagcaagaaccggccgacgctggaatactatgtcaacgaaaaatcgagcccaatctccccgaaaatcaccgatcaaggcgcgaccaccgtcgaccgtaccgtcaacaacaccttcgtctccaccgccagcgaagtactcactaaagccgtgaactccgcgaatgacaccatcaacggcaaaaccaactccttcgtcaacgaaaccacagcagaactcgacaaaacccagaagaacgtaagcctcatccgctccaccatcgaagatcttgacgcacagctcgccaacgtgccgcaacaaacgcaatccgcccgtcaggcaatgaacgacgtgcagctggccgcagcaagcgcgggcaagggactggcgaacaccgccaccgccatcggcaccgcacagaacggcctcaataccttcacttccaacgccaacaccgctttggagaacggttccggtctgatttcgcaggccgccagcgacaccaccaccagcatcaacaaggtgaccacggccgtctcttccgcaatcggcaccgcgcagcaggccgtcagcaacatgcaaagcgtgaccggcagcaacgcccagctcatcgagaagctcaagaacgtcagcgacaacgcgcagtaccaagacatcatcaaaaagctcgaagacaccaacaacacggccgccggcacgctcaacgacctcaaaacgttgagcgagaacacacaatc

SEQ ID NO: 2818 - DNA, 17507 bp, Unknown
  R36_18m  MAG No. k141_22218
gaggggcgggcgggcatgaatccaccaggtcctgcgcccatgtcagggcgtgggcggccgtcatcgtccgcccctggcagcaacagaacaacgcccgcgaccggacgtcctcgatgagtagcaggtcgtagaagaccatgctcgcctccggtgtggccgcgacgggatcgtgcctagtcggcacgccgcacgattcgcggccgaaatcgtatcccagatacccgatcgcgcctcccgtgaggggcagacgcggatcgcgcgcgccatcgcagggtccaagccgcttcttcacgacatcgaggaaatcaccctccacggcaacgccgtcgacgaggcatccgccccgcccgtgttcgatcacaagataggggaagagtcccaggatcgagtagcgcccctgcgcccccggcatcgaggagtccaggaacgcgaagcgttcctcgccgcgcacgcgctccacgatgtcggcaagcggtcggaacgtcctgagcttgaacacctgcgcgctcaccggaactccttcgtctgcgcccgggcccgcgtccgcgccaccatgcgggcataggcgtcgttcacgtcgcgcgacacgctccccggttcgaattccacgccgccgataccggccacgggcatggcacccatcagggagttggtgaggaacacctcgtcggcccgaagcagctcgtcgggcatgatcgggcgttcgacggcccccgtgaacccgatcacggcatggcgcatgaccccgggcagcagaccgcaggagacgggaggcgtcacgacgtctcccccgatgacggcgaagatattggagacggccccttcggcgacctcgccccgcgtattgaggaacaacggctcgtcgacggcgcggtcacgggcgcgacgcttctccatgatgttttcggcatacgccaacgtcttcatgcgcgcgaggggagaggattcgttcctgcgcacatcggcgaagtcgcagcggaagacgcgcttcgcccccggcgcggcatacgggttgcgtctcaacgagacgacgcggttgcgctcggtgaccgtgagcttgagggccgaatcgtccgatgcgccgagtccggcgcatgcgcggagaaccatcgtctccagatcggcgcgacgcgcctcgatgccgaggtatcgcaacgtctcacccaaacgcgtcagatggtcgtccagaaacacgggcgcgccgccggataccgcgatggtctcgaaggcccccatgccgaagaagaatccgtcatccgcatccacacgcgcccgggcaccggggccgatcacgcactcacccatcgatcagcgccccctttcccgtctcgcactgccatcaatcaggctatcagtcatgaagacggtaggtgcgccgccgacacgccgtccgtccggcgattccgtgcgtcacgaccggaccgatgcgcaatatccggcttccgcgttacactagtacggttattcgcgcgcgcgtggcgccctctacaccccgagccgcgaggacacgtggattccggccggtcatgccccacatggcaaaccgagaacccgcacacctagcattacaaggagagccattttggcaaccaagattcgtctgaagcgacagggcaagaagttctacgccttctaccgtgtggtggtcgtcgattcccgcaagaagcgtgacggcaaggtcatcgaggagatcggtacctacaaccccaacacccagccctcgaccatccagatcaagtctgatcgcgctcagtactggctcggcgtcggcgctcagccgtccgagcccgtcttcaagctgctgaacatcaccggcgactggcagaagtacaagggccttgaaggtgccgaaggcaccctgaagaccgttgaggctggcccggacgccgaggcccgcatcgcggccgttgagaaccaggctcagaagctgaaggccgccaaggccgaagctgccgccaaggccaaggctgaagccgaagccgctgccgccgctgaggaagccccggctgaagaggccgccgaagaagctccggctgaggcctgagcggaaacgaaaggctagctatgcttgcacaggctgtggaacacctcatcaagaacatcgttgattttcccgacgatgtttccgtcaagtcccatgagaacgcgcgcggcgaactgcttcgcgtacgcgtgaacccggaagacatcggccgtgtgatcggccgtggcggccgcaccgccaacgcgattcgcaccgtgattcaggcactgtctgaccacaaggtccgcgttgacatcatggacgtccgtcgataaccgataaggaacaattcacagcatggcacagcaagacatgcacgacgaccctcagcagctcgagttgctgagggtcgctcgtattggccgcgcacagggcctgaagggcgaagtcaccgtgcgcctgtacaccgatgatcccgagtggcgcttcgagccggactccgtgctctacagccaggatggcgagaccgagtacatcgtcgagggctcgcgcacgttcaaggatcgttggattctcaagcttgagggcgtcgacgaccgcaatgccgccgaggccctaaacggtgtcgaactctacggcgaggtcgacgatgcggaggatatgctcgaggccgacgaatggtatcccaaggatcttattggccttgaggcccgtctagtcgagggcaacggtctgggactgcccgccggccaagtggtcggcaaagtggtggatgtggtcgactcccccgctcagtccctgctcaagattcgtttgaccgagccggtggtaaccggccagaattccaagggcgaggatgtggtcgagaagaccgcattggtcccgttcgtggaggccttggtccccgacatcgatctggaggagcaatacctcacgctcgatccgcccggcggtctgattccgggattgtaaacctcatatacgcgtgagaccaaaggactttctggctatttgttggcagaaagtccttttgcgtatgagcagaaacatcgagacgctaaaccttcctcattccggtatcgcatagcagataatcaatagtatactagtgaataaatgattttattcatggaaaactatatgttataacactcggagtatcgcaatgaagtatgtgcccaccaccaccaaacgcgatttacgcatcctaggcgaacagttctcgcaacagcgcaaactactgatgttgacggttgcggatgtagcacaccgctctggtgtcagcccgaccacagtgtcaaatctggagcaaggcaaggctgtccggtcagattcgctgttaaccatcgcgcgcgtgttgcaacttgctgacacactcgtagccgcatgcgacccctattccaccgatcttgggcgtctccgcgctggccaacaactcccgaagcgcgttcggaggtgaatccctgatggcaaaaactatcgaatcaactgtactgattacgctagggcctggaatggaagctcctgccggcacattgtatgcgactggcgacgacctatcgttccgctatgattcgacgtacacaatcagcagcgattccttcgacctcttcccatctatgccccgctcgctggccccattcttcttctctggacttggtccattttcggattccgccccagaccgttggggcagaaaggtgttttcccgcagtcttaaacggacgcgtgtcagcgagtcggaatatttgttcggcgtcaacgatctgacaagacagggtgccattcgattcattgttgatggcaagccagcggcaggagatgaaggagtacccgtactgtcaaagctgccggagttattggacactgcggatgcggtggaacagaaccgcgaggtaagtgatgtctccttacgcaggttgtatcgggcaaccggctcactcggaggcgcacgacctaaagcttcggtgtcggatcgtaatgcgctgtggctggccaaatttccgaaaccgaacggcgatgattgggatgttatcggctgggaagccgtcaccttggaaatcgcgaacatggccggcatcaaagtgcccgaacatcgcgtcattgcaataaaggattcggaggagagaagccggaccgtgctattgactcaccgttttgatcgcgtgtctgcaccatcagttgagcgaatggagcgattaccttatatatccgcaatgaccgcgctggaagcaagagatggggacggcggagactggttggatctagcagaatttacgcgtagggcaggaggagacaccatagagctatggcggagagcaatgtttggcgcggccatcggcaacactgatgaccatctacgaaaccacgggtatttgcgtaagaataattcctggcaattggcacccgcttttgacatgaatcctgaaccattcgatccgtcgctacccgactcacaccagatgtcattattaggtgacaccgaagtcgatatagataaattgatgtccgatgagagtctgtctttgttcggtgtaagccgtaaatatgcggatcattggttgccgacattgcgatcagccttatctcaggcattatctcgagcagcgatgcgccgcattgacatgcattccatcaatctgatggccgaacgttttgataaggcggttcatgctctgcagtagagcgatggggatctaccgcaaactgttactcgtctcgtggctccggcctcggtatgtctctggtatcgcttaaaaagtcgcggcggtcctcataccggagagcaacgattgcgatgactgcgtggccgacacgtcatacggcagctgattggcatcggactgctaaaggtcagttcaggcagatgacaaagttccgagaattctttccttacgttttctccatcggttacaggcacgttcgatacgtttatagccaattagctcggacggcaccaaatgaaaaatccttgcctacttccctattcgagcatccccaaaagggcacgccaccgctgcaatggcgtgccccgaatagagcgccgctgggctcagagcgcagagaagccctcttcggcaatcatgcgcatccagatattgagatgccagtcctgatcattggccaatgggtcggcctgatgcatggaccgcccatcgacgttggagggaaacacataggcacacgtggcggaaccatccgcgccatagttcgccatattggcctcgaaaatcgccttggccaaatcatcggtacgtgcggagcgcctttcttgcggcaaccgtgccagcacttcggcggtcaacgtggaccaataatgagggaacacatcaccgaattgtcggttgatgccgaaccaatacccatcccaatgtcgaatcgccacaccgtagagacgcgagtccggctgcgggccgctgaacgccaatagccaatccaatcgctccacggcaccatccaggtattcggcgcgcccggtaatgcgatgcgcttccaacagcagactcaccaacggcgcagtgatggactgttcgtaagacacctcatggtagggcaggtcgatacccaatcccaggaagtagtccgcactgaccaccacacgatcgagcagacgttgggtctcctcggttcgcccggtctgcttaagcacacgcgccaaggccgcactggattcggcgaactcgatgctcaggaagtgttcgccgccaatttcggccgcccgatcggcgatgttcaccgccatatcgagatcgtgcgcatccttggtggccagataatgttcggtgaagaaactgataatccacgggcagtcatagatacggcctccgaatttggattccggcagccccgagccgcgacgtaccgcgccgctggcgtcgatgagcgcggactcggcgaacgtgcgccacgcatcggcggcacgctgggccggctctcgtagggactcgtcaagcagcccaagattcagcgcacgttgtagcaataccggcatggcgatacgctcggaaccatccgaccagtcatcccaactgggatccagcacatgctgtccggtgcgggtatcggtagccacgatggccccagccaacgcgccgacgcgctcatacgccacctgatgctccaggatgtatcgcgcacggtcgttgacggtatccctcaacgtcttgtggaagagtacttcggtatgtgcacgatggtctccatccacaagctgcagttggtaggtacccgcctgttcggccgtcaaccgaactccgctcacagtccgttcgacggtaagaccgtcatccagcgccgtaacagcacgattcgtggcgatatcgatatgcccgcccacagtggcgcttaacgaggagaacgatgcaggagcaatcgtagcggccaggaatgcatcctcgtccgcataccatcccagttcccacgtcagcgcatacgaggcccccggctccagcgtgatggtcggctgcccgccgaacgcatcaggattcagcgcataatcggtgacctgcagcacgatgtgcccgcggatatccgaatacgtgacctggttacgcgattggatggcataggcattgattgcgccttccgtaacgatcagccccaagcgcgcaccgcggccgtccatcggctcggccagcacccagctccagtcgcctcccgcgaatatatgcgcatgcacacattccctcaacgctttgcgagcgcccggataccggtcgttcaatggggtctggatgcccaagcctgtgatggtcaccggctggttcgaaacgttgcgccattcataacgctcggtcagccgttcgccgctactgcgggtaacgtccaggacgagtcccgcaccgcacagtgcgaacgtctgctgttccagaccattggttatgccatatacctgcggcgtgttccactgcgagccaccactggtagtgaccacatagccgctgccccaatactggtccgatgtgtgccaagagacactgtcgtccagcagataatgacgattgggattatcttcgttcacaaaagcgatgggagcaccggtggattgatccagaagaacctggccattgccgaacggcagcgaacttccagcgaattgagagaaatccgttgaggcaccgacttctgcagtagcacgttcgatagcggcttgctgtgcagcattctgtacgtcactcatgactgatctcatttcgtcctcagcccttaacggagccggcaaccaacccggagacaatccacttctggcagaagcagaagaaaatgaacaccggaaccagggcaagcaccgtgatggtcatgaacagaggccagttcgtggagaactgctgcacggcgttgtatacctgcagcacgacggtctggttatccgtggagctgaggaacacactcggcaggaggaagtcgttccaagtgcccatggtttggaatacgacgacggtggtcaatattggggtgatcagcggcaacacgatgcgcgagtagatgcgccatgggccggcaccgtcgattttggccgcttcgaacaattcctgtggcagggacttcatgtagccgacgatcaggaagtagcagaacacacacgagcccatatacagcacaatcaagccaagcagcgaatccacaagtccggtctcggactccatgcggtacagcggcagcattgtggcctgcacaggaatggcgaaggtgaccatcagtacgccaccgacgatggcggtgaacttggatttcttgtataccacgccgaatgcggccatcgaaccgaccagaacctgcagcagcaccgccaccacggtgacaatcagcgtgttgacgaacgcacgaatgatggtgccgtcggcgaaggcctccttgtagttctccagcgtccactgctccggaagccccaatgggttcttgatcatatcgattgaggtcttgaaggagctgacgatcacatagtacagtggcacggcgcaaatcagggccaggccaagcaccacgatggtgcgaaagattttgcgaacgagttcacgctgagacggtgtcattggaacctcttttccacggcgttggcaatgccggtctgcgcggcgatgacgagaatgcaggcgatggtgaagcatacggacaacgccgagcccagtccgtactgactttggccgatacctttgaggatgatggcctgggacagcgtattggtggcgtatccggggccaccgccggtcaaggtgtacggcagatcgtagattttcagtccgccggtcatcaagaggaacatcgagacgacgatgccggggatgagctgcggcagagtgatatggaagaactgctgacgggaattggcaccgtcgacacgagcctgttcgtacaggtccgccgggatggtttgcagataggcgaggtacagggtggcgtgccagccgacctgcatccatacggccacgaaaatcacgcagaaccgggcccaattgtcatcggccagccaagggatattcggtataccgaataccgcgatgactttgttcatcacaccggaacccagtggagagaagatgtactgccaaattagaccaatgatggcctgcgccgggacaccaaggaagaagaacagcgaacgggcgaagctacgtccccacatggctttgttgagggtcacggccagcggaatggcgaaacaggtgaccaacagtgtggtgccgaaggcatacagcagggtgaagcccagggcggatagcagcgacgggtccttgaagatcgcagcgtagttgctgaaggccacgaagctgaagttttcggagtatccgtcgtaatcggtcagtgaatagaagaacgactgtgccaacggcacgacggtaaggatgaagaagatgatgatgattggcagaagaaaccagaatgaggagaggttttccgcccataaggatgatgcacgcttggattttggtttggaagcatgcccaatggttgcagcggtcatgggaagtccttgagaattatggtcgatttgacatagcaaggccgtgcctgccgccgaacgggcgatcggcacggccttgtcaggaggagagaaaggaactggtggtgtgatgggttacttcagcgtcgcccacttggcgtcgagagccttggcagcctccttggcggaaatctggccctgcacgatcttctgctgctgggcgatgtcctcggtggacatcaccgtaggggacttcggccagttgacccagtagaacttgttctgcttgaagtagttatccactacatccttcagttcggcaggaggttcggcattgtacttgctcgacagcgacagggtgccagcggcagaggtaaacgcctcgaggccctcttcgctgttgagataggcaaggaactttttggctgcggccttctccttgtcggaggccttggacgcgatggcgaagccttggtcggggccaccgttgatccactggccgtcttccttgctgtaggccgggaacggtgccacgccgaagtcgatgtctgacttctgcagatcaggcagatcccatggaccggagcgcatgacgccaagattgccgctcacgaattcctgcttgacctgatcggccgacagaccaacggatttctgaggaattacaccggccttggcggcagcttcccatctcttgaataccggagtccagtccttggtgaaagtggacttgccggaccagatgtccgcgtcaagatcgccggacttaccctgctcgccgtaatagctagccagcaagccggtgaacgagccagcgatctgagtattgaagtcctccaggaaagcggtgcttccgttggagttgatcttcttacccatctcgatgaattcatcccaggtcttggggaatttatcgcatccggccttcttgagaatgtctttgttgtagaagaacgcgcccacccatgcggaaaccggcatgccgtaggtcttgccatcctgctggaacaaggcgaagtttgtgtcgtcgatgccatcgaggaaatcctcgccggagatgtccaacgcggcaccggatttcatgacatcggtacggttatccatcgtcagattgaagatggtcggcggcttgccaccagcaagacgggtttgcagtgtcgagatgtactgtgccggatcctggccatactgcacgtcgagggtaatgtcggggttcttcttctcgaaccccttgacgacctcaccaatctggttgtccttgaagtaggaatagaacgaaatcttggttttcccgccacctgcggtaccggaaccgcatgcggccatcggcacgaccatggctgccgtagcggccaccgccacggctgactttagggcgaacttctttgtattacccctcatacctaagtcctttcaattagttatacgcttcaatattgatgcgcataaatgaatatatcattgaacctgacgcacgcaacaccggcgtgttgatgcgcataaactacgcgacgtcaagaaccgcacgaggccgagaatcggacatattccttagctgcggatggtgatatgcggagaaaccagcaatctttcaccagttttatgtccatcgatccgatcgaacagtagctccatggcggctttggagacggactgcggcactggatccacattatccaccggcacgcgcaactcttcgtcatgaccatccacatacaccgcgaccagggaaaaatcacgtccaggctgaatctgcatttccacacaaagctgcagcagcgaatctaacgcatgaggggtgcgcactgcaataccgccatggcattgagccattcgcttcaattcatccttcatcgcccagatgcctctccatcctttttcacgcgggatgaatatctcatattccatgcccagcacttgagccaccacacgagattcgctggcgaagaacttagcaaacgcataacggtcgagacttcttccccagtccccaacaaggaccatccgctgcgcccctcgttccgccaaacgattgacggccatctgcgccactcgacgataatccacatcaacgcacggcaggccatgtgcgttttctggcgtacccaccagcacaacgggaatatccaatcgcgctatctcaggcaggcgttcatcatgccactcgacgtcgaacaccaagacgccatcgaccacgccttgacgcaccatacggcacagtccctcaatcccctcgtcggccggaacgagcatcacactagacccccgctttctcgcctcctccatgattaccaccaggaacgggcgaagctcggccaaatcggtattctcatccatatgcaccagcacaccgatgacaccgaccttgccacccgccaacgatcgcgcattgatattgggaacataccccaactcatccatggccttgcgcacccgttttttggtggcttcggaaatgggcctgctaccgctcatcacatatgacaccgtggcctgagacaccccggcgcgctttgccacatcccttgcagtaaccatccatacacctcgtcgcttgccgcccgtcaccgtagatcaggcatggaacattcaccctccagcatattgaagtgtataaacatatgcacaccgaccgatgccatcccgcatatacacgacgacgaatcgtaccgctagttatccacagggttatccacacaccatgtggatcaccccggaagctagaaccgcattgtccgcactactaaccgacgcttcagcaaccgacacgaccgccaaagcataagcgtttacccacgagccgcggcggtgacgcgagccataaagcggtcgaggaattccgacacgtcgacgccgagcgcaacctgagtgtgcttgtcgaaatcttgcagccgcgagcggtcaccaatggtacggcctcggaacgggccctcgagatcgacttgcaagttgaacccgaaggtcgtgaccagcgatgggtcgagcgcggcggccacggccagcgggtcgtgcagtccacatccgcggatctccggctggttcttcaggtagaagtcgatgtagtagtcggtcatggtgacgaggaagtcgccggccggcgtccccagagacgcccattcatgggctttctcacgggtgagcgcggtctggtgggtcacgtcgaggccgatcatggtggtgcgtgcgccacacttgaacagatagtctgctgactctgggtcttgggagatgttcgcttcggcggccgggcttacattgccgggcagcgtcaacgcaccgcccatcaacgtcacgttcacgccggaatccttcaggtccggagcgttgcggaatacggtggccatggtggtcatcgcgcccgtaggtacgatggtcaggtccgggccgtattcgcgcgcggcggtgatgatgaaatcgaccgccgagcctggtgcttccggagcgcgcggggagtcggggatgattgcgccgccgatgccgttgggatggtggaccgccaccgagccgggagttggtgcccacgaagcgtccgtttgccagccgtccgcgccgccgttctgccagcgcgcgtaggcctgggtccgctcgtctggtgtggtgccacgcattttcggcaatgttgccggggcgatgggatggtcgactccgggatagaccggaacgtcgtcacggccgaacaagtgcaccaccgccagcgcgttgcgcgcggccagcggcaccgcgacattgccgtaggtggccgtgataccgatcaaatcgatctcgtcggcactgcctagggcatatgcgatggcgagcgcgtcatcgatgccggtatcgaggtcgaggatgagttttttgcgcatggcggttccttcaagacgaatcaatcctcccgaatttgtgacgttaagccaacgtcagcggcacaaattcgggaggatggggaatgggcaatcagccgagcttggcgagctcttcgggggtgagttcgagctggtcggccttgagggagtcgaggatggtctcggggtggtgggcgccgggaatcacgaacatgtggtcgcccttggcgagctcccatgccagcacgacctgctggtagctcacgccgtgggccgccgcgacctcgcggaacgggtcgaacttggtctcatcataggggtgacggtagccgccgagcgggctccagcacacgaaggccagaccgaccttggcgcagtagtcgagcgtgtcctgggtctccaggtgaatcggcgagtactggttctgcacggccacgagcttgtcgcccagaatgccgcgcgcaatgtcgatttgctcgatggaggcgttggagataccggcctcctgcgccacgcccgcgtccaccagctgcttgatggcttcgacggactcgttgtacggcaccttcgggtccgggcggtggaagtacagcaggtcgatggtgtccacgccgagcgccagtgcgctctccttgccgcgccgaatcaggttctccgggcgaccgtccacatcccacgtggggcggccgtcggtgaagttgcggaagtggcccaccttggtggccaccagcacctcgtccttcggccccttccaggtctcaagggcctcgcgcaccagcttttcaccggtctgctcctcgccgccggagcagtagtaggcccaagcggtgtcgatgtggcggcagccggcgtccagcgaggcatgcagggtttcgatgccgacctcatggccgcggttgttttcgatggtcagcggcatttcgccgtggccgatggcggtggtggagaacggtccgaggttacggaacaatgccatggtgattcccttcgtgaaacttatggaaactcgatatccacaatcaagcctaagcatcccgttggatttcacactctcggcctgcccgcacaatcaatctatgaaatttccgcaacttcacggaatagaaaacgcaacttactcatacccagttcagcgaaaacgaggagccggaaccccatggattccggctgttccgctgatagatcagtggcctcgtctgagactcattcccagcaataccagtgcggcaatgatgatggccgtcgaccgccactgtccaacttgattggccagggcgatcaacaggccggtcatcagaccttcccggtattgccggtcttgtctcggacggttgtcatggttgttgcctaccgtgagaacctcctcttgaattttgagacgtcattatgccggttgacacaacgacaccgcgccaaagtggcacgctagtagaccttggtttggtcagtccagtgtactggtgagcttcggtggaggctggtatgctgtgttgtagcagaaaggtcacgctagcttcgaggcaatcttctcggcggcgccacagactttcgccccgttggacctgactgttgaggtctcctcacctcgattttgagagaaaggcccgatgtcttatgacaccgggccttttactttcaaagctatagggactttcagaagcacatcgcttaccgcccgccgaacgaaccgccgccggaaccgccgctgctaccgccaaagccgcctgagccaccggatggcgaggccgcattgattgtcgcggtgatatccgcaaatccgtacgacaattgcgtgccgaggtcagagaacccagccgcgaacgacgtgcccccgaacgctggcaccgctccggccaatccgctgtcagccacggaatccgcgaacgccgagccattgtagaaacgcaacccataccagtcgtacggacgataattccaatagaacaccgtgtcggaggcattggcatcaagccattccggatcggatacttgcggataggccatggccagctcccgcatcacccggtcggatatgccaaatgcggcagcgtagaccatataccaatcccacagcgtcaaatccgcgactccacggtacttgaagttcgagaagccttgcatatatcgtttgagacccaagcattgcccggccatctgctgaccatgatcggtcagcacgtaggaattccccatcaggaagcagaatatgccgaccgtcatcaggggaatgccgatgagggccccggccaccagatatccggccaaaccgttgatgaatatgctggcgccaccgatcagcacggtgattgccccgggaatgagccatccgttctcggttttcggcgcgatatccgccgccgcgaattcggtcttgcacgcattggtgaacttttcgagttccttgtagccatctttccaatccttgcaggcgtctttgatgtcatccatgtcaaatgccgtacgacctacgcgctcggaaatcacggtgagcagatagagcaatgcccgctcagaagcactgagatcgggctggtgtgcatcggacacgctagatgcggcagatccagatccgccagatccagatccatcaaatacggattcgacgaatactgattcatcaaatccctcagatacgccgtaatcgtactgccacagcatcacaatcgtgctattggtacgcgcattattgcgcttgtatggatcggacccgattcgctgactgagctccaccggagaaacttgtttcagatccacgccgatatacaggtccgccgaaccggggaacacagcaatgactttcttcacggccagagaaagcaaggtcgcgacgagttggcgctcggaaatgtcgggtttgtcgccggaagtcacgatatcgatgggtttggccgccgatgcggggctcagctcggggcgatcgcgccaatattcgatggagccacggtaacgtgaacgtccggaggagcgtaaggctgcaacaacaccaataatcccgaatatcaggccggccgatatggtggtcatccagttgttcaggcgccttgtggcgcgttggcgttccagattgcgccagaaccgttcgtcgtcggcttcgtcttccttcaactcctgcagatgatcgtcggtctcgacacgagccatatctcccgccttggccgcgtcgaaagcggccaccacgtctaggtactcgccgcttttcacatcatttacggtgaaggtgaagctgccatccttggttcggccggtttccgaggtttgttcagtgtgcagccaagtccacgagttgctcgcggtcacacctttggggaaatgcaccgtgccggtgaccgtaccaatcggcacctgattgttctcaccgaatggctcccattggaaggtcgccacgtccttccacttggtggccacgtcatgcatggtgaagctcaccgtgaacttgatgctgttggtttttacggtggtgggaatattccagccgatctccacggtttggtcttgccatcgtcatccttgcgtttgcgcaacttgatatcgatatgctccgtgctttaagatcgccgtcggcggtggcggtcacatcgtaatcaagcgtgcggtagctcaggtcggcaccatctgtgccgagaatcaaggcaccggcacagagtgcggcaagaatcagcgcaccgacaaggcttaagcccagggcacgaacaatgcgtttcgacataggcatgcgctaccgcccgccgaacgagccgccacctgagccaccgaacgagccgccgaaaccggagccgccgcccgaaccgaagctggagaaatcgccaccggaatcggcggatggtgctgccgcgctgatggtcgagctgatgtccgccagaccggagttcagctgcgagccgaggtcggagaatccgccggcaaacgacgtgcctccgtaagccggagctgggccgccaacgcctaggtccgtctgcccggcagcatcgtggtcgaatggaccattatgacggtggctgtaccagccatacgggcggtagttccagtagaacaacgagttggaggcgttggcatccagccaagccgggtcgttgacctgaggatatgctttggccagttcacgcatcacgcgatcggaaatgccaaacgcggcggcgtagaccatataccaatcccacaaggccaaatcggcggtaccccggtcggtgaagttggagaagtcttccatataacgcttaaggcccagagtccggccggcgatatcctgcccttgatcagtgagcacggtcatcgcgccggccatcgagcagaacagtccgaccaggaatatcggcagcccgataagaccagccaccgggtatccgataaagctgttggccagcagcgaaccaaatcccagcacggcggccaatacgccgggtaggatccattgccagcccacagagcgcgtggcacccagccgctggtattccatgctgcatgcaccggtgaatttgccgagctcaatatagccgtcttgccagttctggcaggtcgccttcatctggttcaggtcgaataccgggctgcccacgcgctgagaaatgacgatgagcaggttcagcagcgcatcttccgattcgctcaatcccaactgttgcgcgttgggtgcctcatcaatggcgagcggcagaatcacgatggtgctggtgatgcctgccgcatactgcttgccttggtcggcggcaatcatttggctcaagcccaccggcgtggcctggctcatgtcgatgccgcgatacatgtccgacggccccggata

SEQ ID NO: 2819 - DNA, 17661 bp, Unknown
  R36_18m  MAG No. k141_22509
gcatttggatctggtcgcgcagtcgggcggctttctcgaattcgagttcggcgctggcctctttcatgtcgcgggtcaactgggcgatgtatggccgtccgagtcgtccggtcatcacgccgaccagctgttcgcacagccgccggtgttcgtccgcttcgatacggttcacgcagggtgcggagcatttgccgatggaggcgaacaggcatggccgtccggtcagttgcgccttgtggaatacgttggtggtgcaggtgcgtaccgggaacgtgcgcagcaaccggtcaagactgtgccgcaattcccacactttggcataggggccgaaataccgggtatcccgccgtttgcgcgaccgcgtgacccacacgcgcggaattcgctcccccgtgctgaccgcgagatacggataggtcttgtcgtcgcggaactgcacgttgaaccgtgggtcgaattccttgatccacgtgtattccaacgtcagtgattccagttcggtggcgacaaccgtccactccagactgcgtgcggtcagcaccatggtctgcgtgcgcggatgcagcagatacagcggctggaaataattggtgagcctgttgcgcaggttcttcgccttgcccacataaatgacgcgcccttccccgtcgcgccatttgtacacaccgggtttggcgggaatatccgaggtcttgggtcggaacaggtcgcgagaatcccccagcaaaggtgccccattcgcattcaccttcgccgtcgtttccccggcgcccacagctacgctttccggcattaacgccgccgcggtcttccgccactcatccggactatgccgctcaatatcgttcgtcataatcctcctcgctattaagcaaaaccaatcatcagggattgggcgggttggtatgtgctgctggaccgtaaagacttggcctgagcggcccggagcgtgtccagcaacataccaccccaacccacccgaggtcagctgcaatggaaggctaaagcatggatttcaggaacttgccggtccatgaggattcgcattcggcaacctgttcaggcgtgccctgcgtgacgatggtgccgcctccgtcgccaccctccggaccgagatcgatcagccagtcggcctccttgatcacatccagattatgttcgatgacgatgaccgtattgcccttgtccaccagggactgcagcaccttgagcagcttgttcacgtcttcgaagtgcaggccagtggtcggctcgtcgaggatgtacacggttttgccgtcggatcggcgctgcagctcggtggcaagcttgacgcgctgcgattcgccgccggacagggtgggtgcgggctggccgagtcggatgtagccgaggccgacgtccacgagggtcttcaggtatcgggagatgccggtgtacgccttgaagaagtcggcggcctcctcgatgggcatgttgaggatgtcggccacggtcttgccgttgtacgtgacttcaagggtctcgcggttgtatcgtttgccgtggcagacctcgcagtccacgtagacgtcgggcaggaagttcatttcgatcttcagcgtgccgtcgccgtggcaggcctcgcatcggccgcctttgacgttgaaactgaagcggccggggccgtagccgcgcacctgggcttcgggagtcttggcgaacagggtgcggatcttgtcccacacaccggtgtaggtggcggggttggatcgcggcgtgcggccgatcgggttctggtcgacgtggatcaccttgcgcacctggtccacgccttccacgcgcctgtggcggccgggtacgatgcgtgcaccgttgagcttgtcggcgagcaccgggtagaggatcgtgttgaccagcgaggatttgccggagccggagacgccggtgaccacggtgagcacgccgagcgggaagctcacgtcgatgttcttgaggttgttctcgcgggcacccacgactttgagcacctgggtcttgtggatcttgcggcgcttggcgggcacggcgatctctcgccggtgggcgatgtagtcgccggtgatggagcgcttggcttctatgaggtgcttggcggggccggagtagatgacttcgccgccgtgttcgccggcgccggggccgatgtcgaccacccagtcggcgcggcgtatcgtgtcctcgtcgtgttcgacgacgatcagcgtgttgccgagatcgcgcaggtggtgcagggtttcgatgaggcgttcgttgtcgcgctggtgcaggccgatggacggctcgtcgagcacgtacatgacgccgaccaggccggagccgatctgcgtggcgagtcggatgcgctgcgcttctccgccggacagggtggcggccgcgcgcgagagggtcaggtagtcgaggccgacgtcgttcaggaagccgagtcgggccttgatctccttgagcacttcgccggcgatcagctgtgccgagccttcgagtttcaggccgttgatccaggcgagttcgcgtacgacgggcatgtcacatacgtcgaagatggatttgccgtccacggtgacagagagcacctcgggcttcagacgacgtccgtggcagacctggcagggcacttcgcgcatgtacgactcgtagtattcgcgcatggactgcgaatcggtttcgtcgtggcgtcgcatgagcgtgcggatcacgccttcgaagccggtggagtattcacgcaggcgtccccagcgattgcggtaggagacgttgaccttgaagtcgtggccgtagaggatgtcgtgcttgacgtcgtccggcaggtccttccaaggggtcttcatggagaagcccatttccttggccaagccttcgaggatgtggccgtagtactgggaggtcatcttggtgccgctccacggttcgatgacgccgtcggccagtgacttgtccgggtcggagatgatgaggtccgggtcgatttccagtttgaagccgagaccggtgcaggcggggcaggcaccgtagggggcgttgaaggagaaggtgcgcggctcgacctcatcgagttcgagcgtgtgcccgttcgggcagctgcggtgttcggagaacggctggcggcgggccgggctgccttcctcctcgtccacgaagtcgatgacgatgctgccgttggcgagcttgagggcggtttccaccgaatcagtcaaacgttggcggataccgtccttgaccacgagtcggtcgaccacgacctcgatggtgtgcttcttctgcttggtgagtttgatgtcgtcggacagctgtgtcatctcgccgtcgatgagcgcgcgggcgtagccgtcggagcgcagcagctcgatcatgtccacgaactcgcccttgcggcccttgaccacgggcgagagaatctggaatcgagtacgctccgggtagccgagcagcgtgtcgacgatctgctgcggggtctgggaggcgacgggctcgccgcattcggggcagtgcgggatgccggtgcgggcgaagaggagtcgcaggtaatcgtagatttcggtgatggtgccgacggtcgaacgcgggttgcggttggtggtcttctgatcgatggagacggccgggctcaggccctcgatgaagtcaacatcgggcttgtccatctgacccaggaactggcgggcgtaggcggacagggattcgacgtagcgtcgctggccttcggcgaacagggtgtcaaatgcgagcgaggatttgccggaaccggacaggccggtgaacacgaccatacggttgcgtggaatcgccaggtcgacattcttgaggttgtgttcgcgcgcaccctgaatcgtgatcttgagatcgttcgggatgtgcgagatatcagctaccagcgaaccatcgtgttcgatcagcggcgcctttttgatttcccggctcaggaaggagtcgctggtcatcaccttttcgacgatgacctcaccgttcttgcccttgctggttttcgcgccctttgcgcttgttgcgcgccttgcgccagtccgcgttgccgccacagccacaccccaccttccatctcaccgttcccgcgcgcacggttatgcgcgcgccgaatctgtcccaaggatacccgaactcacgaccaaattcgaacgcttgttcgatggcgtgtcaggccggaaaaccgaaccatagtatgcaaaattccggaccatcagtggaccgaaacgcaagagccggcccacgcgacatcaaccgtgcgcccagccccagtcaagctctatcccgaagacctctcctcctctgatttgccccggttcacatgtcaatcgtttgacgtccgcatcggggcaaaacccgctgtcccggttcgtgattttggcctgttttcgagaaccaggacattccagtttccacgaaccacataaaacgcgaacggaaacggcggaataaagccaatctcagagtcgccatgttgtcccgattctcgcatcaaacgattgacgcccataccggggcaacacaacatgtcccggttcgcgaaaaacacccgaaatcacaaaccgggacaacggattctgccccggtacgtccgtcaaacgattgatgttcgaaccgggacaaaatcttcaatggactccacggggatgccaagcttgcgtaattcgtcaactgcatcacgcatgggaatgcgttcctgttcgatacgccgataagcgatggttttgtcagcacacagtcgttcataaagacgtcgctccgccgattgaaggccgggcgtcggcttaggctcccgcatagcaatcttcgcgctgcgttcagtacgatcggtaccaaaatcgtcgtggcccggatcgagataacggaaccgcagttcggtcggccgttttgacagacccaacgtttcgacaccgagcagtcggcaaatggccttacgacgattggtttttgactcattcagccatttgccgctgaatcctgtcagtggaatctgtgcgacggtgcgcttcgcgatattccgccgccagcgtacgaccaaccacacgcatggctattaattcgtcaggaacgacgactttggagatcagctcgacagaggtgcctatggtgcgatgcttggtgacgatgattcatcgtccatgtcattctgatgcagcacggcctcgcgcagggaggtgaggccggtgtcggggtccttgtaggtcacgtaggccttggtggagacctcgaggatttcaccggtcttgctttccggggcggagacgatgacctggaatccgaggcgcggcagcaccgtgagggcgcgctgcgtgtaacggccgtcggccttgatgagcgcctcgtcgaggaacagcgtggtgtacgagggctcgctggtcaggccgccgccaagcaggtagatgagcgccgcgccgtatacgaacgaggtgagctcctgcaaggcgccgcccgaacggccgccggtggaggtgatgcgttcgtccggaccgtcggcatgatgcacgatggcgtagaaggacgagcggcagcgcgggtcgaggttgcgggcgccgtagcttttcacgccgttcgcgtccttgacctgcgcgagttcggcgcgcagcagcccgaccatcggcgcgcaggccgcgaaagccttgcgcgaggcgtcggaatcgttgacgtcggcggatttccaatcgttcagggtgccgatgacgcggatgagctgcgtccagaaggtgcgctcgggacggcgcacgtccgcgtgcagggacaggctgccgtgcttggggccgaactgttggcccttgagcatggcgttgatgcggtcaagctggtcgtggatgtcgctggcatccgtgtcgatggcgcgtttgatggtcaggaagctcctgagcagctgttcgaggcagcgccggtattcggcgtcggtggcggcaaccgcggccagctgggtgaggctggcgagttcgtcgagatagtaccggtagtcctccacgctggcggtcagcgaatcatcgtcggccgcgtagagcgcgatgtaggtgctcatcttcgattcgacgccggtgcgtgcggcatcggcctggccgttcagcaggttgatgcgggaggccatgtccttgccgatgccggcgatggtgcgttcggggaagctctcccccggcgcctgcgttcctgccgcgcccgcgccgatgatcatgtgcgcgcgcatggccgcgtccgccaatccggcgaatcggttgtcgtaggattcggcgagcgccgccgtgacttcgtccggcagcgggccggaagcggcgtcatcgtcattgtcggcggtggcaccggcggcgtccgtcgtgccggtgtcggcatggtcgcgcagccagatgagcgccgcttcgacggcgctgccggcgcgggccgcggcctggtcggattcgatgcgctggcgttccgcacggtcgagttcggcgttcagttcgtcgcgctgtttggcgagttcggcgagtttgggatcgtttttgatggatgcgatggcgtcctgcgtgtccgtgatggtccgttgcgcgccggcgatgtcgatgcgttcccatgacgtgtaggcgagctggttggctagttcgagttcgcggtggaggttatcggactgtgttttggcggccgtgtagtcggtgtcggcttggctgagcgcgttgcgggcggcgtcgacctgcgctgcgagcgcgttgaggtaggtttcgttgacgaatccgatgacctgggcgcggtctttggtgccgtgctggccgcgtgcgccggatttgatctgaccgtcggcctgcacctgacggttggcgcggtcggtgtcgtcgatggcggtgacgcatagggcgtcgaatcgttcgtcctgggtctgcgagcgcagccagtcggcgaagggcgagtcgtcacggtagcgcagtttgccggacagccagtcgccgtcctgttctccggtgagtatgttcgcgtgcgcgccggtgtcgtcgtagtggcgtgcggtgtccacgaactgccaggtgcgtcggggcatggtgcgcgggtcgatggtgctgactttggcggcgaagccctgttcgtggcgcttgtcgacgaggatggtctgggcgatgggcgcgtaggcgacgttcatggcgagacgccagtcttcctcgtgttcgttcacgtccatgagttcggccacgtacggcagttcggcgggggcgagtccggtggcgcggcagagcatggcgcgggtttcgtccatctgctgggagatgcgggtgcgctgggagcgttgccggtcgaagtcgcgttgcagtcgttcgaggtcgccgcgtgcgccggcccgtgcgttgatggcggcggtgagggcttcctcgcattcgccgtctcgtttgttgtattcgcgtttgaagttcacggcgttgatgcggcgttcgttccaggactgttcgttgccgggcagcgtctcgccgatggatgcgaacgtttgttcgattcgtgttcggttggcttgcatgtcttcgagggtgcggcgggcctggtcgagttcgagttcgagtcgggtcaggttgccgccgtccagaccctgcatctggcctcggatcatgtcgaggcgggtgcgcaggtcttcggttcggcggcgcagcagcttggcttccgcctcgctgttctgttgttcggcgcggtcggcgggcagttggacggcgacttcgccgcgcatgcgggccaatgcccagtcgcgcagcacggccggcaccgtgccgtcgacggccggcttgaccggttcgaaggcgcgggccttgccgcgtgcggcggcgtattcgccgtaggcctgttggatgccgcgcagcgtgtccatgcggcgggtcttctcgtccatggcgtggaagttctcgtcgtaacgttcgtagtcctcgaccgtggtgcgggccaggtccagggcttcgggcacgccgagcacgccttgtttgaagatgtcgtcgagccgggagggcgcgtcggcggactggatcttgtgcagcagtcggcaggcggcctcgctcaggcccattgcgctccagatgtgtgtgtggaacgcttcggcgctggggaatgtgaggcagtcggggtaggtggctttgagctgggctggcgtgaacggggcgtcacggtattggtccatgcgcctggggtccacgggcttgccccagaccacgtactggcggcgcacgtcgccgcggccgtcgccgggcatcaggtagaggaatttggcgcaggaaagcacctggccggtggtctggttgcgataggtgtccacgatggcgccccacacgggttgcggcgcgccgttctcgtcgcgaccgcgcaggtagagcggctcgtcgccggtttcggtgctgcccacgccgaccatgccgcgcaggtaggtgtagtcgctgcgttcggagcggccggagttcgaggccttgttgaacggcgtgccggtcgggtacagcagggagatctgcgcgtcgaccagcgtggatttgccggattcgctggcgccggcgagcagggtcaccggcagcttgtggtccgtggaggggcggaattcgtggtagccctcataggagccccagttgatgagtcggcgggattccagcatccaccggtccgcgatcatctgcacgtctgtcgcctgcatcattcggctcccttctcgtcgtcatcgccatcttccgtgtcgccgtcgccgtgttccgcgacgtcgagccaggtgtcggccagttcgcggtcgagcaccacgggcacgagcggcgtgatctggtacatggcttcgtcgtccaggcgcgccaaatacccgtaggtgatcatcgcggagacgatggcgccgatctgctttgccacgccttcctcgtcattgcgggctgccaggtaaccggcgccggtggcgagcgcggcgcggatctcctcaaagctgacgagccagtcggcggggtcggcgtgcacgttctcgtattcgaggacgcggatgcgcaggaaggcgagcagcgcggcctcctcgcgtttgaggctgacacgggttttgagcgagcgcagggtcacgtcgtcgccggccacgggcgtggcgtacatgatgcggtagcgttcgttgatcaccaagtcgagcaggtcgttgttcagggagcgtacgacggcgtcgcggttgtcgagcacggtgtcgtaggtgggcccgctgatatagcggtcgcgtttgagggcgatggcggccatgcgtgcctcggccggcatgtcgccggtgtcgccttcgaacagggcgtacgggttggcgttgtccatgtgctcctcgtgttcctcggccacggtcatccttcctccacaatgatgttcagctcgtccatgtcggccagcaccggtctagtgatccagtgccggggctcgccgtcgatcgatacgcaatgccaagtcgcggtatcgccgcgctgcgccggggccggctcggtggcgatgtcgctgtcgatgccgacgccgtcagtggacggctcgtcggcgatggcgctgccgcttacggctcccagcccgcccaggaagccgacgatctcgctttcgcggcgttcgctttcgggcagccggttgaagctggcggcgatgtccacgagggttgcgttggacctgtcatcggacctgtcaacggtcaccgggttgcgccggatgaggctgaccatgcgcaggagtcgggggccgccgctgttgaccatgtcccgcagatcggccaccggagtcgactgcggggcttcggcggcgaggtcgctcaggccgggtgcggtggcgcgggtcatggatttggccgggcgcatcggcaatggcgcgaacagcgcgtccgcggtggccgtgtcgtacgggcgcgaggcgtctcccatatgggttttcgcatccgcgttgaggcgcgcgtacagtcggttcaagcgggtgagcatcgtacggtagcgagtgtcggtttgctggcgcacgagccggctgatcgcctcgtcggagacgcgcatctggcggcgcacggcttcgatgccgtcgtagatgcgggccagttcgtcgcggatctggccgagcagcacgccggattcgccggccagatacggggttttggcgatggcgcgcagggcttcgtcgatttgctggcggccctcgtcggtgatgatcacctggaaggcgtcctcgaagcggcggccgctgtccgattcgctgaacgagcggcggtattcgtcgtggtagcgggtcaggttctcgtccacgctgatgtcgccggtctgcatgcgccggcgcaaggcgtcgccgttgtcccgctcgtcgagcacgagttcgcgcaggtcgatgggcacgccgcgcagcgtgttgtggatcacggcgatcacgtcctccacttgggcttcgctcagcgtggcgtgctgcttgccctgttggatgcgtttgatctcgtgcttgcgttccttgatttcacggttgagaagtttgatgcgctcgccggggtcggcggtcagctgcatgcgcgcgtgttcgatttccatgatgatgctgttggcctgcgcgccggacagggcgcgtgattcgtcttcgagcctgctcagcgcctcgatggcgcggtgggcgcgggccgtcaaacggtagaggaatcggtgtgtggccgcatcatgcgagttggcgagccaggcgtagtcgccttcgccttcacgggtcaggtcggcgaggatctgatgggcggcctcggcgaaggtctggtcctcgcgcggcgcatattcgccggcgtcggccagagcgttcagactttgcgcgaaccgctcctccacggtctcgcgcggcagctcgccggtgagcgggtcgaacgtggaacgcagcagcgacacgtacagcatcgcgttctggcgcaacagcaaccgcaggacgcccgtctcatacaccggtcgcagccgttccagctcccgcatcacatcggccacagcatgcctccctctgtcgtgaccgcaccatactagccgatagccgcgaaccacaccccgcccgcgccacgcgtgctctctcccgcccagcaccaatatgtcacttttactgcacatgtcatcatgtgcagtaaaagtgacattgaggctgcgcactcatggtgatcgttcactccagccgtcgcccctattcgccgcgcagggcctcggtcggggtgagacgggcggcgcgggaggccgggtagaggccggcgaggatgccgaccaggatggcggcggcccaggcgagcggcagggaggtccagtcgagggcgatcggctggccggcactggcggcgacgccgatggcagcgccggcgccgagcgcgatgccggcgaatccgccgagtgtggacaggagggccgcttcggtgacgaattgcatgcggatgttgccgggcgtggcgccgagcgcgcgtctcaggccgatttcgccgcgacgttccatcacggtgacaatcatcatgttggcgatgctcatgccgcccacggccagcgcgatcacgccgatcatcaggccgagcgtggtcagtgaatcgttggtggtgttgcgcgctttggataggtcggcggacgcggtgacggacacgttgccgccggccgggttggcggcgtgggcgagcgtgcggcgggtgccttcggcgtcgccgggcgtggtgcgcacgtagatggcgctgatccgtccgatggtgtcggtctggtcggggtaccggccgagcgcccattgctcgccgatgatgacggcggcgttcaggttttcagcctgcggcgtggggttcaggatgccgatgacgccgtaccatgcgttgtcgatgaggatgcggtcgccgggctcgttgacgccgagccggtaggcggcgtccgagccgagcacggcgacgggcaggtgctcgttgttcgcgtcgatgccatgaccttgggcgaggcttgctccgacggcgtcgagtgcgccgggccgcatgatggcgagggccagcgcgttgccgttggttttggggcacagcccgttcttgaagatctgcaccttctctggcgcggtgtcgaagacaccgacccgttcgacctgcggctgacgggcgatggttgtgggcgcgtaatccggcagcggaaccttctgctgggcggcgtccacgccgggggcgaccaccgacagattcgcgccaagcgcgtcgagttgggcgaggagcgctgcctggttcgatgcggcgatgccggacaacgccacatatgcggccacgccaagcgcgatgcccagcgatgccagcaccgtgcgggacgcccgcccggcggccccaacccaagccgcatgcatcaaatccgcaattcgcgtgcgtattggtttactcataggagtacgttcactcatatctctcccccagtcagcctttggctgacagcccctcgtcagagggggcttgattcggcttgtcgagttcggtgactaggccgtcttggatgtgcagacgcctggggaaacgtgcggcgatggtctggtcgtgggtgaccatgaccaggcttgcgccggaatcggccgccgtgagcagcaggtcgacgatggtgtggccggtttcgcagtccagcgcgccggtcggctcgtcggcgaagatgatgtccggccgtttggccagggcgcgggcgatggccacacgctgctgttcgccgcccgacaactgggccggccggtgatgcaggcggttccccaatccgacctgttccaacgcctcggcggcccgttgccgacgttcgccgcgcggcagggttgtgtattgcaggcctgtcatcacgttctccaaggcggatacggtggcgatcagatggaactgctggaacacgaagccgatgcgcgcggcccgcaggacgctgcgctgccgctcacccatcgcattcacatccccgccgtcgtatcgcaatattcccgaggtcggcatgtccagcgtgcccagtaacgacagcagcgtgcttttgcccgagccggacggcccgacgatggccacgagctcgctgcgatcgatggccagtgacgtatcatgcaatatctccagcacgctcccgtccttgcctggaaacgccttcgtcacatgctccaacgtcagcaatgccccatgctctgggccagcgggggcaaactcgatgtcgttcatgagaccaccaccttgtctcccgccttgaggccgtcggacttggtgatttgcacttgcgcgtcggacaccagcccgattgacaccggcacacgcaccaacttgccgccgcgtaccgcttcgaccgcatacgcgctgccggcgctggcgatcagtgcggtcaccggcacgatcagcgcctccccggtcgaggcatcggcgttcgggatgatgacttgcacggccgtcggcccgaaagccgccacctgcgactggtccgggaagtcgatgcgcgccgatggctgtgtggcttgcccgttgtcgccggtcttctgcccgccctgatcgaccgaggcgagcgtcgtttcgacggtggtgttgtccggcagcacgacctgcgccttgtctccggctttgaacatcgccgcctgcgtggcggtcaacgtggcctgcgcatgcagggtgacgcccgtatagcttgccgggctgacctgtgattggccgagtttcgcgttcaccgccgtgatgcggattggtgcggccgcggccagggccaccgtattcgggtcgaatgtgccggtgaccgcgtcgccggtcaggccgagcgagcgctgccattgccggatcgcctcgcgggtcagccagttgaaatgcggtccgacctcgccgccatagaatccgagttcctgcaggttctgctccagttgcgtgacgtccgggccgtcggagacgccatcgccgatcgtccgccagaacgggcggtcgccatggaacagcggcacgggcgcgccgtccatctcgtacacctgttcgccggtgttgatctgtttgccggccaccggcagttgggtgattgtgccggaagcggccgcgaaatcggaggcgtcatcgtattgcagactcgcgccgagccgggtctcggcgttgagtacgcccttggtcacctcctgcgtgcgcagcgtggacacatccacctgctgcgatcggccagtctgcccggtcgcggtgacgtgcccggccaacgtccacggcctcaccgccacgcacaccgcggccagtccgatcacggcgatcgccgcgataatcatcgtcacgattctgcggtgtttcccgaatctgcgcgcttccgtccgtgtcatgattgctcctttgtccgttatcggatggccgtctcattgctggggcgcggcttcggtggacgcgctgccggaggtgaattcggagaggactttgttgtagtcatagccgaattcctcggtggtgccagcgaaggcataggagatgttcgcgccatcggtcgggcattccttgaggaatcggcgcagttcggattcgcttacggtgccgggaatcgtgattgaggtgggcgtatcggcgtccgggtccttgacccagtcgaagcccttcttacgcgcggcctgggcgtaggcgagcgccgcctgcttgtcttccccggaatactggtgttgcggccccatgtccggaatgggctgggtgaagtcggggttcttggcctcgcagtcggcgtattcccgctgtttggatccgtagggtgagccggcgagcgccttggcgtccttgaacaccacccaggtgctgtcgtcttccatcgacgtgtaggcagcgttcgggtagagttgcgggccgtcgtcggatgcgctgaggctgttgccttgggaggcgaccggcttgccgtcggtgccgatcatgcgcagtgcgaccgcgtttttggtcggggcttgtttgcccgagccggagccggacgacacgccagcagccgtacgcgcgtcgaatcctttgccggtcaggcaggcggcgaatcgcttcgccgtggcgtcggtggtggtcgtcgcatcggaccgatcgtcggcacctgagcctgttccgactgccgccagcggtgacgagcaggcgcccagcatcgaagccagcgagagtgcggacgtaagcattgcgattcgccgtaccaggcgcgtatgagtagtggacattaccgtctccattccgtgagtcgattgtgacgacttccatccaatcgccctcaccgtggagcgtcggtaagcggacggattactttcgccttaccgtagaatcgggaaaatgttgggtgatgccattggttcgggaaggctcggaaggggacatgatgcggattctgatcgtcgaggacgaccgcgaactggccgccgcgttggacgacgcgctgcgctacgaggggtacgcgaccagtctggcaaccaccggcgtcgaagcgttgaagatccttgccggcacgaacgtggacatcatgctgctcgaccgtgatctgccggtattgtccggtgacgcggtgatggccaccgtcgccgcgaaccgcattcccgtggccgtaatcatgctgacggccgccgccgaggtcagcgaccgcgtgagcgggctggacctaggggccgacgattacctgaccaaaccgttcgcatatcccgaactgctggcccgtatccgcgccctgcaacggcgcagcgggaccagcaacgcgaccgcagccgtgctcacgcgcggcgacatcaccctcgattccacacgccggctcgtgttccgcgaccacgggcgcacgctcgtcaaactcacacccaaggagtacggcatattgctggagctcatgcgtgcggaaggcggatacgtgaccgcgcacgaactctacgatgcggtttgggatgagccgaccgccgccgacccgaccgacgtgatcaaaaccaccatctattcgctacggcgcaaactcaccgatcgcgaggccatcgtctcgacacgcggggaaggataccggctgcaatgaaggcgacgaacacggcgaaagcatcaggtcgtatacaggcgcttgccggcaaactgcggcccaaatcattccgcgccaaactgacgttggccatcagtctcgtgttcctcatcgccatgggatcggcgaccctcgtgcagaccattgtggtcaacagcatgttcacgtacgccacgacggtcaccgccaaaaaccctgagatgcaggtcgaaagccagcacagcggttccggcaccggcaaacgcccggattccgacccgcgaatgttttcccggggaagcggcacaggtctgaacgatatcactggaacatccagcgtcggcggcgatatgggcgacggtgactatcaggtggaatggggcaaggacgggtcgtataccatcaacaccccgtatggcgtctccgtgtggaaccaggacaacatcgccaccggattgcgcatcagcgcggccatcatcttcgtgttcttcgggatcaccagcattctgatcatctggctggtcacctcgcgcatgtcccggcaactgacctccatcagcgcgcaggcggcggcattggacccggccaaacttgatacgcgcatcgacgtgaatgggccgccatctcgccgtaggccccagttccggcgtgcgggcagacgcgggaccgaggattgggatcatagcacggacagccgcacggacggtcgagctgccggccaatcctccgaagtcacgcagctcggtgacgccatcaacggcatgctcgaccggattcaggccgcatccgaagcggagcggcggttcgtgtccaatgcctcgcacgagctgcgcacgccgattgccgcggtggagaccaatctggacgcgccgttggcccaggggcggttccccgaggatgtgcgaccgtcggtacagcgcgcactggatgccaatcggcgcggcgcgcaactggtgcaggcgctgctgaccttgtcccgtattcaaagcgggaccatcggcggcaagcaggcgggcgatgtgacacagatgagtcccgcatcaacggcacgcacatccacagatttgtacggatgcgtcggcaactcccttgcggatatcgacgatgccgccaccaagcgtcgcatcaccataaccgtgaacaaggccggcggcgacgcggacatgtttctcatcgccgccgacccggcgttgctggaactggcggtcggcaacctgctgcgcaatgccgtcgtgcacaacacggatgatgggtcgatcgacgtgaccgtcgtatcggatgaggatggaagcggaccccgtctgaccgtcacgaacaccacggatgagatgctgccggacgatctgaacgagctgacccaaccgttccatcgcggcgagaactcgcgtatcagcgccgtgcccggcgtggggctcggcctgtccatcgccagtgcggcatgcgaggcgatgggagccaggctggaactcggccaaccggccgaaggcgagttccgggcgagcattcggttttgatggaacactcaggctccccttcaaagaggggagctctattgtttcgcacgcaaaaatcacagacagactattgccttgcggaaaatcatcgttagattggcgagaggaatattgtcaatgcatacgaaacggaaaacatcgtgaccgcaccgaacatgcccgccgaaacctctgaccagctcaacaagcccgccaaatccggcaaactggaggtctccgacctcatcaccatcggcgtgtttgcggccctgtacttcgtgatggtgtgcatcgccacactggtgagcaccctgttcacc

SEQ ID NO: 2820 - DNA, 25526 bp, Unknown
  R36_18m  MAG No. k141_22572
atttcacgcgggccgggtacggcgacgccctggcccgtctcgtcgatcatctgcgcgccggcgacgcctacgtcgtcaacatggcgcagcgcctgcgcctggagacatccgggagcccctatgccatctaccgttatctgcgcacccacaacccggccccgttttccgcctatctgcgcgcaccgggtctcgacgtgtgctgttcgagcatggaacggttcatggagattcgctcggggcatgtggtgacgcggcccatcaaggggacccggccgcgcggcggcacgccggacgaggatcgggcgaaccgagaggaactcgcccgcagcgagaaggaccacagcgaactgctgatggtcgtggacctcgaacgcaacgacctgtcgatcgtctgcgaaccgggttccgtcggcacggaccccgactttgccatcgagacgtatccttccgtattccatctcgtcgcgaccgtcgaggggacgctgcgcaaggatcgttgcgccgtggacgcggttcgcgccgcgttccccaccggttcgatcaccggcgccccgaaggttcgcgccatgcagatcatcgacgagctcgaacgcgcgccccggggattgtacacgggcagcatcgggtatttctccgatacgggcgattgcgatttcaacgtcgtgatccgcaccatcgtgcgggagggaggcgagacgtcgctcggcgtgggcggaggcatcaccgtggaatccgatttcgacttcgagtacgacgagacgatgcagaaggcccgggcgctgcgtgaggccgcttccgttgacagggggagcgtcggcgagtacaatcacgggcaaaacgaataactatcttcagggcagggtgcgattccctaccggtggtacagcccacgagccgcaaggcatgatttggtgagattccaaagccgacagtacagtctggatgagagaagatgaaagtacgttcatgctttgtcgtacgccctgaaatgatgccatatcatttcagggcgttttcgtgttcgcatgaaccttcttttgtatgccttggatagcgtatgggcgcaacatgcttggaggcgtacatggacgatgcgcagtacatgggactcgcgatcgagctggcgaagcgaggggccggatacgtgaaccccaatcccatggtcggcgcggtgatcgtcaaggacgatcggatcatcgggcaggggtatcacgaggagttcggcggattgcacgccgagaggaacgcgttgcggcattgcacgcagtcgcccgccggggcgacgttgtacgtcacgcttgagccgtgctgccattacggcaaaacgccgccatgcacggaggcgatcgtggaaagcggcatcgcaagggtcgtcgtcggaaccttggactgcaatcccgtggtgtccggcaagggcgtgcgcatgctcgaagaccacggcatacgggtcgatgtgggggtgctggccgacgagtgccggcatctgatacgggtgttcagcaaatacatcaccacgcatacgccgtatgtcatcatgaaatacgccatgacgatggacgggaagatagcgacccataccaatcaatcacggtggatcagcggcgaggagtcgaggcgtcgggtccatcagctccgtcgatccgtcgcggcggtcatggtgggggtgaacacggtgatcgaggacgacccgttgctgacatgccgcatggcacacggaaggaacccggttcgcgtcgtctgcgatacgcgattgaggacgcccctcacctcgcggatcgtgcagacggcgaatgacgtcaggacctatatcgccaccgcctgcgatgacgaacgcaaggcggaggactaccggcggcacggctgcgaaatactcgccgtcggaaggaagggcgaccacgtcgatctggcggacgtggtgcggcgcctgggggatatgcagatggacagcgtgctgctggaaggcggtagcgcgatgaattggagcgccctcgaacagcggatcgtcgatgaggcgcacgtgtacatcgcgccgaagatattcggcggcaccgcgaaaagcccggtgggcggccaaggagtcgccctgccttccgacgccgtcatgctccggccccgcgcctgctcccgggtgggagaggattatctggtggaaagcgaggtggtgtattcatgttcacgggaatagtggaggaagtcggaacggtggcggacatacggaggagcgccgccaactgcacgctgtcggtcgatgccacgaacgtgatggaggacctccatatcggcgacagcatggcggtgaacggcatctgtctgacggtcgtcgatttcgaccggcgacgcttcaccgtcgacgtgatgaatgagacgtggcgcagaacctcgcttggcgtattgcgccgcgggaacggcgtcaacctggaacgggccctgccggtgaacggaaggttcggtggccatatcgtcaccgggcacatcgacggcacgggcagcatatcctccgtgcggcgcgaaggcaatgccgtgtggtaccggatcgcggcgcgaaacgagatactcgaaggcatcgtcgagaaaggctcaatcgccgtcgacggcatcagcctgacggtcgcggagatcacggaaagggacttctcggtatcgatcatcccgcacaccttggcgcagacggtgctgggcgagaaacgggtcggcggcgtggtcaatctcgaaaacgacgtattgggaaaatacgtgcggaacatgatgacgacccggacgggactgacgcaggatctgctgtcccggtgcgggttctgagaaaggatgcatgaatcatgaaccatcagtcggtgcaagcggcgttgcaggcgctgcgggaagggaagctcgttctggtcatcgatgacgaggaccgggagaacgagggggatctcatctgtgccgcgcagtcggccaccacatggaacgtcaatttcatggcaacccacgccaagggattgatctgcatgcccatgagcgagcaactggcccacaagctgatgcttccgcccatggtcgagcacaacaccgataaccatgaaaccgcttttacggtgtccatcgattaccgtggcaccacgaccggcatctccgccgaagaacggggattgacggctcgcatgtgcgtctccgatgacgtggaacccctcgatttccgcagaccggggcatatgttccccctggtggcgaagaagggcggcgtcctggaacggaacgggcacacggaggcgaccgtcgacctcatgcggttggcgggattgcgtgaatgcggcctgtgctgcgagatcatggacgacgatggccggatgatgaggacccccgacctgacccggttcgcccaggagcatcagatcccgctcctgaccatcaaggaactgcaggaatacaggaaagcgcacgatacgctcgtcgaatgtgtctcgaccgtggcgatgcccacgcgatacggggaattcacggcgcactgctatgtgaacaggttgaacggcgagcatcatgtcgcgctggtcatggggaatctgggcgatgggaccgatgtgttgtgccgggtgcattcggaatgtctgaccggtgacgtcttcggctcgttgcgttgcgattgcggtcagcagttggacgcggcgatgcggacgatcgcggagcatggctcgggcgtgctgctgtacatgcgtcaggaagggcggggcatcggtctggtcaacaagctgaaggcctaccgtctgcaggacgagggcatggacacgctcgacgccaatctcgcgttgggattccccggtgacgcgagggagtactacatcggagcgcagattctcagggatttggggatacggtccatgctcctgctgaccaacaatcccgacaaagtgtatcaattggaagactatggaatggagatccgcgacagaataccaatcgaaatcgaagccaatgcttacgacagtttctatctcaaaaccaagaaaaaccgcatgggacatatcctgaacatggaggaggaataaatgcacacgttcgaaggcgatctggtagccgaaaacatcacgataggcatcgttgtggcgaggttcaacgagttcatcacctcaaaactgctggcaggggcgctggacaccctgaaaagggagaatgtccgcgaacaggacatagcggtggcctgggtgccgggcgcctttgagatacccctgatcgcgtcgaagatggccaagagcaagcgctacgatgcgatcatctgcctgggcgcggtcattcggggcagcaccagccactacgattacgtgtgcaacgaggtctcgaagggaatcgcgcagaccagcctcgacaccggtgtgccggtgctgttcggcgtgctgacgacggattccatcgaacaggcgatcgaacgggccggcaccaaagcggggaacaagggttccgagtgcgcgcagggcgcgatcgaaatggtgaatctgatccgctccatggacctctgacggcgaaccacccggctgcgggcgggggtcttccagacgttcccgcccgcttcgcgccacacggccaaggcccgatcgatcgccgcgcccgctaccgcagggtgagcgttgcggccaaagccagatggtcggtgtccggcacttcgaaggacgtcacgccggacggtctgagcccttgggtgaacagaatatggtccagttcgatgcgcggccacttgagccagcgcgggaaggtgaggttcggtccggcggcttgaatcagactcgcgtccttgaatccggacttgagcaacgcgcggaagctcgggtggtcggtgctcgagttgagatcgcccataacgacgacgatgttgcgattgctgacggattttgcacgggcgagttctcgcagacccagaatgccggccgaccaatccgcgcagccgcgcatcggcgatttcgggtgagccgaacaaagcgtcaccgtgcgagtaccggaggttttgagggtgatggcgggaacgtcggcggcagggatggagaccacgttgggcaccgctgcgctcggctcgtagcgggaatagatcacgttgaatccgccattatcggtctctttggcgtctccgaactgatggtaggggaggagttcgttgatgtcggcttcggtaagacgtgtgatgaggtcgtcggtgacttcctgcaaggccaatacgctgatattgcgttcgcgaatattgcgaatgatttcagcggcgtcggcgcgtccgtatcgacaattcatcgtcataaccgagaactggggcgagagtgtttcacgcgttgtttcacggtgcccatcggggactgtttcgggtccttccttcggagtgtttgaggtgctcgatgtattgctgttatggctttttgacagcgtcggcgaagttgtttcacgggctgtttcacggtgggattctctgcgtttgccggctgggtcgattgacgtaccccagtagttgatgcgctgtgagctggcaatcagcgcgaccacaataagcgacgacatcgcagtccattcatgttgccatgcggcgaccgcggccagaatcatcaaaggaacccacagcagcggagtcagggcaatcatgtacggaagcggcatacgggcctcgagaccggcgggcagcgcgcttaaggccgtccataacagtgcgatgattgccaccgcgctgaagattgtcgtcatggaagttcctttcgaaatataaattgaaccgagatataacttggctcccctctgcgaggggagccaagttgtgagatcagcggccgaacagtccgccaaggcctccgccgaggttcggcggcagttcagtgccaccatcgacgttgcccatcatctgttcaaggccggcgggcaggggcgggttctgcggcttcttggcgaaggcggaaccgccggtcgaaccggaggacttgccggccagcttatcgcgaaatgccttctcctcggcctcgcgcttcatcggattgccggatttgccgcctttcttcttgttcttgcccttcttcttgccgccgcccatagccgggccgccgaagccggggatgccgccgcccatgccgccacgattggacatgcgcttcatcatcttcgcggcctgctcgaaacgctgcagcaaagcgttcacctgagaaaccgtcacgccggaaccataggcgatacgggcgcggcgggaaccattgataatcgacggatcgcggcgctcggccggggtcatcgagcgaatgatcgcctcggtgcggtcgatttccttctcatcgaactgctcgagttccttgcggtgctgggccatgcccggaatcatgccgagcagcgacttcatcgagcccagcttgcgtacctgctgcagctgatcgaggaagtcgtccaggccgaaggagccttcggagattttctcggcggccttgcgggcctcttcctcatcgaactgcttctgcgcctgctcgatgagcgtcatgatgtcgcccatgtcgaggatacgcgaggccatgcggtccgggtggaagacctcgaagtccttcaggccctcaccgttggaggcgaacaggatcggcttgccggtcacggacgccacggacagcgcggcaccaccgcgggcgtcgccatcgagcttggagagcaccacgccggtgaagtccacgccttcgtcaaaggccttggcggtcttgacggcgtcctggccgatcatcgcgtcgatgacgaacaggatttcgttggggtgcacggcatcgcgaatgtcgcgggcctgcttcatcagctcctcgtccacgcccagacgaccggcggtatcgatgatcaccgtgtcgtagagcttctgcttggcgagttcgatggaatcgcgggccaccttcaccgggtcgccggaggtctggcccggagctgcgacggcctcgccgccatcggattggacgcccttttcgggagcatagacgggcacgccggcgcgttcgccgaccacctgcagctgcgtcaccgcgttcggacgctgcaaatcggccgccaccagcagcggcgtgtggccggaatccttgagccagtagccgagcttgccggccagcgtggtcttaccggcaccctgaaggccggcgagcatgatgatcgtcggcgggttcttcgcgaagttcagcggacgatcgaccccttggccgagcacgtcggtgagctcctcgttgacgatcttcaccacctgttgggcggggttgagcgcgtcggacacctcggtgcccagtgcacgctcacgcaccttgccggtgaaggaacgcaccacgtcgagcgccacgtcggcgtcgagcagcgcgcggcggatttcacggatcgtgccgtcgatatccgcctcggaaagcttgcccttgctcttcagatgcttgaacgcattcgagagtctgtctgtcaaagatgaaaaagctgccataatgggcaacagtctagccgccacgcgggaaattgcggtgttggggacgactctttccggggaatgcgtcgcgtagtagtcagggatgttgggcattcagacggcaaatgccgtgccgtccgctcgtggcgaagccaatcgagtgcttccgataccatggaaaccgtaaagaatcctgtgttttttggaatgcttacgctgttttgaaaatcgctggacaccgcttatacgcagactgccgtgcgctccgaaccatgacgttcgggccaacgcagacatgccgtgcaataaggaaggcccactgatgcccacccaaaaactactcgaacgcaaagccctgatcgttggcatcgtcatcaacgtgctgcaggtcttagccggcgtggccgtgttcttcatgaccggcctcaaggccatgttcctcgacttctccttcaccgcgatttccgtcctgtccggaatggtggcggtgtacctctcgtcgcgcacggtgcgaaccaccgagcgcttccccaatggcatgttcgcactggaacccatctacgcgatctgcaaggccattttcaccatgtcgttgttggtgtattcgctgattgacgtgtgccgagtagcgtacgactacttcgtgttcgggtccggcgaacgcattgaaaccggcccggtggtcatctacgagatcctgaccgtaatagtgtgcttcagcctatacatgtattaccggcgctccaaccgctccatcggcgattccagcaccatgctcaccgccgagtgcaagagcacgttggtcgacggatcaatgtcgttcggcatcggcgtggttgccatcttcctgatgctgctaccggccggcggtccgcttgacttcctgcactacaccggcgatttcttcatcaccgtggctttggtggcattgaccatcaaggaaccgttcagcgtgctcaaagaggcgttcgtggaattggtcggcggcgtgcatgacgacgatgagaccaacgcctacgtggaggccgaggcacagcgccatctgcctgccaacaccgactacgagcagacgctgatcttcaagaccggcatgaactacaccgttgacgtgtatctgagcggcatcggcgaaaccattgatgtagccgacctcatcgaatgcaagcgctcgctggagaaggagctcatcaagcgcctgcacatcgtggacgtggacttcgtgtttgactgattgatgggtttgaagcggctacttcaggctccaagtggaaccctgcgggccgtcttcgatggcgatgccggcctcggtcagggcgtcgcgaatctggtcggccttggcgaagtccttggccttgcgggcctcggcgcgggcgttgagctgctcggcaatcagtgcctccagcgccgcatgttcgggcgactcggccgtgccatcagcggcaccgccagcagacacccacggctcggccagcgggtcgagacccaaggtgtcgagcatggcacgcacggcgagcagcgcctcacgcacctcggccttggcggtttcggaatcggcgcggtcagccagctgtgaaagcaacgtattgccggaacggatggcggtgaagatcgcggcggttgcaccagacacattgacgtcgtcattcatggcggccacgaaatcggcgggcaggtcgtcggcggagacggcagcaacctcctcgcgagaaggctgaccgcctagtgccacaccggcgcgctcgatgaagttcgagatacggtcgtatgcggcctgcgcctcgaccagcgcctgatcggaccattcgagcatcgaccggtactgcacggagcccaaagcgtaacgcaccacccaagcggaatgctcggccagcacgctcggcacggacaggccggtgcccagcgacttcgacatcttctcgcccttggcggtcacccatgccgaatgcatccagcgcgcagcagaggggtagccggccgcgcaggtctgcgccatctcgttttcgtggtgggggaagcgcagatccaaaccgccgccgtgaatgtcgaagccatcgcccaggtaacggtgggacatggcggagcattcgatgtgccagccagggcgacccacgccgaacggcgtcgaccaacgggcgtcctcgggatcggtgtccttgggggccttccacagggcgaaatcacgcgggtcgtgcttgtcgggggaggcgtcggccgggtcgaccggattgtacttgtcggcaccggtggcgtccacggacgggcccatgcggtcggccacggcagcggcctcatcgacttcggaagtctgcttctggtgggtgagttcgccgtaatgcggccaggatgccacatcgaagtacacgttgccggtgggcttgccgtccgcatccgtgaccacatagccgtggccgttgtcgagaatgcgctgaatcaggtcgatcatgtccgacatgtggccggtggcgcgaggttccacggtgggcggcagcacgccgagcgtgttgtacgcctcggtgaattcgcgctcgtaataataggcgcgggcccaccaacgctggccggcggccgcggccttatcgaggatcttgtcgtcgatatcggtcacattacgcacaaaagtgactttgtagccgagcttcaaaaaccagcggcgcacgatgtcgaacgccacggcggcacggatatggccgatatgcggtgacgactgcacggtggcgccacacacataaatgccgacttcgcccggcttgagcggcacgaaatggctgacctggtgcgaggcggtgtcatacagattcaggccttctgcggccttggcaacatgcaccggcgtcaggcttgaaggcatgacggaaatgttgaaatcctgcggttcttggctgtttcccataacgctcaagcgtagggtccgaaccagacatgctgaatcgttactcgaagagtttgatgaacgcttcacaggcggggcccgaacgaggtgacagacggatgtgaagcgggacaacagtctcgcgagaatacgtctttgaccgctgcggaaactgcgagattcatggatttgccctgctcgttacgcaaacggggaacgctcgtgccacaatagaagtcatggccacaccacaagtgctcattttgcaacatgtcccatgggaacgcccgggacgcatattgtcgaacctcgaagacatcggtcttgagacggtgacgatgaatatcgtcgacaaaaagaaaccggacttgcctgatttcggcgaactggctggcgtggtaatcatgggtgggcctatgggcgcgcttgattacgacaagtatccggggctgaaggcggaagccaagttggcgcgtgccgccgtggcttcaggcaagccgattctcggtgtatgcctggggcatcagattatcgccactgcgcttggtgcgcagctgcgcaagggcgatgcgccggagattgggttcgcgccgatcaagcgtgtggacaagcatgacttcttctccatgtgggataagcagctgacggtgctgcactggcataacgacgtggtgggcttgcccgagggaggccagctgctggcacgttcgtcttccaccaaggtgcaggcattccgactgggatccgcgctgggcatgcagttccatcttgaggtgtgcggctcgctgctggacgaatggctggatgagccgagcatggtcaaggatctcaaggccgcgggtgggtccaagtcccaattgcgcgagcagttcgcccaatacgatcagctactgcatccgctcgccgagcaagtgttctccggttttgcggcccgctgcaactcctacgctcagacgctgggcaaataacctataaccagaaaaagtaatgcaccgcgttcatgacgcggtgcattacttttatcgacagtccttacaccatgactggttacggatagtatcattccccatatttcggtaaccgaaatcacttagtggtttttcttttccgcaatgagggcacatgcgcgtaggctcactgccgttgtatccttgagtctgaattacagggcgtttatcattaaccatgatcaagcctccttttgatgctgatactatgacttagtatatatcgtacaatgaattattcaaattcctcagtagtatcgggaagcgtgactatccatcgtagccagccagagacgctggaagctctacgatatagagtagttgcatctttacaaacattatagcgcctcatcctatcaattatagcttcgcgagaggggaactccccagtgtcgatgatttgcgaaagaagatcgtgaaaaatgttatgtctgacgattaacttaatgagctctaatctgcgttcgcgaagtttcaagcgcattaatttgatgcctgtcaaggaaagttgtgaatgacctcgcaacggtctctcgattactccgagatattctcctgccgatgaataatatgatgcttgacgaatgtcaaattccatagatgatgcaatttcagcagaagtcatattgggtactttatctaattgttctattagggaaatcaaccgtgtgaataaatctgcttgaataaatggtatcgatgtatcgtcgtaattgtcgtctatttctggtgaattcgaatcgataattctttgtatgtcgtcccatgaaattgcagaagactgaaaagaataatttctctgttgaattagatgaattgacgaataatcatcctctttagcaaattcatattcatataagtgatatattgaatcgatatactgcgaaaagaccaaacggattggtttccttacgcgttcacaccacaatcgatatggaaaatacaattgccttatgtgaaaatctggatgaggtacattctttgcctccataataattatggaatcatcgttttcaaatcctccgtcgatctccagttgagcgctctggacatccacctgccgcttgccgccgttggtgagattgacagtaaatgagaaatcattagttcccattcgaccattgaaagtttccactgtattatttgtgcctaagaagtcatcaagtataccagtgatgagcattgcattgatcgcattggattcagtggacagattgttgaaatcaatagattccagtggtaagggagggacgtactttactgtatttatatcattttccgggaatggctgatacagcttgaaattggaaagcacgtaagcagaacgggagactggtaatatattgatatcagatttctttaatatcgtaggaagactttcgctcgagtcccattttgccataagtcgtggctctcgatatttcttaatatccttagcctgtatgatgaattccccatgttgttttattgcattatctatttgatattcctgtatcagctcggtccaagctttattggctttatcttccatcgattagtacttccttaattgctcctcgtcggtcggctctagaattaatcgaacgattcgctgatacagagatgattttgtaatctttatatagctctctgatttcttcacaatccgaatttgattcgaggaatttgattccctgcgacgcaagcttgtcgcagttattttttagacgcaattgctcgttgtaatcgaatcctccctctgtataaccggtaaaggatgcagaggatgatatgggcatatatggagggtctaaatatacaaacgaatccttatcaagattttgcagggctaattcgtaatcgccacataatatctttatatttccggacagatattttgctaatgctcgtatggctggtctattttctattgctgggttattgtagcgaccatatggagaattgaattgtccagcagaattgaccctgtataagccgttaaaacatgttttattcaaatagataattcttgcggcgcgttgcactgggcttctttctttaaaatttggttcgcgatcttgtgctcttatagaataaaaataatctgaactatttttttcagcatggctatgaaggagatcaagcaattcatcagtgtgatctcgtacgcattcgtacacatttattaattcactgttgtaatcgttgatgatagcattctctggttgttttgccaggagaacagctccaccgcctacgaagggctctacatatgttgaggattctggtattagaggcaaaatctgatctaaaagttgtcttttacctccaacccatttgagaacgggttttaggagtatttttttagccatgatattctcctcttttgccgatctttctattatagtaggttgttgggacatattcttgggagtcctatggcctgtggtggcgctacattggtgagtcatgccgacttatgacattggactggaacacgtttcgctcgctttcgccaccaaaaccatcttcactgatgtgacgcagggtgttttcgagggcgaccgcatcggcatcgtcggcaagaacggcgacggcaaatccacgttgctgcacctgttccgcggcacccaggagccggattccggccgcgtgacgaagcgcggcggactcacgttcggcatgcttgaccagcgcgatccgctcgacgacaacgccaccattcgcgaagccgcacttgaggggcgcgccgactacgaatgggcgtccgataacacttcccgtgaaatcgtcgaggcattgctcggcggcatgagcctggatgccaaggtcggctccttgtccggcggccagcgtcgccgcgccgatttggcccgactgctgctcaaggattgggatattcttgcacttgacgagcccaccaaccatctcgacgtggtcactatccactggcttgccgaacatttgaagaaccgctggtccaaaggccagggcgctctgttgctcgtgacccacgatcgctggttcttggacgaggtctgcgaatcgatgtgggaagtccacgatggcgtgatcgagccgttcgagggcgggtattccgcatatatgctgcagcgcgtcgaacgcgaccgccaggctgatgtgcgtgaaacgaagcgccgcaatctggcccgcaaggagctcgcatggctttcgcgcggtgcccgtgcccgttccaccaagcagaagttccacgtcaaggccgcacgcgaattgattgccgatgtgccgccgatgcgtaacacacttgaactgaagcaaatggccacctcccgtctcggcaaacaggtggtcgatttggtcgacgtgacgcagattttcgaaaaaccgcagggcatggccgatatcgacccggatgtggcggcgctctccgcgtccgcttcccgcgtggatgtggtcaacgccatgtacgccgagccgcagctgcacggttccgttgaggtggcggtcaccgacatgactgacctgcgcctggtggacgccggcgtgccggaagccgtcgaggccgctgaggaagcgcgtaagaaggccgaggctgagagcggcaatccgcagcttgctgacgatcgcgaggttcgtcgcatgaacacgggtggtgaaaccatcggcggtgacactgctgcaacgaattcggatgatggcactgctgcagccggtgtcacctcggctgcacgcaaggtgacggtttccggccgcgagattcttgacgatgtgacttggctgattggccccggcgatcgtttcggcatcgtcggtgcgaacggtgccggcaagtccacattgctgaagttgattgacggttcgatcactccgaccgtgggccatgtgaacatcggcaaaaccgtgaagttcgccgtactctcgcagcgtcttgatgagctggagaaactgggccagtacaagatcaaggaagtgctttcccgctataagccgagctacattgtggatggcaaggaagtaacgccgggacagttgatggagcgtctcggctttgaatccgcccagttgatgacgccgattcgcgacctctccggcggacagaagcgccgcatgcagttgctgctcatcctgctcgacgagccgaacgtgctcatcatggacgagcccggcaacgatctggacactgatatgctcgccgtcatggaggatttgctcgatacttggccgggtacgttgatcgtcgtatcccacgaccggtacctgctggagcgcgtcaccgatcagcagttcgcgctgattggcggcaaggtacgccatctgcccggtggtgtgcaggattacctcgatatggttgaggctattaagaacggcaagggattgccggctgacacgcctggcttcgcgggcaccggtagcagctcggcgaagtctggtaggggtaaggcggccgccgtcaatgttgctgcatctctccctcagtccacttcgcggacagctccctcgtcagagggagccaataacggtgaggactccacctcgaagctcaccggcaaggccttccacgaggcatccaagcgcgtgaatgccatcgagcgcaagcttgccaaactggaagagcggaagaccgaacttgaggcacagatggccgcccatgacccgagcgactacgagggtctcaacaagctcaatgaacaactcaccgccgtcaatactgaaagcgataatctcgaagccgaatggctcgaactctccgaacaattggagtagcgggagaaaccgtaacgttcacaaggcctcggtagtttgccggggcctaccgctatgcaaactcccacggattaatcaattccacgtcggtaccttcgaagtccttgatattgcgcgtggctatggccgcatcccaggaacaggcaattgccgcaatcatggcgtcttgaatactggtaggtgtgcccctgcgttcgcgttcgacaaggatatgggcataatccgcagctgcctgggtgtcaaatgcgaacgtcctgtcctctaatgtcataagcgccagcttgacggtcgtatctgtgtactttcgtcgtttgccttcaggcatgcgacatattccgaccaacaactcggcgacggtgatggcggtggttgccagattgcttgtatcttggttcctcagccaattggcaacgtgttcgtctggctgtttcttgatgatttcgctgatgacgttggtgtccagaataatcatggccgattcctattcaaaagatactggcggtcgggaatcggcggaatttcgctcggatagtgggagttcccccttgtcgagtccctcaaaatccatgttcttcatgaattcgcggatctcgtcatagaaattggtctttcgcgtgatttcatgcgccaccgtgccagccagccattcttcaagaatggatcgcacctgagattccatggagcggttgtttttctcagccacttctttgagctgttgaatctgctcatcgggtatttttcggatggtcaatgttgccatgatgcacctccttgttgctgtcataatgctagcataaggtgctgtcattttgcttgcagcacgggtgatgaggtatgcacacatgaaaaaggcggatatgcatcatgcacatccgccctttgagcttggactgggtctccccgcagtcgccgaatcagcgcccggtaacctcggaaccgacgaccttttcgctcagggcgcgcgggccgcgggtcacggctacggcaccggagcgcaccagctcaatcacaccgtaatgctccaaaagccccagcagcgcatcgatcttaccttcggcaccggtggcctcaatggtcagcgattccggattcacgtccaccacacgcacgcggaagaggcgcacgatctccagcacgtcggaacggttggattcgtcggcggccaccttgatgagcaccagttcgcgttccacggtggagttcgggtcgagctccacgatcttcagcacgtgcagcagcttgttgagctgcttgatgatctgctccagtggcacggcctccacgtcggcggtcaccgtgacgcgtgagatgtccggacgctcggtgggggagacggacagtgagttgatgttgaacgcacgacgggcgaacaggccggcgatacgcgccagcacgcctgggcggttctccaccagcacggacagcgtatgacgctgggaaccaggctgggatgcaggatagttagccatgagtgttctcctctcctcagtgctcgctcgccgcggcagcggcggtctcgtgctcgaacacgccggtcgcatgctcgtccggaccggttcccggagccggggtgccgccggtcagcggcttgatgccgggcttgtacgtcacctcgtcgttggaagcgccggcggctaccatcggccacaccatcgcatccttccacacgcggaaatcaatcagtaccgggcggtcgttgatctggttcgccttttcgatggcggcaatcgcctcttcctcggtgaacgcgcggatacccacgcagccgtatgcctcggccaacttgatgaaatcaggcacttcgagcggcgcatcgccgtcgaccagtgccgccgcaccatcggcaccgtgcgcctcgccatcgagcaggttggtctgcgagtagtggtgctcgtagaacagcgtctgccactgacggaccatgccgtacacggagttgttcagaatcgcgatcttcaccggagcgtggtccaggaacgcggcggccagctcctcagaggtcatctggaaggaaccgtcaccgtcgatcagccacaccggcttcttgccctcgaactcgcgggccgagcccacggatgcgccgatggcggctggcagaccgtagcccatcgtgccgaggcctccggaggagatccaagcgtgctggttctcgaaatcgatgaactgcgaagcccacatctggtgctgtcccacaccggtcacccagatggtggacggatcggccatctcagagagctttttgatgacccactgcggggccattgatccgtcggtcggctcatcccacgtcatcgggtattcctcgcgccagccgtcgatcgccttccaccagggggccagattcggcttgccctgaatggcctgcgtgcgctggatttcgggaatcaagtcgtcgagcacggtagccgcatcgcccacgatcggcacgtcgggctgacggttcttgccgatttcagccgggtcgatgtcaatatgaatcacgcgggcggtcggtgcgaaggcgtcgagcttgccggtcacgcggtcgtcgaaacgtgcaccgatggccacaagcaggtcagcgcgctgcacggcaccggttgcggcaatcgtaccgtgcatgcccagcatgccgaggttcttcgggtcggagtcgggaatgatgccgcgtgcgggcagggtcgtgaccacgggggcgccggtcaggtcggccagagccttgacctgtgcgccggcgttggagcgggcggcgccgccacccacatacagcaccgggcggtacgactgagagaacagcttcgccgcgtcggacagcacacggccgtgcgccttggtggtggggttgtagccgggcagaatcatgcgctgcggccatgaatagtacatgtcgccggtctgtgcggtcttggtcagatccacgaccaccgggccggggcggccggtgttggcgatgtagtacgcctcggaaagcacgcgaggaatgtcctgcgcgcgggtcacgaggaaggagtgcttggacaccgggtaggtgatgcccacgatatccgcctcctggaaggcatcagtgccgatggcttgcacgcccacctgaccggtaatcacgaccatgggcacggagtccatgttcgcgtccgcaatggccgtgaccacgtttgtggcacccgggccggaagtcacgatgcacacgcccaccttgccagtggccagtgcgtagccttcggcggcgtggccggcggcctgctcgtggcgcataagcacgaagcggaacttcgtgttgtctttgatctcgtggtagacgggcagaatcgcgccgccaggaatgccgaagacgtcctcgacgccgagatcctccagcgaacgcaccagcgcttgggcgccagtcatcttctcgccatcgacgatggtctgcttatcgggggccgcgttgattttcggcacgccgctgaatgcctgcaaaggcgtgggtaaagccatgattcctctcacctcatagattttgccgcgaacctgcccgaccttgggatggggccgggtgcccgcgtgtctgattccagtcgcttctccgagacttgtggccccggcacgactcgtcgctcatgttggtatcagtctattcgcaaatctgacagcgggcttacttagtccgcgtcttgaacgagtccagtgacttccagcccgcttcggcggccgccagctgcgccttacgcttgctggagcccttaccgatgccgatgatgtcgccgttctcgcccaatgagacgcgcgcggtgaagatctgcgcgtactccgggccggagacctccatatggtagaccggctcatccttgccgaggccgtgcgccttgacggtcagcgaggtcttccagtcaagtgccgggccctcggtggccacttcggcgagcgtgtcgtcaataagccggtgaatcaccttgcgtgcctcgtcgatgccgtgttccaggaaggtcgcgccgatgagcgattccacgatgtcgcacagaatggagttcttctccgcgccgccctgctcggtttccccgtgacccagcagaatgtaggggcccaccttgagcttggttttggcgatggcgctcagcgcgtcttcggagacggccttggcgcgcatcttggccagttgcccctcggtcatatccgggtgaatggtgaacagcgtttcagtggagaccagttcgagcaccgcgtctcccaggaattcgaggcgttcgtaattggccacgccggggtgctcatgcgagaaggagcggtgggtgagtgcctgcacgagcagatccgggctgagagtggtgcccaacgcttcaagaagctcgttggccggcgtcggctgctgtggggtttcattgctcatgattgttgtatggtccttcacgcgatggtgatgtgttgtgtgttgtgttgtgttgtttgcgatgcgatggtgtacgtaatggtgcacttatgcgaagaccccgccacccgtcgatggcagggccttcattcaagccgttatcgcaggactcacttggtgtgagccggctggatggcggagcggtaggtgcggccgcggtagttaccgcagctcgggcaagccatgtgcggcagggccggagcgccacagttcgggcagttcacggtcgcagcagcggtggccttccagttcgcgcgacgcgagtgcgtgttggcgcgcgaggtcttgtacttaggcagtgccatttgagtatcctctatttcgttcgaacaattgagcttaagcgtccgttatcttaacgcatagctcgtacaaactccgttcaggcgcgcgtcactcggcctgctcgccgttctgctcggcctcgagctgggctttgagccccgccaatccggcaaaacggatatccgtcacatcgtgatgatggtcgggatcctcgttcagatcggcaccgcactgcgagcacaggcccttgcaatccggtcggcacagtggctgcaacggcagcgattcgaccagcgtgtcgcggatcatcgcctcgatgtccgcgaatgcgccgttctcccgcagcggatacgtgtcttccgactcgtcctcgccggcgatgatgtcgatctcgtcgtccttcttgttcttgccgcccttgccgttggccttgtcctgacccgactcatacgggaagaacaccgtcacatcaaccggccagtcctcgtcaatcggcttcaggcagcgcgtgcactcgctgacgaatggcgcgaccaggcggccggtgaagatcaggccgtccacaatcgaatcgaactgcccgctcacgtgtacgggctcaccttccttgatgccgacaatgctgtcaccaatgccggaaggtgccgggaaatcggcgtcaatcggcttggattgaccggcgcgcgaagcaatctgcgctaccggaatggcccacggggaatcttcaactcgtgccatggtatgttcttggtgcctttcgtatgttggctggagttattcgttactggcgttattcgcgttactgatgttgccggcgttgctggcgttactgggcttcgggatagtcgttcagcgtcaggtgcggcatctgttcgcgggccgcgcgctggcgctcttccagcacgttaagaccggcctgcacatcccgactgagtttgccgagctgctgggacagccctttcatcaccgtagtgcagtactggtccgcgccttgggtcagatggtcggctctggtctgtgcctggtcaagaatcgcgcgcgctttctgccgtgcaagctcggtgacgttctcttggccggccaggaactgtgcctgttcgttggcgtccctgatcatgttggctgcgcggctttgtgcggaggcgacgatggcgttggactgggtctgtgccgattccagacggcgctcggcctcgcgcatgagggcggaggcgcgctccaactgcaccggcagcattttcttcaactcggaaagctggtcggtgaattcgtcgcggtcaaccttcaccatgccgggggcgaatatgctggacttcgcttcgcccagtgccgcctcgagctggtcgatgatgtcatacaccgtggtgaattcctcgcggctcttgaccgtggccgggtcgtcgtccgtggtttctcgcaggtcgggcatttcgttcatgaacgaggggcgagtgccggcggcctgagcggtctgagcttgtgcccgggtctgctgagctgcttgggcctgcgctttggcctgcatctgtgccggagtaggggtaggcgcggcgggcggcgatccggcgagaacatcggcctcttcggtgggtgccggcgcggcttgcgtagacgcggtcggttccggggcggacggctccggagtggacgatgcggcgtccgcattcggtttggtcagatcgacgtatccagtggggtggtcatcgctcatagtcattagtgcatcagtccttccgctgacgttcctcggccagggcatcggccagcatcggcacgacacaatcgggcaccatgccggtcacgtcgcctccatggcgggccacgtccttgacgatggaactggagatgtgttcaagaatcggatcggccggcaaaaacagggtttcgatgccggcgagcttgcgattgaccagcgccatgccgagctcggcttcatagtcgccgttctggcgcagacccttgacgataacggtggcgccgaccttcttgcagtagtcggtgatcaggccgtcggtggaagaaacagtgacgttcttgcaaccggctttgtcaagggcacggcggatcacgtcgactctggtggcttcggaaaacatcggtgttttcgcggcattgacggccaccaccacgtgtacctcgtcaaagaatcgtgccgagcgctcgattacatccaagtgtccggcggtaacggggtcatacgagccggggcatactgcgatagtcatgccttatagcctaccgcgaatggtgtgcttcgtgctgccgagcgtgcattgttgtcgcgtcggcgtatgaggcagtgtgtgcggtgccgtatgtggcgtcggtgcggcgttgtgtgcggcattgttatgtggcattgtatgtggcggggtggcgtgatgcgcgacatgggtgtgtggaggtgtgcggattacgcgccaatgggtttcgcgggtaacgacgggaatctatgatggagtgcagtcgaatcgttgaatacgaggaaagaagtgcaccatgacttttgccgagatgttcgttgatgatgccgaaccgctgcgcaacccggaccaaggtgccggcacgtcggtgctggaacgcccggaaaccaaggagtctccggttcgtgacgatggcggcgacgcggatcgattcgcacattatgtttctaaggaccgtatcgccgaatcacgcgcgaccggtcgcccggtggtcgccctgtgcggcaaggtctgggtgcccaagcacgatccgtccaagtacccggtttgccccgattgcaagcgcatctacgaagaaatgacgcgctaaaggtggtacttggctcccctcagcgagggaagccaaaatggtcaccgagccgaaatctcgtcgatcagcttgagctcctcgtcgctgaagtgggtgttcttcagcgcgccgatgttgtcgagaatctgctgcggcttggaggctccggtcagcacggaggtcaccttgccgtcgtgcagcagccatgccaggctcatctcggccagcgtctggccgcgttcggcggccagattgttcaggtccacaacctgcttgtgcagtttctcggtcagagcggaatcgttgaggaatcgcggatcgtgagccatgcggctgtcggccggaatgccgttgagatagcggttggtcagcaggccctgtgccagcgggcagaaggtgatgaggcccttgcccagcttgaaggcggtctccttcagaccgttctcctcgacggtgcggtcgaggatgttgtatttgttctggttgatgatgaacggcacgtgcaggtcggcgagaatcgcggcggccttctccatcgtcggaccatcgtagttggacagacccacgtacagggccttgccggagttcacggcctgagccagcgcgcccatcgtctcctcaagcggggtttccgggtccgggtggtgatggtagaagatgtccacataatccaggcccaggcgttcgagcgactggtcgaggctggcgagcaggtacttgcggctgccgaggtcgccataggggccggcccacatttcgtagccggccttggtggagatgacgagttcgtcgcggtggtgcctgaagtacttggcgagcagcaggccgcagttcttctcggcctggccgggttcggggccatagttgttggccagatcgaagtgggtgatgccgttgtcgaaggcggtgaagaccagggacttcatctggtcgaatggcgtgatgtcgccgaagttgtgccagaagccgagtgagacggccggcagcttgaggccggaggtgccggcgtggttgtaagtcatcgtgtcgtaacggtgcgggttgggggcatagatggcggttggctcgaacattaaatctccttacaatgtcatttttgttcttacgaatgcttacctgcgatgggcaaaccgacgccgattgagtggcattcgtaagtgttcttggatactatggttccagttcaagtgaacttgaatgcaaacggctgcgacgcttcggcgtgtcgccgcagtaaggagtcatggtgtcctacaccattcgtcaggtggccacgcagttccatatgcagccctctacgccggtgaagactggccggattggcgcgagtacaaaaaccgcgcctattccattgaatgctgaggccatcgagtgctgagctggatgccggctgggcactaagaccgatgtgcgtcgatcgtgggcgcgtctatccgagtaaggccttgctcggcagtgcgcggtcgagcagccagacaacgagcgatatcacgaagaacgctatggccagcttgccgcagctaatgccgaacccttgccagccgagtgcgtcgaggttgatgaagtcgtacggatacggactgccgccggccgccggtccggaccccggccaaatcgtcgcacgggccagcacgaagaccaagtatgcagggaagtacgccagccacgagaacatgtaatgccagcggaaacgccggtgcgggtcgaatagcacgaaatcgataaccgccataatcggggcgattttgtgcagcatcgtattggtcatgatgccaataacctgtggcacgtatgccgggtcgtccggaggcatcaggaagaacgccaccagtgcggtgactatggcgtacacagtcaggcatcccttaggccatgcaggcggctgaatgcctttgagcagtgtggccgcgccggcccacagcatcacgatgcccagcacgaaaccggtctggaacgtgaaatacacccagaactgcggtttggaccatgcctcatatgtgcccacgaagcagaaaccggcgatcgcaaagcgccacaacgccacgatgaatctcatgcatcgagtctaccgcttcgccagtgggc

SEQ ID NO: 2821 - DNA, 2884 bp, Unknown
  R36_18m  MAG No. k141_23318
atcggacgggtcgaaaatgtcggtgtggacgctgccgactatagtggtagccaagagaagcgatccgtttccgaggtgagattcgggaacggtccgactctcggcagtgattcatctacgcagacaagccaaaggagcctcgccatgattctcgtcaccaccaccccgtccgtcgacggatacaccatcaccaattaccagggcatcgtcttcggcgaagtggtatccggtgtgaacatgttcaaggatcttggcgcgggcctgcgtaacatgttcggcggccgcagccagggctatgaggaagagctgatgcgtgcccgcaacgaggccatcgccgagatgcagcagcgtgcggaggcgatgggggcgcacgccgtggtcggcgtggacatcgactacgaggtgctcggcgccgacaacggcatgctgatggttaccgcgtccggcaccgccgtgcagatcgcgcgtacggcctgagtccatcgagcacagcctgggcccggactcgtccaccgagccgggctttgtcggttatcgtgacgcattacactgacgctcatgaccatacgaatcgaagcatacgaccggttgcccgacgcggcccgcgccatccgcgagcaggtgttcatccgcgaacgcgactggcggccggaattcgatgaatgggatgccgcgtccgtgcatctgctggtgttcgattcggataatgatgcgcccaatcgccctggctcgtccgcgcaattggcctcacgcagccagcccattcagcccagccagaatcaccccgtagcgacctgtcggttctacgcggaccccgatcatcccgaccagcccgggcgatacatcatcgcgcgcctggcggtactgcccgaggcgcaaggccggcatatcggctcgcggctgctggctgacgccgaacgccgcatcgcgcaagccggcggaaccatgaccgccgtgcactcggaaaacgaccactacaagttctatgagcagtgcggctatcgactcactgacgaggtctatgaaggcggccgtcacggctggctgatcaaggacctatctcgtaacgtatgaaggcccgcctcggtgctgggcgagcgaacctacagcgcacagacaatcagataaatcgccacgacgtggcagacatacccgatgaccgtgcccaagtgaaacacctcgtgaaactcgaaccagccgggcacggggttgggtctgcgcaacgcgaagcatacagcgccggcgatgtacgcggcgcctccgcacgcgatgagcacggtcggcgccgggcctactgcgggagccgtccagagctgcggaataagcgttaccggggccagtcccaacacgacgtatacggtggtgaacacccagttcggcgtccgcagccagacgatatgcagtatcgtgccaatcgccgcggtcgtccagattaccgtgagatatggccggcgaatcgccgggctgagcgcgaacagcacgggtgtgttggtgccggcgatgatgaggaagatgttcgaataatcgatgccgcacagcacgcgagtcaccttcgcgctgcgccatggcacgacgtgcagcagcgcgctgttgccgaacagcagcatggccgaggcgccgtacaccgcgcaggccgctttgaccgagccggccggcgcgatgcagatgagtacgatggacgccgcgatgcaccgcggcagggtggcgaggtgaagccatccgcgcagtcgcggcttgcgattgccgaatgcatccacggggacgatctggcgcttgatcgccttcagtgcggccttggcttggcggtagcgcgattgcgcggccctgtatcgggccgatgcacggtccagtgcggtggggttggcgtttgcgctggatttttgactcgcggttgcggaaggcgcaactgttgcggcggaagccatggttcgtccagatggcgtgctgatggaaacgctcatactgatcacctcgctatggccggcgacgctctcccgaccactaacctacgctaccgtaacctagtataggcccgcgcaataatcaaggttgatttcgtaatgcttacagttcttccgtggtgcggtattcggtggtgcggttgcggaatacatcgccgagtctgtgaactcgtattatgcgtgtctgctgggtccgacttgtgtcggttcctgatttcggattgctgcgaatgatgctcccgacgccgccccgccagttgccggattcgtacggctcggccgttcggccgagctggtcgtcggtgactccagatacttcgttggtttcgtctcggttcatgatgttatgtaatgctagtttatggcggatggaaagttgaggaaagttaaatctgcttcatgggcttctctctgatctgtatttgtcccggttcatatgtcaatcgtttgacctgtcgaccggggcagaatccgctgtcccggtcggcgatttcggcttgttttcgtgaaccgggacactccggtttcctcaactcatatcgtctggcagacggaatcggcggaataaggccgattctggaattggcacgttgtcccggttttcgcataaatcgattgacatttataccggggcaacaaaaattgtcccggtttgcaaagatcgcccgaaatcgcgaaccgggacagcggattctggcctggcttgaacgtcaagcgattgatgcaggtaccgggacattttccgccacgaaagttgggccataagtctcaagtcctaaagcccccctgaaaaacggcgcttgcccggacaaagcaaaagggctggaaccttccgattccagccctttagttgctggtgcgagtggggggagttgaacccccacgagcatacactcactgccacctgaagacagcgcgtctac

SEQ ID NO: 2822 - DNA, 5943 bp, Unknown
  R36_18m  MAG No. k141_23419
gcccaagcgcgtgcgcttccagtccgaaggtggcaagttcatcgatgcggacgccatcgccaccgcatttgccgaaaccaccgtattgcaggacgagtgcgaaatccagcatcttatgggcgatatcgaagacaaccgtgagcatcgcgatccggcaaagacgccagcagtaccgattgacgaactcgtgcgcgtcaccaatgaaaggcttgcgaccggcaacgatgaggagcgaagtcgtgcatggctgttcgccttattcgatcagctcgatgacattgccgaggcgacaaagaacaacctggagccgcttgtcacagcgttggatacgactctacaaaacagctccgctactattggcaactccgccactaccgacgccggcaacagcagcaacaatgccaatgccggcgatgcacgttcccgtatcatctccctaatcgccgacgctctcttcccggccgcagaatcctcgaagacaagcgagccctcagcatccgccgccatccgcgaactgatgctcaatcccaccgcaacatcgctcgattacatgccagccatagacgtactgcgcgcccacggtctcactatttgccggtgagtccgagaagtcaatcggtggttcatacggcagtggttcatacggcacataccgcacggaactgttatgcacgaaccactgtgtccgaacaacgagaacgcactacttctccggcttctccagcttctccagtgcctttaacagcgaatcgacatgtcctttggcacgcacgttgtagcgcgcaatcgccacggagccatcgggattgatgacgagcgtcgagcggatcacgcctacgtgcaccttgccgtagagcttcttttcgccgtatgcgccgtacagcttgtgcacggtcaggtcgggatcagacagcagtgggaacgtgagatgatcacgctgtgcaaacttgcgcagcttgtcaagcgagtccttggagacgccaagcaccgtaacgtttttcgacgccaatcgggcgagattgtcgcggaaatcgcaagcctcggtggtgcaaccgggcgtcatcgcggccgggtagaaatacagcactaccttgcggccggcatcaagcacgtcagacaggttgattgatccgctctctgtaaacccaggtataaccgccggcagagtgaaatcgggcgccgcgctcccctcttgcagacgttccggcattgaatcagagctatcaacagtagtggtcatgattcccatcatagaacccttatcaacagcgctagtaaagttattcagaggtcagtcacacaactgcggatcggcaaaacggcgattctgcaacaccggcaatgttcgacgcgcggaatcaagacactcacgactcagctcagcagtaatgagatcagcttccctatcgcccgccgcagcatcacgcgcaaatccgtcaataatctccagattccgttccggctcctccgccaccgtaaattgcgcaaccgcgacggacagatgaccactatcttcgcatgatgaacaaaccattttgaattcacaattctctatgctcggcacagcatacgttgtgccacatcgatataaatattgcaatcgaaaatgacacatacggcggagctcatcagctctccagaagttgcttcaaataagctgaatcatgcacccgcactggtcgagtatcctcatcaaagcctccattggtgtctacctgctgcttgatgaaatcaaaaacctgctgaggagtgacacgaatgctgacttccatctgttctttcattatcgtcggcataagatcgttccctccttccccgttcagtatatattcaacttatttctcactactacagcacgaaaggatccttcgtctgagagcaaacgacatagcctcacaccagtcccaacgtcttgaaggcgttggccaggccgttctggtgaatgtcggtggtggtgaagtcacagaaggcttggatgccgtgaatggcgttgcccatggctacggatgtgccggcggccttgagcatggcagtgtcgttgtcggagtctccgatggtgatggtgtcggcaatggcatagcccagcaaaaaagccacgtcgcgcacagcggtacctttgtcgatgccattaatcagcaactcgccattgttcggggagatcttgtcatacgaaccatgcacgagctcaaaccatgggctcaaattacgttgagtctcctcgaaagtcacgtcaggattcggcgaggtgaagtatgaccctttgctcacacgaatcgtctgtcccaaagtcgagccagtcggcacctccacctcatccaacaagtgccagaatcgcgcgaattcgccacgattccaggtcttgcctttcgattccagatgttgacggtagccttccgagatgtacatgccatccgcaccttgccattggtagctctcgatatgatgcttggcaaaatacgccatcgccgcatcgaccgcttcaggagggacgagatgctggaacagcagcctgtctccgatattcgcctgagcgcccgccacggaaaccacgccatcgaaaccgaggtcgaggatgctgcgttcgattttcggcacggaacgcccggtgcagatgaagagcttgtggccgttggcctgggcttgtttgcaagcgattttggcagattcgggtacgacgtggttttcgtcggctagggtgccgtcgatatcgatgaatacgagtttgctattggttgtcatggttacctttgtaactggttggacctcccccagtcagtttacgctgacagcccctccagagggggcgaagaaaatcccgcctaaaaacctacaagcatcacacggcgtaggcggcccagcggccgtgggtgtgctggacttcgatgggcataccgaacaattccgacaagcgttcgtcggtcaggccattctccaacgaaccggtgtagacgatggtgccagcaccgggattacccattgagtccacgcccgcttcggtggcgtcctcagcaagaatcggcttgcgtcccatgatggcgatgtggtcgaaaccagccggaatctcctccaagcgatgggtgaccagcaccacggcacgctcggagctttcctcgccgattcggctcagcgtgcgcatcacctgctcacgaccacccaagtcgaggccagtagtcggctcatccatgatcagcagctcaggatcgcccatcagcgcacgggcgatcaatacgcgggtgcgttcgccttcggacagtcgccacatctccttgccttccagataggagacgcgaaaatcgcgcagcagctggcgggcgcgggcgtattcctcttgcgtgtaggtgtcgcgccagcgcccggtcacggcggacgggccggtgaccacggcgtccagcgggtcctcgaactcggggaactgccggcccaggtcggccgaggcgagaccgatgcgggtgcgcagtttgaatacgtcgtatttgccgagttgatggccgaggatgaatacgcggccttccgaggggaacgtgcgggtggccagcatgtcgaccgcggtggatttgccgatgccgttcggaccgaacagtacccaacgctcccccgcgttgatggtgaggttcacgtcggtgatgatgacgcgacgattgcgccggaattcgacgttgtcgagttggaggacggtgtttgtcatgagtgaaatactacctatgattcgcggtctgacgactcccctcagtcactgcggtgacagctcccctcagagaggggagccaagaaaccggtacctgaggggagctggccggcgcagccggactgaggggggcactcgttgcagcgctacttacttcttctgctcgtcgagcacggactggtagacttccacggtcttgtcggcgatggtctcccagctgaacacgtcgcgggcgcgttcgtagccggcctgacccatcttcttggcgagttcggggtcagccatgatcttgtcgatggcggcggccatgtcgtgcacaaacttgtccggatcggtgggggtgccggtgccgtcgtgcagctggtcgatcgggaccagatagccggtttcgccgtcgaccacgacttccggaatgccgccagtggcggatgcgacgaccggcagaccgcaggccatggcctcaaggttcacgatgcccagcggctcgtagatgctcgggcagatgaaggcatcacagccgtgttccaaagcattcagctcagtcttcggcagcatttcttcaatccagacgatgttgccgcgttcctcatccagcttggcgaacgcgatcttgacctcttcggcgatttccggggtgtcaggagcaccggcgcacagcaccacctgaatgtccttggaaatcaggtgcagtgccttgagcaggtatggcaggcccttctggcgggtgatacggcccacgaacagcagggtgggcttcgaacggtcgatgtggtaacgctcgaacaccttccaacccggatcgtctggtgccggggtagcgaagtcggccatggtgatgccgttgtacaccacaaccaccttgttcggatcgaggttcgggtaagcagtcagaatatccttgcgcatgccaccggaaacggcgatcacacgatcggcgtgctcgtaagcatccttctcagcccaggagctcagattgtagccgccgccgagctgctcacgcttccacgggcggaacggctccagagagtgcgcggtaataaccaatggagtgccgtgcagcatcttggccatgtagcccgccaagcaggcataccaggtgtgcgcgtggatgatgtcggcgtccacatcattggcgatctgcaaatcaacgccgaaggtcttcaatgcggggttggcatcagccagctcagaaggcgtgtcatagccgacgaccttcaagctgcccttagcatcggcagcattcgggatagcaggaatgtccgcctcggtgcgcttgccatcaaacgcacgaacggttacgtcgatgcgctcggcaagcaccttggacagttcctcggcgtgtacaccggccccaccatagacatgcggcgggtattcgcgggttagaatatcaactttcatcggactgcctctccttcgtgcgtcagaaagaaactcaagcacttcttactttagggcaccgcatacaagaaaacgcacaacttccgtcgtgcgttttgcttttcaagccggatttaccaggcaaaagatcagacggccgtgccgttctgatccaaattcggattatgcttggaatcgccagcggtgaagaacaggctcagcacacccacaatgaacaccgcggaaacggtgatgatcagccacatcggatggcttggcagccacataaccacgaagaacgcgataatcgcgatggcgatcagcgtccagctgcccacgcggaaccactgacgcagcgaatgcggtgccttgaacatcttcggattcgtgtagttcgggttagtggtcagcagggtttcggtgtccgcaatcgtaccgccgctgggcttccattcggtgccgtcggtgccgtcctgcagacgctgggacttctgctgcagctgatattcgtcaatcattcccgaacggccacggccacgggtctggtcatactgcgacggcactcccctgcagcctgctttggcttgggcacggcgttctgcacgattcggcatttcactactcctgtttcgacggtgacactgttggctatattacccgcttatcggcggcaatttgccaccagtccatcggaacccactgtgtgtcattgttttttcagtcagtgatgcggtcaatcggtgatgcgataggtttgcgtatggaagtcgcaagtgaccgcagtgccgtccgcgaataccgaacgctgcaccagcggatcatcatccacgaactcgtgacgaaccagttcctgcatgccgacccgctcatggaatgca

SEQ ID NO: 2823 - DNA, 2787 bp, Unknown
  R36_18m  MAG No. k141_23689
cggcaccaacctggactccgctcgtctgcgcttcctgattgcccagcagaccggcgtcaacgtcaagaacgtgcacgcctacatcgccggcgagcacggcgactccgaagtcccgctgtgggagtccgccaccatcggtggtgtccccatgtgcgactggaccccgctgcccggccacgatccgctcgacgccgccaagcgcgaggagatccaccaggaagtcaagaacgccgcttacaagatcatcaacggtaagggtgccaccaactacgccatcggcatgtccggcgtcgacatcatcgaagccgtcctgcacgacaccaaccgcattctgcccgtgagctccatgctcaaggacttccacggcatctccgacatctgcatgtccgtgccgaccctcctcaaccgtcagggcgtcaacaacaccatcaacaccccggtctccgacaaggagctcgccgctctgaagcgctccgccgagacgctgaaggaaaccgccgcccagttcggcttctgataaaaaatcgctgtacggagcgcctttcacaccgcacaaggttcgaactacctttgtaggccttcaccttgtgcggcacgaaaaatcgcacacgtacagcgattttttataccctgctgaatgcttccagagggagcattttttattcgtggaattcgttggaggagggggagctatagccctcgggctcaagctggaaggtggtgtgggggaccgagaccgggaagtgctcgcgcaggcaatcctgcagttgggtgaggattgtggcggcatcttccatggtgaggtctttgtcgactaccacgtgggccataagaatcggcatgtcggtggacaccgtgctggcatggaggtcatgcacggcaagcacatgcggcacgtcttccagatgctcgcgtaccttatcgagatcaagaccatccggtgtttcctccagcagcaccttgaccgcgttgtgcagcagcttgatggcgcgcggaatcatcatcagtgcgatgacggcaccggccacggcgtcgaagccattccatccggtggagatcattaccagggcagaggccaccacagacaccgagccaagtgcgtcgttcattacctcgaggaacgcggccttcatgttcatgttgtcttcgcgctgcgaggcaaggatgaagatcgagatgatatttgcgacaagacccagaatgcctacgaacagcagcaagccgatatcgtcgatttccgctttggagccgccgaacaaacgcatgccggcctctaccaacgcatagatgccgacgataagcaatactacggcgcccgcggcagcggtgagcacctcaagcctggcccagccccaagtacgagtgttgttgggcttgcggcgcatcagtatggcggtgattgtggatgccaccagcacggacatgtcggtgagcatatgaccggcatccaccagcagggccagtgagccggttaagacggccgacaccacttcgatgaggaagaccgaaccagtgacggtcaacgtggcaatcagcctgcgctggtgcgcggcagggtttacggatgtggatggtgcgggtgtatgggtatgggccatgtgtactccttcgctctatcgagttgaaaccgcttctcaataccatttgcgatatggtctgaatacgacgaaaccccggcgcgaggccggggtttcgtaagcagtgtgcgactatagcacgaccagcgcgattcagcgcacgctgatcagctggtggcgaacaggctataatttgcgcagtacggtgaccaccttgcccataatcgtggcatgtgtgccgtcgatgggcgagtatgcggggttgtgcggcatcagccagacatggccgttttccttgcggaaggtcttcaccgtggcctcgtcatccaacagagcggcgacgatatctccgttgacggcggaattctgttcgcgcaccaccacatagtcgccatcgcagatagcggcatccaccatggaatcaccgtggacttccagcatgaacagggtgccggagccggtcagccgttcaggcagacgcatgacgtcgtccacatgctgttcggcggtaatcggcacgccggcggcaatacggccaacgagcggtacgtcatgtgattcggcaatggcttcggcggggaattggtatatctccgccacattgctggcgctggttgcctcttcgctggcttgtgatggcttttcggcattcggggcggatcctgccatcacctcgatggcgcgacccttgttcgcgttcatgcgaatgaagcccttgtcttccaaaacttgtagctgatgcttgaccgaagacggacttttgagcccggcggcatttccgatctcccggaaagagggagcaaagccttgttcgtcgatatgcgtgcgaatggcgtccaacactttgcgctggcggtcggtcagggtggactcgtccggcttctgcttgggggagaggggaatggtgctcacgtcagggctcctttcgttatgtcaccagcataacgtgttgttcgtgtgaaatcaaacatctgttcgagtttcgacttgaccgtgtcgaacatttgtgccattataagaacagttgttcgatagaacatctgttcgagagaggtggtcgtgatgactggttcaatggtgatggccccggcccgtagcgcacgtgtagctatgcagcatgctggaacgtcccgccggaatgcgcgtgggaagattatcgcagtgatggtcgccttggcgctggcctggtgtggtttcggcgcgcttaccg

SEQ ID NO: 2824 - DNA, 11622 bp, Unknown
  R36_18m  MAG No. k141_24101
acccgtattcgctactggtatgatccggagattttcaacaaaaccgccgaattctcatacgaacagctcatcgaccgcgtgcgccagaccagcttcctggtgcccggactcaaaatcaccattgttgacgaaaacgtaccggaaacggcgactgacaccgccgaagccattgatgccgacgcagtcgaacctgcgcaagaccaggccccggctttggacgtctcgtccaacgatgccgaactcttcgacgactccaccgaggctcaagccgacagtaccgggagcctgtccgaggaggacttctcgctgacggccggcgaccaggtcgtcgatggcgcgttcggcgagcagcccgcgcacccgcgcgtcgtggaattcctgcacaccggcggcgtcaaggacttcgtcgacttcctatccaaaggcgagccgatctccgacatctggcgcatccaaggcgagggcacctataaggaggagacccaggccgtgggcgaaggcggtgaactgcacgcccaggaaatcgaacgcacctgcggcgtggacatcgccctgcgatgggtcaacggctacgacaccacaatcatgagcttcgtgaacatcgtggagacgcccggcggcggtactcacgtggacggtttcatgaacgccatcaccaagcagattcgcaaggcggtggaagacaacgcccgcaagctcaaggtgaacatgaaggactccgccatgaaggtggagcgcgacgacatccaagccggactcgtggccgtggtcaccgcacgcgtggccgaacctcagttccaaggccagaccaaggacgtgcttggcaccgcgcaggtcaagccgatcgtcacccggctcaccgacaagcaattcggcgagatgatcaccggctccaaacgcggatacaaggaacaatccggccgcgtgctggagaagatcgtcggcgaaatgcacgcacgcatccagtcgcgcaaggccaaggaggtcacgcgccgcaagaacgcgctcgaatccgcctcgatgccggccaaactctccgactgccagccgggcaatgacgacgtggccgaactgttcatcgtcgagggtgattccgcactcggtaccgccaaggccgcccgcaacgccggtttccaagcgctgctgccgattcgaggcaagattctgaacgtgcagaaggcgtcgattacgcagatgctctccaacaaggaatgcgcggccatcatccaggtggtgggtgccggctccggccagagctttgacatcgaacagtcgcgctaccacaagatcatcatgatgaccgatgccgatgtggacggcgcgcacatccgtatcctgttgctgacgctgttctaccggtacatgcggccgcttatcgaacacggctacgtgtatgccgcagtaccgccgctgcaccgcatcgcgttgaccggctcgcacaagggcgaatacatctacacgtattccgatgacgagctggccggcaaactggccgacctcgacaagaagcacatcggttacaacgacgacatccagcgatacaagggtctgggcgagatggatgccgaccagctggcggacaccaccatggacccgcgcacgcgcatgctgcgccgcatccgcatggaggacgccgcccaggcatccgagatcttcagcctgctgatgggcgacgacgtgccgccgcgcaagcagttcatcgtcgacaacgccgacgatttcgaccgctccaagatcgatacctgatcgaagacgtcgctgataatgacatcgtgcttaccgagaatttccgtaattagcgtttgaggtgagcacgttgtcatatgttttatgcgtgttgcccatgagctattcgatagactgatgacatcgttatcacaaccggtgccgtactgtgaatgggagatggaacatggccagtctgttgcttgccgtcatctatgtggcgtttatcagtctggggttgccggattcgctactcgggtccgcatggcccaccatgagccaggatctgaacgtgccggtggcgtgggctggcggcatctccgcggtgatttccatgttcacgattgtctcggcgttgctttcggaccgaatgacattgaaattcggggcaggcaaggtcaccgccgtttcggtggcgttgactgcggcggccttggcaggtttctccgttgccccgaattactgggtgctgttggccatcgccataccgtacggccttggcgcgggtggcgtggatgcggcgctcaataactacgtagccattcactacgaaagccggcatatgagctggctgcactgcatgtggggcgtcggcgcatcggtcggcccctacatcatgggctatgcgctgtctcaagggcaaggctggccgtggggctatcggtacatcgcgatcctgcaggtgatgctgaccgtcatcctggtgctgagcctgccgctgtggaagaaacgtggcacgactgggggcggcgaatcgaccgatggcgccgcatcatctgacggcaatgccgagggatgtggtaatgctgaaggggcgtctgttgctgaacgcaaaccgctcggcgtggccggcgtgctcgccattcgcggtgccaaggaaatcctcgtgatgttcttctgctactgcgccatcgaatccacggcgggtctgtgggcctccagctacatggtgatgcacagcggcatcgacaagatcaccgccgccagctgggccagcctattctatgtaggcatcaccgtggggcgtgcgctttccggctttctgaccatgcgattcaaggacccggtcatgattcgcctcggccaagtgctggtgctcgccggcatcctcaccatgttcgtgccattgcctcaccaccttggcgtggtcgttgggctggtggtcatcggcttcgggtgcgcgccgatttatccgtgcgtcatccactcgacgccggcctacttcggcgaagacaaatcgcaggccgtcgtcggcgtgcagatggcctgtgcctatgtgggctcactgctcatgccgccactgttcggcatcatcgcgcaatatgtgacaatcagtctctacccgtggtatttgctggtgctcttggtgctgatggtggccatgcacgagcgtcttcgtaagttgcgcggctgatcatgcgcgcatttgggcccgccgcctactatgcttggagcccatggtgataagtgaagaagaacataaacagatgcccgagcccgtacgggaacgattggaagcgctgaaggatgcgccgggctcggtaatcgtggtcggctcgatgaacgccgattacaccgtgaccaccaaacgactgcccaagccaggcgaaaccgtcaatggtggtgccatgaaagtgttgccgggcggcaaaggcgcgaatcaggcgtctgccgctgctcgcctcggtgtcaatgtccagttgctgggcgcggtgggcgaggactccaacgcggacttcctattaggcaagctggatgaggccggcgtcgacaccgccgatatcctgcacgttgaaggccccagcggcaccacggtaatcaccgtgagcgctgagggcgagaataccatcgtctattcgccgggttccaatgccaaggcaagtgccggctatgtgcaatcacatcgcacgaccatcgccgaatgcgcggtattgggactgtgtttggagagcccgatctccaccgttatcgccgccgcacagaccgcgcatgacgctggcgtgaccgtgctgctcaacgactcgccatttatggacgagctgcctcacgaactggtggaagccacggatattctgctggtcaaccagcatgaagtggctcagttactgggtctgccggacggcgatgtggaatcactcgactggtatgaggtcgccgaacgattcaccgattacggattcgaccgggcgatagtgacgcttggtgcgtcggggtcggtggtgatcgagaacggacgttggcatcgcgtatccgccgcgcaagtcaatgcggtggacaccaccggttgcggcgactcgttcatgggaactgtgctggctggcttggccgctggccatacgctgctgcaatccgcgcaaatcggctcctatgtctccgcctatgcggccaccaagcttggtgcccaaagcgcctacggcaccgccgaagaagtcatcgcctacttcagctgacctataatcgtacatatgtgcgaaaccctgagcctgttttccgaacccaccaaggtgtggttcgagcatgccttcggtcagccgaccgaggcacaggctcaggcatggccggcaatccattccggtcgtaatgtcttggtcatcgcacctaccggctccggcaaaacattggctgcgtttctctcggccattgaccggctgatgaccgtgccacgcacgcggcgtgccggtgtgcgtgtgctgtatatctcgccgttaaaggcgctcgcggccgatgtggcaaagaacctagaacagcctttggagggcattgccgcacaatgcgaggcgcaagggctgcccgtgccgaagatcgcggtcgccactcgttcaggcgacaccaccgcacaggagcggcggcgcatagcctcccatccaccggatatcctcgttaccacgccagaatcgttgtatctgttgctcacttcgaaggcagggcggattctcggcactgtcgatacggtgatcgtcgatgagattcatgcagtggcgggcaccaagcgcggcgcacatctggcggtaagtctggaacggctggagaaccttgtcgcggaatcgcgcaagcgagatgcaatcgatgcggatgctgatgagggcagtgataccgccatcgatgctggcctcagtgaccttcatatgcagcgcattggtctatccgctacggtgaatccgcctgaagaggcggcgcgattcctgggcggcggacaaccggttaccatcgtgaatcctggtgggcagcctgcaatggatctgcgcatgattgagccgttggaaaacatgcgtgatttgcagtccgtgaatgccaagcagcgtgtcggtggcgtggaggccgaacggtccgctccgcatatcagcggtgtcacgccggccatgcagcgacttgccgaacgcaggggcattgtgccggtggatgatagagatgtttcttccacttctggggacgattctgatgcgagtgatgcgttcgattcctccgcgttggttggagcggcgggcgaccgtgcctccggttccatctggcccgtggtggaacgcggtattttggatgagattctcgcgcaccgcaccacattggtgttcgtcaattcgcgtggtgtggccgaaaagctcaccgcgcgcctcaatgatctctatgcgcagacccggcatggcaccaatcccgacactgttcgggatccgggctctccggaaggccgcgaagggttctccacacattacgatgctgtggtcggttccaccaccatgcttgtcggctcgcatgagggcgatgatgtcatcgccatggctcatcatgggtcggtctccaaagaccgtcgcaaaatgattgaggaacggctcaagcgtggtgaattgcgctgcgtggtggccacctccagtttggagctaggcattgatatgggctcggtcgacttggtgattcaagtcgatacgccgttgtcggtctcctccggattgcagcgtgtaggtcgtgccgatcatcaggtcggtggcgtctctcacgcattgttctacccgctcacccgtcagcaaatcgtcactggggccgcaagtctggaagccatgattgccggcgatatagaaccattggccgtgccgcgcaatccgctcgatattctcgcccagcagaccgtggccgctgcctcgatgcacgatttgaacgctgatgactggtatgccacggtgctccgtgctgcgccgtttgccgaactgccacgtgacatgttcgatgccgtaatcggcatgatgtccggcgaatacaacagagaggaattctcggccttccggccgcgactggtatggaatcgggataatggcctgatttccgcccgtcccggttcgcagaaagtggccgttacctctggcggtacgattcccgatcgagggctgtacaccgtggtcctgcctgaggcggacgccggcaaaggccagcgtcgcgtcggcgagttggatgaggagatggtctacgaatcgcgcgtgggcgatgtcattacgctcggcacttccacatggcagattcaggaaatcacccgtgatcgtgtggtcgtgactccggctccgggccgcaccgcccgtctgccgttctggcacggtgaaggcgctggccgtgactacggtttcagccgtaccatagcccgcttcacccgagaaatcgccgccggattagacgtgaagcggactggggggagtgctgccgcagaaggtccagctgtcccaaccttcatcccaacaatcctcacccgtctccaccgagacggcctagaccccaacgctatcaccaacctggcccgcctactctccgagcaacaagccatcaccggcacagttcccagcgaccaaaccctcatcgtggaacggacccgcgatgaagacggcggctggcgcatcgtactgttaagccccttcggccgccgcgttcacgaaccgtggtccatggccatcagccgcagactgcgccaacgctacggtttcgatgggcaggtatatgccgccgatgacggtatcgtcattcagctaccggacggtgacggacatattcctgctcaagacctgttccttttcgacccagaagacctcaaagcagatgtagaacgtcaagtgggcgagtccgtgctattcgccgcacgattccgcgaatgcgccgcccgatcactgttcatgccgcgatccgacccgggccgtcgcgtgcccctatggcagcagcgactgcgcgccgcacagctcctgcaagccgcacgtatggtcaagaacttcccgctgctgctggaaaccgcgcgcgaatgtttgcaagacgtatacgacatgcccgccctgaacgaggtgatgaccggattgcaagccggcaccattaccgtgaaggacgtggagaccgagccgccatcgccttttgccgagaacattctctttggcttcgtcggcgtggtgatgtaccagtatgaccaacctcaggccgagcgcagcgcgcaactgttgtctctcgatccgcacgtgctcgaacgcttgctcggcaccaccgacatggcacaagtgctcaacccggacgtgattcgcgaagtcgaacaggaactgggggagcgcactttctggaatgaacttgccgacgatgatgtgactggtcgcgtgacccgttacgccaaaacccatggtcctttcaccgccgatcagctcatggccgatctgcacctcgatgctacggatgccgtgcatactttggatgtactggctgccaaaggcgagttgctgcaaggccattttgtagatgatgacaagcaaggccaacagtggctccataaggacgtattccgccgcattcggtctcgctcattggccaaggcgcgtaaagcagtcaagccagtagaaccagaggcgttccagatgtttcttatcgaccgacaaggtatcgggccggtcggcggcgaacgatatgaaggtgccgacgggctcatgcgcgttatcgagcagctggagggcatagcactacccactgcactctgggagtcggcggtattccccgcacgagtacgagactaccaacctgcattgctggatgagttgctgaccagcggcgatgtggtctgggtcggctcaaaaaccgggggaaccagtgcgatggaccccggtgaggttgctttctatccggcggattcaatattgctcagcggtgtggaacatggtacgacatcgaacgcttcagacgccaccatgccggaagcgattctgaccgcactggactcagggggagcgttccatgcccgtcaactggtggatgccgccaaacgtgtgtggaatgaggccgcggagccggacatcaatccaaacaccggtgaaatcattccgcaagagtggagcgaacagcagttcaaggatgccttgtggagcttggtctggcaaggtaaggtcaccaattccagcttcgcgccggtacgtgcattaaccgcaggcgcagcaagcccgcgtaaatccactacatcacgtcgtcgtgggcgtgtcgctccgattcaccgagccactacggatatgacgttaggaggtttgtggtctgccgtaatcgggcaagctgaagccgaagacactgatcagaccgagcaggcgctcgcactggtcgagacgttgctggacaggtatggcgtcatcgcgcagccggtgatcgacaaggaaaatatcccgggtggctactcagcgttgtatccgatattgcagcgcatggaggagcatggtcgactggtacgaggcatgttcgtccgtggtttcggcgcggcccaatttgccgagcgcgacaccgtggatgcgttgcgtcatccgtcagagcatcgcggccagtccgtggtggcattgagtgtgctcgaccccgcaaatctcagtggctccgccatcgcgtggccggacgcgcctgccggtgcgggtaaaccggcacgccgtatcggagccacggtcgtgctcaatgcgcaaggtgcgctactatacgcggctgccaaagccaagcacttgacggcgttcgatcaatcggtcggccatgaacccgccgccaatgattccgacgaacaaatgcgcaaggccgccacagaactggcctacgctctcaaacgcaatggcaccggttccgtgacgttcagcgacatcaatggcgaacccctcaacgcccgtcaccccttcgcccgcatcctccaccagtccggcttcaccccagttccccaaggcatgcggctgtactgattgctgctcaccgaatgcggtagttggagccgcgttgggtcatgatgaggccggcgtgggtgagcttcttatccagtgtgtagagggcgttcctgaggagcccttgttgctcgaagaatgggccaccgacgagcttgaccaattcgctggtgttgacaaactggccatcagccttgaccagtgcttcaagcaaactgtattccagacgggacagtgaaattgcggtgtgtgtggatgcgtagtaggctttgcgattcgtggtatccaacgtgagattgccacgaatgatcatggtgggggagtcggtggcaagcgagccgacgtatgagagcagttcgccatcggagaatggtttgctcagtacggcatccgggcgtcgtacattagctcgtgcgctagcggcagcattgtccgtgcactgttcggcttcggcatctgagttgtttgcgtgtgaatccgcgctgaaggagctgtagggcgtctcttcgatcggggcgtactcgtcaggcagcgctcgccagcggctgccttcgccgatggttttgctgagtggcgtcgaagtcagcagcagaatcttgacggaggcacgggcattgtgaagggattcgatgagttgctcggtggagatgccgagcagggattcatcgagaatcactgcgtcaaatagctccttggtgaccgcggcgagcgcgatactgccggtgcttgccaaggacacctcatgacgacaggcaagcagcgcaccacgaatggcgcgggccaacggttcattggatacggcaaccagtagtctcatcgccacctccttgatgcttagtgtaggtcgggtttagggtctcttctctatgtgtttggctcactatcgttcgctcctcgcctacaaacaccccactgggggtgtttgctttacggctcggcccatcagagggagcttaattgaggttacgcaatgaaggcgatgggggaggcgaggtccactccggagccgtctcggcgcatatcgggcttgggaagctcgaccggggagcctgcggatgtggaggcatgcaacgggtagagaccaacccaggcaagaatcagcgtgttctggcccttgaggaagcgctgggagcgtacgccaccggtagcgcggcccttggtggggtacatttccagcggggtgaccttggcagcgccgttttcggtgccgggtagtgcatcggagtcgccggccacggtgagcaccaccgcgccggagccggaagtcaaaccgttctcgccctcctcataggtccatgccaccttgccggcgggaaccacgttgaatgccgccacacgggcgccctcggccagcttgatgccggccataccgcccgcggtgcgaccctgcgggcgcacgttcttcgcctcaaaggtcagtagcgaggaatcggaggagatgaacaccagacggtcgtcatcctcggccacggcggcgaataccacttcgtcgccatctttcagatcaatgacgggccaggaatccatggtggtgggtgcctcacggttccaacgcttgatgacaccgttacgggtaccgatagccagcgacggcaacggcttggcctcggcggccccgccatcctcgctctcatccttggcactggccttgccggatgtcggctgctccatggcgatcgccgtaatcacgcgctcgccacgaatcggatcggtggattcggtcatgccgatcagttcgtcggcctgaactcctcccttcagcgacaatgtggcggcagcgggcaaggcaggcaaatcaaccacatgcgcgagcaccaggcggccggccgacgtgaccagcccgtacgtggcgcgcgtggaggtctcgaagattgtggtgatctgatcatctcgcagacgttcatcggatgtggaccgtacattgaacacgtccatcgcgcttggcgtggtacgggcaatcaaaccggtggcgctcatcatcaccacgcacggctcgtcctcgatcttcaaggctccggtcagcgtggactgttcgccggtcttcttggccgcagctgcggctgcggccacatcggcttcggcggaggaaatcgtggtggcggccttcactgcttcgagtgcggacttggacacacccgaagccccggcgccctgcgccacgaccggcgtcagcgtgccatccgggtcggcgtccagcagcacggtgcgacgcggcgagccccacttggcgaccgcctcgtccatctcgtcggtgaccacctggtcgagcgcttcggcggaggccagaatgcgggtcagctcctcgatgcgcttcttcaggtcatcgcgttcggcctcaagttcgatgcggttcatcttggtcagacggcgcagacgcaggtcgaggatgtactgggcctggacctcgtccaggtcgaacacaaccatcaaacggcttttcgcagcatccgcatcatctgaggtgcggattacctggatcacctcgtcgatgtccagcatggccagcagcaggccctcgaccaggtgcaggcgctccaacgccttcttcttgcgatattcactgcggcggcgaatcaccacacggcggtggtcaacccacacctgaagcatctccttcaggcccatcgtgtgcgggcggccctccaccaacgccacgttgttcatggcgaagttgtcttgcaacggtgtgtgcttgaacaactgcaccagaaccgcatgc

SEQ ID NO: 2825 - DNA, 5414 bp, Unknown
  R36_18m  MAG No. k141_24142
gcagcatcagtcataatcccctattgtgccgcgcgcgccggacgcggagagcagcgctcctcgctcttttgcttcgttattgacatttcgggccaacaccatcccaaaacggccattttccaacgaaatctcttttgcctgtctttggtagtgcccgatatcttgatgcctgtcttcacacctgttttgacacctactttggcgccatccacacgcccgcacgcaaggcttcgacaccatttggcgcaattgttgagttttttacccaaacgatggaagaataggagtcgacgcaatcgtcttatgaaaggggaatcaatgaccgatcccaacaacgtgccgttgccgcagatgcccgcgcccaacggtaccccggcccagcagaatcccagcacgccgcaatacggcgcacctgctccggcccccgcacagccagattatgggcaattcaacgctccggcccccgcacagccggcctacggccagcccgcatacgggcagcccgctcccgattcttccgcacccggcgcagcgcccggtgcaactcccgcctatggtcagcccgccgccgacccgtacgcggcgaatgcggctccgcaattccccgctcccggcgcggctcctacctacggccagcccggaccggacgccaacgcttacggtcaggtgccacccgcatacaaccagtacgccgctcccactgccacagcagccgtgccgttgaacaagccgtattacgactgccccttccctgaggcattcctccgtttctggaagaagtatgtggtcttcaagggacgtgcctcccgcagcgagttctggtggtggacgttggcctctgtcggcatcagcgtcctgctgagcctcctcagcagtgccacggacgacaagctcgggttcctttccagcatttggagtctggccatcctgattcccagtctggcgctcgccgttcgccgtctgcatgacacggacaagcccggctggtgggtcgccatcttctatggcgcgatggccctcggcatgatcatcatggttgccggcggtggcgcagcactgtatggcgccttcggcagccttagcaactccagctatggagccatggcaaccggcggcctcggtgccatggccattggcggactgattacgctcgctggttcaatcgtctacatcgtgttcatggctatgcccagcaagccggaaggcgcacgtttcgacgatgacgcagtagctgccccgatgcctcagggtgcttacggcgcaccgtacggcgctcccgcaaccccggacttcaaccaggccgctccgggcaccgctccgaacgcacccgctcctgacttcaaccagccagccccggcctatggtcagccgaccgcaccggctcctgactacggccagcccgctgtgcctacgcccgattacggtcaggtaccggttccgcagtacggccagccggagaccccggccccgcagtacggccagcccgacgctcaggccccacagtacggccaggttccgccgattcccgaaaacgttgatgatgggtccaccgtgctgtctccgcacacggctcccaccgatgacaacgcacagaaaccctggcaaggccagtgactgacgccggcgaagttcgcttaagaagttcgcctcatcactcatgaagcccaacaatgaggccccactcatcaagcggcggtagtattccccgccgttcagtaagccaatgccctgtgtactggatcattccagcacacagggcattgtgcgttattgcggcccctctcttcgcgcaacattccccggaatgcgttacggtggaggatggacgctgcgccgagctactcctacaagctgcctacggagagcgtttgggagatcacatgggattctcccgggcccagcgtcacgatgcggtcgcggcataccgccgcttcaaccgccacgaaaccgcgccattcgcccggcttggtgtagctcatattgtcgccgtccgctcccggattccacaccacggtttgcggcgacccggtacggctgatatgaatcgcacgccccaacatgtcatcgcgcagttccagacgcgcatccgagtaatacacacgattcaccggctgctcgccaaacgtcaccacttgcgcgtcctgtgttttcggcggaaacccttcttcggtggcatccagatacgtcgctccctgcaatccgaccagctgagcaccggacacatcgccgacatgcagataggaatgcaacgcggcctcgtacgacataggcgccgtgccggtgttggtcacggtcaggctcatggtcagcgcattgcccgtttgcacgtcatacacggcatgaaactgagcacccggctcgtcatcgaaccaaggcacttcattgtcgttcagctgctgcgaatccaacacataccgtatgtggctgtcgtcgaatgaaccctcgtccaacgcccaccgacgcagacgtgcaaaaccgtgggatggattgagtgccagctgcttgccatgcgcaaaacccgggccgaaccacgggaagcagatcggcactcccccgccgagcgacttaccggcctcgatatgccacgtactcggcgtccacaccacatccgcctgcccggccggggcccagcgcaacagatgcgctccgtaatcgctgattaccacgctgccgccattgttggcgagcatacgcaaatcgacaccattgcccataagtttcccattcccattgtgcgaacgatacttttcactaaataggatacttccttaacaaaaaagaatcgcaaagtatggccgcaggatgcacaaaggccgtgccaccccattcgccgacgaccgccacgcgccaatcgtgcgcaagatcatcggatgcgactggcaatagatgctggtcacgcgggccagtgcccggctcaagcacgacttccccctcgcgcaccagttcgccgtgctcccaatggtgcacataaacgcgatccgcacccaaatcgctggtcagcacgcggccgtccggcactggctgcacccagtgggcgacggcgcgtccgacagcagccgttcgcggcgtagcaccttggcatcgccactgttatcgccgccggcatccaataccaattgttcgatgccggggcaagccacatgatgcagtttgccgaatccaccaaccagaatatccatgaggatgttccgttttactacgaactacgaaactcttttcgccacacaatacgccgtcgccggcggggcaaaatatgccaaaattagccaattgcagaaaaagggcgatccccgtataggaatcgccctttgcgcacacactcaggcggagggaagtgcctcaggccgtcaaaccggcgaagagcgccgaccagtcctgagactcatcctcaaggtcgaatcgttcggtgttcatcagtgcctccttcaccggtccgggagccctcccctcaagtttgtgtattgagtaatcggtgagatcactgatcgtggcccccaatgcccatccggaatgcggcaaatacacgtggaattggattgagcagacgaagacgccgacagtgatcatcgaacgtgatctgccgctgctgggttcccgctacgtcgattcagtgcgcaccaaccatccctatggcgtgcgtaaggcggcggtgcgcttcctgcaacacggtcacacccgtgtgggcgcggcgttcaccgatacaccgacttcggagctgattcaggatggctggaagcaaatcgtgacggaaagcgacgccatcgaatgcccgttcaccatcaccggcattcagccgtacaacaccagggacgtcaaccaaatcgtggacaccattctggattcgggcgtgacggccatgctggtgcactccgattatctggcgatcgccatcgcgcagaccctggagcgccgcggcaagcgcgtaccggacgatatctcgatgatctccgtcaacggctttgccacgcccagctcccgcccgctgaccgtactgtgctcgtccgataaggatctggccgaggcggccatcaacctgctgatcaaccgcatccaaaacccggattctacaacccgccacatctcgtggacccgacgctgaccgatcgcggctcggtaatcgataagcagtaaccccacctccctctgacgagggaggtggcatcgcaaagcgatgacggagggagaggcaccaggcctctaaccgttacgagcgaagcatcggccagagcaacgcccttactctttacaactccacggtctctttgccgggatcatccttgacatgcgcgaacttggcggccagagcctccttattgcgcttttcgtcttcttccttggcctgacgcttagcctcgtccgggttccagagcacatcctcacggtgcttgttccattcggcaacggccagaggagcgatgtattcggcggtggcggtcagggtgtctgcgtcggcggctttggcacgggcattaagcaacccgaggatctgctcgtcggtcaggcagatgcgcggcaccgagcactgctcgcgcagttcgttgacgtagagcagaatcggcagaatcttggcggcagcattggcgacactgtccgctgaaccatcggccacagcatcaccggacacctcgcccaataacgcatcgcacacggcgagcgcggtggcgaaccgaacagccacatcggcgggcttggcagacgtggccagacgaccatcggcttcagcgtcggcctcgacctgggcttccatggccgcgaccgcctccctcaccgattccgccgtcgcggaatcccagtcgattcccaacacgtcggccgcctcaacgatcagcctggcatcaccggactcggcgtagtcggccatcgtgccgtaggcgtcattggcggcgagcagggcgtccacgatgctctgcgggcgaccgggaatctcatcggcaccttcgtagacgaactcggcgtccggcacggtgacgtcctcgccggtcaggatgcgggcgaatgcacgggtgacgcgcacctgcaggttctccgcgtactttgcgtcattgtccatctgcatggcttcggtcagcggccacaggccgatcagcgccgagccggcttcggcggcctcagttaccgccggcaatgccgcgacctgtgcgattgcctcacgattgagttcaatggtcatctatgctcctttgcgtccaccactcgattgcagtgcgtcttggctcccctctccgaggggagccaatgtcctaacaccagtgtgccgttacttgacgttggctgctgggtcgacatacgtgattgacatcacacggccggtttcgttgtcgtacgtcaccgaggtcacggaggcgagcgccgtgtgccgcaggaacatccagtgctcggggtggccggtctccagataatggcgataactgaaa

SEQ ID NO: 2826 - DNA, 5752 bp, Unknown
  R36_18m  MAG No. k141_24213
agcatgatcagcggcaggaagtagttgttccagacaccgaccagcgtgaacagcagtacagtgacgaaacctggagacagcagcgggaaaccgaccttccagaagatggtccaagtgcttgcaccgtccagtttcgcggcttcgatcagcgagaccggaatcgaggtctgcgcatagatgatcatcaaatacaagccgaatggcgtagccagctgcggaataatcacggcccatggagtgccgaccagcccgatcttcgaatacatgaggaacagcgggacagagatgaccgtggccggaatggacatgaatgccaaagttatcgccaacagactattacggccggggaaccgcattgtagcaatggcgtaacctgcgagagtggcgatgatagtggcaccaaatccggcgacaactgcatacatcaccgtgttaagcaaccaccgcgcatatgtaccatgctgatatgcaagagtttcctggacgttctgccagaacacattcttgtcatcgaaccacagaccaaaggagctaaacatgccctcgttggtctttgttgcagagaagaacacccaaagcaacggcacgaggcagtagatgaccatcatagccataatgatgtgcagcagccagttgagcacacgctgcttaccggtcagctttggagctgcctcacgctgctgcatacgcttatagcgttggcttgccttgagcgccagcttggcgtctctgcgctgcagcgacttggaacgtggttttgcacttgcttcactcatcacttgttctcccacttattgccaatgaccttcacgactgcgacaagacccataacgatgacaccaatcaccaaggagacagccgcagcgtagttgaggttctggccgttgaacgcaaggttatatgcgtagagattcggcgtgtagttactggtgatcacattcggcgcagaattcatcaagatgctcggttcgttgaacaactgaagcgtgccgatcaccgagaagagcacggtcatcataatggatcccttaatctgcggaatctttaccgaccatgcgatacgcagctcggatgcgccatcgatacgagcggattcgtacagctcgttcggaataccgatcagtgcagaataataaatcagcatgttgtagccaagagaacaccaagtgcagatgtttgcgatggcgaacagcatgagcttttcagaaagcatgttcggcgcagtggccccgatcatagacgcaatctggccgacaaggccatacttgtcgccgtagatatatccccacatcagtgctgcgatgacgcctgggacggcataaggcaggaacagcaggattcgcggcactgcgatatggcggattctctgggaatccagaatgagcgccgccacaagggaaaggatcaaattgagaggaatctgaatcgccgcataaatcagcactcttctgaaaccgctccacagcgcttcatccttaaatgcagctatgaagttgtcgaagcctgcgaatgtggtgccgccaagaagggactgcttgaagaagctgagataaagcgcgtagaacatcgggatgatcatgccgaataggaagaccaccacgtatggaagacaatataacatgcctatgtactcgcgcttcggcttgcgcatcccggaagtatccggtttcgccgttgcatttgtcatagtttttctctttcttcttaacccgtctgaatgagcccgccaacaacatcgttgccattgccgtttcattcatcggtacgttcaatatacaaggttttacaaaaaagagcaaataaaacttcgttgcgcgtggcgaaattttctttatcttgttttttcgccttaaaagggctttattgcaacgatatgcacaaatcgtactcatcgaagaaacagcagccaatccatgtctacaacacccatttccgctatatagacagcaatacgccgataaaaaagctgttttagagtagcgaaaatttcgctactctatatataacgcttttttgcagcgtcgcatacgaaaagagaagagtcatggccacaatcaaaacaacaaacagaccgaaggtctccgacatcgcccaagcggcgggagtatcccccgctaccgtgtccaaggtcatcaacggccgtgatggagtctccgacgagacccgcgatagggtggaactgctcctcgaagaagccggattccgcaaaaaacttcccacaacaaaaaccatacggtcaatcgaactggtcgtcagcgaaatgaccaacaacggcaccgtggaaatggtcaaggagacagcttcatacgccagagattttggcctcggcatcaccgtaagctgcgccggaccggattccggagaatacgcaacaagaaacgaggccagcagctgcctccgtaacgccatcgaacgcaacccactaggcgtcatacttctcttatcgaatatctcatcggccgaggaatcgctgctgcagacgaggaacatcccatatgtgattgtcgatccggtcggccaggtctccgctgacgcattgggagtgggcattgataactggaccgggggaatgctcgccacgcaatatttcatatcattggggcatcgacgaatcgccgtcatcactggccctactaattcacagtcctcgcaggcgcgactgagcggatacatggcggcgctgcagaaaaacggcatcagcgcggatccgcatctcatcaaggttggcgactacgtatctgacaaggcatacaaggcggcatgcgatctcctggaaatgagggagcaggaccgaccgaccgccatcttcgcgttcaacgatctcggcgcgatcaacgtctatcgcgccgcccgacagcacggcatcagtctgcccgaacaattatcgatcatcggtttcgacgatgtctatcctgcggcaagcatgtgtccatccctgacgaccatcaggcagccattcgacctcatcgccagacaatgcatcaacctgattctcgaagcgcgggaaggaaaggtggaacagaattacttcatttttcccacgcagcttgtcgaacgcgaaagctgcgtatcgccagcacgtccgtaactcagcaacggaacacagaatcagcttccacgaagcacccatgcatatgcaatccgtctctggcacaagcatttacttctgtttaccagatgaaaatacaatatcgtgcgattacggggggcgcagccctagcctcagctggaggtcaggaaggtttcgttgcctcgggtgaagtcgaggacggcaccggcgagttggacctcacctgccagttcggggtcggcggccagaagctgcccggcacgggtgcgggcgtcggcgatcatgtcggcgtccttgaccacgcgcaggagcttcaggctggacttgccgccggattgggcgtcgccgagcacatcgccggcaccgcggaattccaagtcggcttgggcgatttcggcaccgtcgagcgagtggtgaatcacttcgagccgttgctcggccggggagccgggttccgcacgggaaataaggaacgcccacgagttggtgccgccacgccccacgcggccgcgcagctgatgcaactgagagaggccgtatcggtcggcatcaaagatcacgatgcagctggcctgtttcacatccacaccgacttcgatcaccgtggtggacaccagaatcggagtctcgccgccggcaaaatcggccatgacctgggttttgacgtcatccttgtcgcggccggtcagagtcgcaaaccgaatgccttggaattgcgggagtttctgcaaccggtcggcgatttcggccaccgcatgcaatggcgggcgagccacggtttcgccgttttcgtcgaaggtttcgtagggatcgtcgatgccgatggcgtcggccgccgcgcgcgttgcacggccgcccgcagctgtgcgggcactggaaccagatgctgcggcgcgtccgcgggcagaaccggctgctgccgaaacgccggaaccgccttcgttcccctcatcatccgcatcaatgcgcgggcacacgatataggcccgctcccccgcgtcgactcgcgcgcgaatgtgcgcgaacatacggcccatggtggcggcgtcggcctcattgaccaccacggtgcgaatcggtttgcggccgccaggcaattcggtgagccaggaaatatcgagatcaccgaaccaagtcatggcggcggtgcgcgggatgggcgtggcggtcatcaccaatagatgcggcgtggtgccgtcgtcggttttggcgttgagactttcgcgctgttccacaccgaaccggtgctgctcgtcgattaccaccaaggccaagtgcggggcttggaaggtcttggaaaacgccgcgtgcgtggccacgataatgcccggctcgccactggacgccgcagcaagtgctttacgtcgcgcagcaagcttcatgccgcccgtcaacaacgtgactggaatcgctggcttgagttgctccaccatccggccaatggtttcggcatgctgctcggccagcacctgagtcggggcaacaagcacggcctgatagccggcgtctacggcttggagcatggcagcgagcgccactacggttttgccggagcccacctcgccttgcagcagacgctgcattggccagtcatgagccaaatcggcggcaatatcatgaataacctgctgctgccctgcagtgagggagaacggcagggatgcgatgaactgatcgcgcagactgtcggttaccaacgggcaagagtgagccgcggatttatgggcgtgcgacctggctttaagcagcgaggtctgcgaaacgaaagcctcctcatagcgcagggtttcgatggcctccttgaaccgggtcgtggaggccggatcatgaatggccaggaacgcctcagcccgatgcatgaggttcttggccttgcgcaccgattcgggcagcacatctgggatggattgggagagcgcctcagcaccggattcggcggtcgtgccggaattctcttccccgttttggacggcgatggtgtcggtcgtgggagccacaatgccggctgacccagcgccagcgagttgcccgtcaggcgtggatgacgtgcgggcccccatcatccacagcaatcccagaatcgtctcatgaatatgttcggacgagatacgcgaactggcgtgatataccgggcggggccggcagacgcgggtaagcgcctcttgcacggtatcggcgtcgtatttcagcgcggccccggaagaggcagccgcggccggcggatacgcggactgcacactggcatacggatcggtacttcccgcaaacacaccattgccggatgccgcaccccgagcgtaaccctcaagccccgctcctgctccggccgacccgggcgcgacagtgaggatttcggggtgcgtgaattgcagctgccccatgtattcgctgggcataccggagaccaccacagacgtgccggcgcgcagccgcatgctgacccaatccacatacgatttacgatacgaaaagaacgtgagccgggccgtgctgccgggtacgcgacgcgaacgagcaaagtcggcgtcgtcaaccgtcgcctcgagtcggtagccgcggcgagcgttcatcggcaccacgcgcatgtctcgtatcacggcggcaaatgccatctgctggccgggtgcggcctcgcggatggcgcgaagcggcaccggttcggtgacgcggaagggatagtag

SEQ ID NO: 2827 - DNA, 9557 bp, Unknown
  R36_18m  MAG No. k141_24310
acgtggccgggcaagcgactgcagcgcgcgccgcgctggtgctccgtcgatcttcgcgacggcaatcaggccctcgtcaacccgatggattccgagcgcaagctgcgtttctggaacctgctcgtctccatgggattcaaggagatcgaggtgggcttcccgtccgcttccgagaccgatttcgacttcatccgtatgctcatcgagcgtgagctgattccggacgacgtgaccatcgtggtactcacccagtgccgcgagcacctcatccgccgcacttacgaggcgctcaagggtgccaagcgcgccatcgtgcacttctacaactccgtgtctgtgttgcagcgcgaggtcgtgttccgcaagaacaaggaggagatcaagaagctcgccaccgacgccgccgaactgtgcaaggacctcgagaacgaggccaagggcatcgacctgtactacgagtactcgccggaatccttcaccggcaccgagccggagtacgccgtcgaggtgtgcaacgccgtgatcggtgttatcaagccgactcccgagcacccgatgatcatcaacctgcccgccaccgtggaaatgaccacgccgaacgtgttcgccgacgaagtggagtacgtctccacccacctcgacgaccgtgactccgtggtgctctccctccacccgcacaacgacgaaggcatgggcgtggccgccaccgagctggccgtgctggccggcgccgaccgtgtggaaggctgcctgctgggcaacggcgagcgtaccggcaacgtcgacttggtcacgctgggcctcaactggctcacccaaggcatcgacccgcagattgacctgtccaacgtgcccgagatccgcaagacggttgagtactgcaaccagatcaagatctccgagcgtcacccgtacgccggcaacttcgtgttcaccgcgttctccggctcgcatcaggatgccatcaagaagggtctcgaggctcgtcaggtggccgccgagcgcgctggcgccgatctcgacagcttcgtgtggcttgtgccgtacctgccgatcgacccgaaggacatcggccgcacgtacgaggccatcattcgcgtcaactcgcagtccggcaagggcggcatggcctacctgctcaagaccaaccacaatcttgacctgcccaagcgtctgcagattgaattcgacaagatcgtgcaggactacgctgacacgaccaagaaggaagtcaaggacgaggatatctggcgtctgttcaaggacgagtacctgccgatcgaacagtccggcatgaccgccgccggtgtggttgtgggcgatactcatgacgcctcgctcgcgccgtggggccgcttgaagctgctcaaggtggccgtcagctccggtgaggatggctccgataccgtgctcaaggctcgcctgctcgaccgcggcgtgaacgtcggggtcgatgcgcccgtggagcgcgaggtctccggcatcggcaacggtccgatcgccgccttcctcaacgccatttccaactttggcgttgacgcctcgattatggattacgtggagcacaccatgtccgtcggcaccgacgccatggccgcctcgtacgtggaatgccaggtcggcgaggccgatgatgcgcagatcgtgtggggcgtcggcatcgattcgtcgatcaccaccagcgctctgaagtcgattatctctgccatcaaccgttcccagcgcaagcgctgagcgctaacaacaaaacaaagctccctctgattgcatcagagggagctttgttgtctgtgcttacttactactgggtgacgccgttggtgccggtgttcccgccggtgcctccggaattaccattatcgttgccggtattgttcccgttgttcccgccggtattgccgggattgttgccattgttgccattgttgccatctccgccggtagtggtgccgggataattcggacactcggtggaatagctcggattggcgaggcactgctgggcgaactcctgggcctgctgttgcttcttggcttcctcttcggccgccttctgctgtgcgtcctgctcagcctgcttctgcgcgtcttcggtggactgcttgttggtgttgttggacaggccgctgctctgtcccttgcccaagccccaagtgccgtcgggtccaccgatcttgccattgtctttagcggtcgggaactgctccacctcggtaccttgcaaggcctgagccatgaactcctggaacaggtgggcggggtatccagtggaagagacgccgtatccggagaaggctggcaccacttgcggattgcccttatcgtccggattccagatagcccacacattcatcatgctgggggtgtatcccacgaacgacgaagccatttcgtcgttggcggtaccggacttgccggcgatgggtcggcccagcatgttggatgtgccggccgccgtaccgtacgtggtggtgccctgcatggccttctgcaccaaagcgcagtcgttggcatcgaacaccttggtgcctttgctgggcgcattgtacatgtccttattgttggaatcaagcactttggacaccatgtgcaaggtgctcttcacaccattgttggcgatggtcgaatggccttgcgccaaatcccacacggtcagggcgttgatgcccagcacgttgtacatggagttttcatcgatatcgccctgaatgcccgcttcatgggcgattgcggccgtgcgcttcggcgtcagatgctcattgacgttcatgaacaccgtgttcaccgagttggcggtggcctgatacagattgatgttgccccagttgttctccagagcgttattcacctcttgatccaagccggtgaagtgctggtgggaattgccgttgaacaacgtatcgaagctgacgccggattgcgcggcccccagcaaagcgaacggcttcatagtcgaacccggttcgaatacggcctgatcggcattgttgagctgcttggacagataatctgaaccggcgtatacggacaatacttcaccggtcttcgggtccagcgctatgccgccgatttgcagggattcaggcatgtcgtccagacgggtgtcgccgatggactgcataaggtcctgcttgctcttgtcgatggtggtgatgatcttgtatccgccggtatccaaatcctctttggtaaaggccttggactgcaccagctcacggcgcaccatatccagcagataaccgttcggccccgcgtattcgttttgctgcgccaccgcggcagtctgcgggaacttggcatcagtgtgctgcttggcagtgatgtaaccatcctcctgcatgatgttcagcacacgcttgaagcgcgatttggccatatcggcgttatcggccggatcccacgtggacggtgacggaataatgccggcgatcatcgccgcttcagacagcgtcagatccttggcgtccttattgaagtatgccttggccgctgcctggatgccgtaggagttgcggcccagatagatggtgttcatgtaattgcacagcacctcgtccttggactcggtttgcgcgattttgatggccacgatggcctcgcgcgccttgcccacataggatgtggtttcgcccatgtaataccgctcggcatactgctgggtgatggtggaaccaccttggcgcgtgcccttggtcacattattaatgaatgcgcgggcgatgcccttcagatcaagacctttatccgtgtagaacgtacggttttcggacgccacaatcgcgttgccgatgtagtccggcagcccctcgcaagagatgatttcacgattctgctccgcgtaggagccgatcgcggtggtgccgtccgcgtaatacacggtggttttctcggccaacgcgaacttctcgggttgcgggacctcagtggtggtgtacaggtatgcgaatactgcgataccggccagcaagcccagtccaatcagggagaagaagatgcccagcacccatttcagtacacggtgcttgccttttcctgtgttctttttcttcctgttcggggctcgatggctattggaagccttgtggcttgcgtggcgggaacggctctcctggggcgtataggggccctcctgtgcggagtggtcggctctgctttgcgcggtgcgcggttgcctcagagcggggccattgcctcccgaatgtgcacgacgagtataagaagccatggtgtccaccgtaactgttggccttgaacaatcgtttgacgtgagcgtaaccacacgcatttatgccggtatttttccggaattcttacaattgggcacgttccttgatgctgcatgaatattgcctgaatgcgctggttggcctgccgtgcgacccggcgcgcacgtttcgtgtcgctgcgctggtccatacgtctccatagacttatccccagcctccacgcggcgctatgtcacccaactcccccagggcaggaatgcagcaagggtaagtggcctctgacgggtgcgtggaggttttccatttgtgcggatttggccgtgagctggcacgagcacggctccctgtccggggcgcggccgtacagtcgaacgtatgaatgacgcacagacccctagaattcgcgacccgcatgcggcggtcaatctggtcggctcaggcgcagcgcagcctgactcgtcgtcgaacgttgttgacccattggctgcgctcggcccggtctccggttcagatgcatcggcatccacatcaggctccttaggggatttcaggccgctgggcatggacgatgcggatggggcatctgatatcgaccgtggcttggcccggcttgacccgcttaccgtgcgcccgcgaatctccagccgcgtactgtgcgtggtattcggtctgctcctgatcgctattggcttcggcgtgtggtgggggtgcgtgtttaccgaaaacggacaatcgtacgacgaactggtctggaaaaacctgcacaacgatgtaccgtcctggaccaccggcatgatgaacgccgtcgcacaatcctggctggttatcgctgtcagctgcacaattgccgcaatcggcattattacggcgctgattcgacgccgctggtggttggccgggcaaatcgccgtgttcgccgtggtctgcttggccgtcacccgtatcaagggtctgttgccgcgtccgttcatcatcaacactgaatcgcctgccgctaattccgcgccttccggacacacgatgctggccgcagcctgtgcggtgattctgctgcttaccgtgcctcgtgcggttcgagctttggcgggcgtcatcggcgtggtttgggcggcgaccgtcggtgtctctgtgatatacgggcaatggcatcgcccttcggatgtggcgatgtccatcctgctggtggcgggattggccctgctcgctctggcagttacgcgcaagtccggcatggacgagccgggtcgccgcgtctcctcagtgagcgtgcaaatcgtcggcagcgtgttgattaccgggggcctgctgttgctcgcctacagcggttatgtgatctggcaggtggtgccggggttcaatgtcagcgccagttgggcggttcagggggcgaatgtcagcgctgttgtgggcattacgggtgtggccatgctcgcattcggactgttgctggccctacgtcagatcactgcagcgcccttaagcaggctgggcctgatcggcgctccgccggcaccgcccaaacggtaaaacatgaggtgcgaacggccgaatttgcccggcacaacggcggaatttggcagttggatatgattcatgagtattatgacgccagaaacgtcgtgtgtttcgcgcaatacataaggagtgggtatggctaccaaactggtgattgtggagtctccgaccaaggcccacaagatcggtgactacctgggcaaggggtacaccgtcatggcgtcggtcggtcatatccgcgacctcgcgcagcccagccaggtgcccgcggcagacaaggccaagttcggcaagttcggcgtggacgtcaacgacgggttcaagccgtattacatcgtcgacggcgacaagaagcgtacggtcagcgaactcaaatcggccctgaagaacgccgacgaactctatctggcgactgatgaggatcgcgagggcgaggccatcgcgtggcacttggtgcagaccttgaaacccaaggtgccggtcaagcgcatggtgttccacgagatcaccaagaacgccatcaacgcctccctgaacaacacgcgcgacgtggacggcaatatggtcgacgcacaggagacccgccgcatcctcgaccgtctgtacggctatgagctgtcgccggtgctgtggcgcaaggtgggcccgggcctgtccgccggccgcgtgcagtccgtggccacccgcctgatcgtggaacgcgaacgcgaacgcatggcattcaagcgtgtgccgtactgggatatcgtcgccatgttggccgcgcctgacgcgctgggggagcgtgccgaattctccgcccgcatgatcgcgctcggcggcaagcgactcgccggctccaaggatttcggtgccgacggccagctgaccccggacgggttcgcggcgaacgttcgccagcttgatgaggctggtgccactgccgtggctgaagcgctgaggaccgccgatttcactgtgatgtcgatggaaaccaagccgtaccgccgccgcccgcagccgccgttcaccacctcgaccttgcagcagaccgccggcaatcgcctcggcatgggtgctcgcgtcgtgatgcgcgcggcccaaagcctgtacgagaacggctacatcacctatatgcgaaccgattcggtgacgctgtcgcaggaggccatcaccgccgcccgcaacgccgtctcctaccatttcggcgacaagttcctctccgccgagcccaagcagtacgccaccaaaaccgctggcgcgcaggaagcccacgagtgtattcgcccggcgggctcgcgcttccacgacccggatgagctggcttccaaacttcccggcgaccagctgcgcctatacacgctgatctggcagcgcacgctcgcctgccagatggctgacgccaccggctccaccgccaccgtgcgcctgtctgcgccggccggccccaccgagggcgaggccgtgttccaagcgtccggcaccgtcatcgaattccccggctttatgaaggccacgggggaggggcgcaagcccaaagccgccgctcccggcgctggggctggctcggaccaggctgctgccgccggcaagacggacgtcaaggccgtcaggggtgacgcctccgaatccaacacctccctgccgccgatgagcgtcggccaacaggtcgaggcaagcgacatcgaaccggacggccatgaaacccagccgccggcccgttataccgaggccacgctggtcaagacgctggaagccaaggaaatcggtcgcccgtccacctacgcgagcatcatctccacaatcatggatcgcggttacgtatacgagcgtggccgtgcgctgatccccagctggctcgccttctccgtgaccaagttgctcgagacgaacttccccaagctggtcgactaccagttcaccgccgagatggaaaacggccttgaccgcatcgcccacggcgaggaatccggccgcgactggctcacccacttctacttcggttccggcgagggcgccgcccgcaacgccgacgaggcgcacgaaggcctgcaacagcaggtcgcgcagctcggcgagatcgacgcgcgcgccatcaacaccatcgacatcggcgacggcctgcacgtgcgcgtcggccgttacggcccgtatctggaagacatggagcatctggacgtcgaaggcaacccgaagcgcgcgtctctgccggacaccatcgcgccggatgagctgacggtggccgtggcccgcgatttgatcgacaaccactccggtggaccgcgcgagctgggcgttgacccggtatccggcggtaccgtcgaggtgcgcaatgggcgtttcggcccgtatgtggcgctggtgccgccggctgaggcttcggctggcgctgctggcgatactgctggtgcttctgcggccaagaagggttcgaagaaggccgcggccgccgccgcgtcgcgcccgaagatggcctcgttgttcaagacgatgagccctgaatcgctgtcgctggaagacgcgctaaagctgctgagcctgccgcgcgaagtgggcacatacgaggaaaccaacgccgaaaccggcgaggtatccgaatgcacggtggccgccaacaacggtcgctacggcccctatctgaccaagacgggtgccgacggcaagtcggagacccgctcgctggcctcggaagacgagatcttcacggtcgatatcgacaaggccaaagaactgttctcgcagcctaagtacggccgcgggcgtggccgtggtgccgccaagccgccgctgcgtgatttgggcaaggacccgaacaccggcaagaacgtgaccatcaaggacggccgtttcggcgcgtacatcaccgatggcgagaccaaccgcacggtgccgcgtcagtacacgcctgaatccatcacccctgatgacgccttccgactgctcgccgaaaagcgtgcggctggtccctccacccgtggccgtcgcggtgctgggcgtgcaggtgccgcgaagtcgggagccaagggagccaagaagggcgctgcttcggctgcgaccaatgccgccgaggccaagcgcgccggacgccgtgccgaggtgaagaagctggcaaacaagggctggtccaaccagcgcatcgccgaaaagctcagctccaccgccgccaccgtcaagaaggatgtcgactggctgaccgccaacgagggctacgagcgccccgccgtaattcccaagcgtggctgagcggaattattgctctacttgcgtttcaaggggctgatttctcgttttgagaatatctacttccgcttcaaggggctggtcatctgctgaaccacgagtatgaacggctccgcgccaacgtcattccgccgttttgggacgttgtctacttgggtaacagcccctcgaaacggaagtagaccttcagaaaagaccaaatcagccccttgaaacggaggtagagctggtttaactgcctgttgggcacaactctgcgcctaacgctaaggtcaatagcatgagcggtctgtttgtttcgtttgaaggtgtcgatggcgtgggcaagaccacgcaagtcgagcggctgcgtgcgtatcttgaggctcaggggcgtaccgtggtcgttacccgtgagccgggaggcactgcgctaggcaaggccattcgccaactgctgttgcacggtgtggatgggggcgccgtcgacatcgcaccgcgcgccgaggcgctgctattcgctgcagaccgagcccagcacgttgccgaaaccatccgcccggcattggagcgcggtgaagtggtgatcaccgaccgctatttagactcttccttggc

SEQ ID NO: 2828 - DNA, 4386 bp, Unknown
  R36_18m  MAG No. k141_25233
ccctgcgcaacatcgccgattactttgtgcgcagcgacgccgatccggaaacgtatcttggcaagaactccagcaacttcagcattggcgcattggccggtgccgaatgcgaacgggagtttgccgcacgattcgatgtgcgtgacatactcgacgcatacaatgccgtgcccggcctgcacccaatcggtcggaacacgctggtccgtctgatgggagcactggtcggagggtggccggaaggcatggacgagcatctgaccgtgagactgtccgggcgcatcgaccgtatggaaacccgcgtactcgcagacggcggcgaatgcattcgcctcattgactacaaaacaggcagaacgcccacggtcaaacagattttcaatgatctgcagctcgtgtgctatcagcttggcctcgtgttccccgaagacgggccgcgcggtgccaaggcacttgccgcaatgccgcatatcagccaaagcgcgctgttccatgtcgggcagaatgcggcaccagccagaagctacgccccggaaggtgccttccagccgccgctgttcactgatggttcgttgaatgccgaaccgttcacgccacgatactggtataaagaccccaaccgtttcttcgacatacccgccatagatccggctactcctcccgaaggtgtgagtgccgaagcgtgggcgcaattcgccgcgctcgccggtacgcagacgttatggtcgctgaccatgatcgcccgcgtattctatgccgcggcggccagcaggtcggccaccatcgaggcccatccgcaagacacccatatcggattctgccgtatgaagaacgtctgccctgcctgtgcgggccagatcgacacgattttcgaaacgaggcaagcatgagcacgttcactcccagtgcggaacaggccgccatcatcgatgcgccagtcgatgctgacgtactggtggttgccggtgccggttccggcaaaacctttacgatgacccaacgcatcatcgcgcttatcaatcgaggtgtggcacctgaacgcatccttggcctgaccttcacacgcaaggccgcaggcgaactgctggaacgcgtctccgccgcagtggccggtgatatggcgggctctacgaccgccacggtgtctgatcgggcattcctcaagccggccattttcacgtatgacgccttcttccagaccatcgtgcgccaatatggactgcttgtcggattcgatcagaacacgcaaccattgagcgcagccggagcgcttcaactggccaccgaagtcatcgacagtcacatggatctggcgttcagtgaggattttggcgccttctccagtttggcgaaccgtgttctggcgttgtcggatgccattggcagtgccatgatcggtgccggctgcaccagcttcgatgatgcgatcaatcaagtacggcaatgggattcggcattcatcaatcgattgcagcaagccgtcgtagacgaacccatgcccgaggacgagccgaaaatccccaagatcaaacgactgaagaaagataccgacgccagctggcaagccaagctcgatgaccgtgccgaacatttgcacgcccgctgcgcctatcattgcggtgcgctgctggagaccacacgcaaacgcgatattctgctccagctggtggaggcctatgcccaagccaagcgggaacgcaatatggccgaattctccgacttcaccattgccgcgtatcagcttatcgagcgcttcccctccatcggagagcgtacgcgccgcaggtacagccacgtgctgctcgacgaatatcaggacacctccaccacgcaggccgctctgctggcagcactgttccatgtggatgcgtcacggaggtccgccgtcaacgcggtgggtgatccgttccagtcgatttacgcatggcgtggtgccagccctggtgcattccgtatgttccagcaagatttccacctgcctgccggatacaagccattcccgttgtccgtcaccaggcgcaacagccgtatagtgctcgaagccgccaataatctcacgctgccgttgcgctccaatccgtcgcgtccctccagctcattgatgcgtgaggtcgatgtctcatcgctcgaccccatgcctgatgcccccgaaggaacattgggagtactgggcttcgccacggccgggcaggagatcgacgccgtagtgcgtttctgcaagacggccatcgcacggcaccgttccgcagccgaacaacaggaacagatgccgggcgaacagaaagcgccggtcgccgtgctgtttcggtccaaatcacatatgcccgaatatcaggcggcattggaacaggccggattgaccacattcgtggtcggctattccgcgctgctggaacgtccggaaatccgcgatctgatggcgttgctgcacgtggccgccgaccacaccgatacgggatcgctgatgcgcttgctggccacgccacgattcaccatgtccgcagcggatttgaccatgttggcccgttttgctgaagaacagaacatggaacaacgcttccaagcattggtgcaggccggccttgcccaaccggatacaccagcgaatgaatgggcggctgtggtgcgtgagtaccgcgatcaggtggccaatgcggtattcctgccagacgtattgctacgcggcgacctggtaaaactgcttgaacggttgagcgcacacgggcgcaacgccataacccgggccgcggtgatgctccgtcaggtgcatgatgccgtcgggcggccactgggcgacgtgattcgcgccggcatagaagcgttggatcttgacatcgacaccgtattggccggtgtgctgcataatccgcagcaccgcgccaatcccgctttggcgcatatgcctatggatgcgattgtggatttggtggatacgtacacgcaagagattgccgctgagcaaactccctcgttgcatgggttcatcacatgggtggatcatctggcttcggtggaggatgaagccgccagtctccccgacgctccggtggatgtggaactgatgaccgtacaccagtccaaagggttggaatgggatgccgttgcggtagtggggcttaccgccggcggattccccagcaatcagggcgaccatctcaagatcgtgctggacgaacaccatacgggaggcaccgagcaaggtcactggaccgcacccgaatatcacgagaccgccgactcctggctcaccaaccccaccgccgtgcccgtgcctatgcgcgccgatgccggcattttgccgcgattcccccatgatgccgatgtggaagccgaccccatcgcatcgttggcggctttggatgatgtggagcttatcgatgatgaagtgttcggctccatgcgcgaattcggcgatggcgtggaagaagtggatgcatccggctggtatttgacgcaggcggaggaatatgggcgccggctgcatgccgacgaacgtcgattgatgtatgtggcgcttacccgtgcacgggaagatgccctgatgacctattgcgcctatacgggtgaatccgggcgggacccgtcagtggtgcccaaaggctctcgcgccgctcagccatccaatttctggcttgaagtgcatgacgcgctccaagcccgtgaacatgcgatatcggctcaggactgtgtggaacggctgcaagccgccaatgccgggaagcccatgctgatctcggcgcaaggcgaagcgattgcccctcccgaagggttctttatcggagagcatgccgcggcatacagtgacgccgtggtgggggaggcgtggcaaacgccgattacgcagacgaatgccgccgccgaattgccgtggccggctaccctcagcgacgcagtgcatgaacagctgtcacgtggcatcgatgtcatagccgcagattcctcgccacttgagcagcaccaagacaccggcccactcctgcaacgggcacaattgctggtggacgacgccgatttgatggccgatgccgccagcggccagtcgcttgatgaggcagtcaaagccaaggcgcaacgcgttctggccgcaggacgccagaacgtgacaagcctgcaagcccgcgtaggtggcatgagcgaacgggaggagcgcctctactggcgtagcattatccgcccgattccacgaatatcgtctccggcggccgaggccggcacgcagttccatgcgtgggccgagcaattcatcaatgccggtaagccggatgaagcggtactggcatatgaagccgaaccaagtatgccgcatacaggtcaggatgcgggattcgtttcccgggaagccatgttggccgatttggccgaacgggagcggcaatgccgcaagcc

SEQ ID NO: 2829 - DNA, 4468 bp, Unknown
  R36_18m  MAG No. k141_25356
ccccgaccagtaccagcgcaccatctgggccaacgacatcgagcccaacatcaagccgggtgccgccgtcgcgttcgctcatggcttcaacattcactacggctacatcaagccgtctgaggatcacccggtgttcatggttgccccgaagggcccgggccacatcgttcgtcgtgagtacgccgctggccgtggcgtgccggtcgtcgtggccgtcgagcaggatccgcgtggcgacggctgggctctgaccctggcctacgccaaggccctcggtgccctgcgcgccggtgccatcaagaccaccttcaaggaagagaccgagaccgatctcttcggcgagcagaacgtgctcatgggtggcgtgaacaagctcgtcgagatgggcttcgaagtcctgaccgacgccggctaccagccggagatcgcctacttcgaggtctgccacgagctcaagatgctcgtcgatctgatgaacgagggcggcctgaacaaggctcgttggtcctgctccgacaccgcccagtacggcgactacgtcaacaccgtcatcaacgaggactgccgcaagcgcatggaataccacctgaagcgcatccaggacggctccttcgccaaggagttcatcgacgatcaggatgccggcgccccgcacttcaaggaactgcaggagaagtactccaacgagcgcatcgagaccgtcggcccgaagctgcgcgccatgttctcctggaacaaggatggcgtcaaggatgccgacgaggccaactccttcaccggcaagatcgcccgcgcccaggttcagtgagcccctgtagctcccgctggcgcgtaagcgcctgaggagagtacccagcacgtaccaaaaggccgccgctccgattcattcggagcggcggcctttcgcatggtcccaccatatagtcaaacctccaccacgtagtaaaatccccacgacgtagcaaactacccaccacgtggtgacgcaaaacggctttattccgcggaatacaaaattacgctgacatcgtggtagaagattcatcgcgtggtgggatagacagttgatatacgccggctatcaaatcaatgatgccttgctgtgttccccgtatgccgagctgcttcatcggaagcgtttcatgggatatttccccaagaaaatcagcgagatcatggtaggcctcgtcgttgagagacacgcgatcctctggagcaagtagttgagccaaacggaatacatcatatttatgcttcttgagatcttttccgtctacgtgctcgccatgttgttctcgggcgttgagatccaaccatgctttcgccttgaaaggaatgagatatttctcgttaagcacgctgatgccttgtattgattcgcggccttgctgcagtagccgatagtagctgtcgttcagcatgatggctgacaggctggaaacgtcgtttgcaatatgcaatggcgtcaggaacgagttcggcacaatagggaagtcagggtgacgtgaaaatagctcgatcatagtgggatacccgtacgtactggggtgcatgaaacggtacaggtgaggctgtgcggagttcttcgtgatagaggtgtatccgccatcgcgaatgaaagaccacaatcgttgtgcaaactcgcgaagatgtccctcggcaatcagcaccatgtcaatatctttggtggctcggaagtccaggtcgttgtcggtcatgatgatgtcacaagcggtgccgccgatgattacgtaagaatcttcgtagccggcaaaggccgttctgatgagctgcaggccttgtgtcatattgtcactcctgagaaagtattgcggatggattcttgtatggcgtcttccaaacgttcgtcggcaatctcgccaagagtcagggccgtggaaatggggtcggcaaggtagtcttcctgcgtatattgagcaagtaggcggggatcgtacctccacagctccagaatatatgcattatctggcaccttttccaaagcggggtcgataatgcatagttccttgttgtgctgcttgagccaatgacgttcaacggcatagattcgcagttttggggtggccagttgcgtcctgcgcgaaagagcaaattcgccggccggaatcagctcgtcggcaatcatctggcgattgcgattcgtgacggtatatttgctgaatattggtgacttcaggagatgccaagatgatttcagtaaatcaagtcggctggtctgccttgaagtcagtagttcgacgctattgctgcggccttgcttggtgcggtgcacgaatgccagctgttctaacagcgtcacggcaacgctgacctgagcttcggtaaactgaagcgctcgggcaatatctgattggactttgctctcgttggagtagagcaaatacagccagaccagctgtgttgcgggggagaagggtcgcacctcgatatcctgtgcgttctccagcgaccgtgaggagatgcgctgggtgaacaccatgcccagtgaagggatatacagttgggtaccgggcacgatgaaaggaacgtgattctgaatcaaggcttttcgctggtatgcagaaagccggggaaactgaaagacaatgggcagatccgtccgctgctcaagcctgctggcgtcggcggtgacgcgtgtgatgctgaatgggtgagcctctccgctcgcgattagcatgctcgtgttgtcgatggtgagtttgctgaatgtccgtccgttggtcagaaatagcggcagtgaggcagtgccatcccaagaagtgatttggcagggcagaccaagtgtctcgcgaatgtaatgctcggcatccatgtcgacctcaatccttaacgaaaatctgtaagattcacatctcttgttaagtatatagaatattattaagtatttcggggttggcatgtcgcgaatggaaagaaagggcagtcatccccgaaatggagacagcttagccgggaaaaaggacgacgccagcatccggagaagatggatgactggcgtcgggtaagctcgcaaaagctctacttgataacccacgcagaagtgtcggtggggagctggccttcgggggtcagcgggccggacgccagcaccacggagccatcgggcagcgcgaccggggcattgccgaagttggtgattgaggtgaacacccgcccgccaaccgccgcgcgggtgtacgccaccacatcgtcgcccatgtccacctgctcggccgtggtgtcgcgcgtggcggtcagcgactcctggcgaatcgccagtgcggcgcgatacagcgcgagcatcgagtccgggtcggcttgctccacgtccaccgcgtaatccttgaaccacagcggttgcggcaggtgcgggtcggcggccggcgtcacgccctcagcgcgcgtagccggcgagaagccgaaggaagcgcccgtgccgaactggccggcggcgcacagcggcacatggttctcgccggtaccgtcatcggccggagtcggacggctgaagtcggccaaggccggctcatcggcggcggtccacggcagcggcacgcggcagccgtcgcggcccttgtccatcgtggcctgagcagtgtggaaagcggtcggatcctccaagtgatcccacggaatatcggccacctcaaacaggcccagctcctcgccctgatagatataggcggcgccgggcaggccgagctccatcaaagcggcggcgcgggcgcggcgagtgccaagctcgcgatcctcgggataggtagtgccgttgcgcagcagccagtcgtgcggcagctggtggtagggcgcgcccttgatctgcggcaggccgtaacgggaggggctgcgcggcacgtcgtgattgttcatgacccacgtggtggtggaaccgccggtttcggccgccgccttgagtccggcggcgatggcctcgcggaactcgtcggcataccagttggcttgcgcgaagtcgaagttgaaggactggcccagctcgtccatcgaagcgtacaggtgctggtgctcgggcaccacccacgcctcggccacggcaaagcgcggcgggttgtactcgttgaacaccttgcgccattcgcggtagatatcgtgcacctcgcgacggtcgaacagtgggtggctgaagtcatgattcagcacgccgaccacgctgtattctcggccgagctcttccaacggcttggattcgaggtccttggccaggccgtgcgccacgtcgatgcggaagccgtcggtgccgtggtcggaccagaaacgcagggtcttcttgaactcctcgtggatgtccggattcttccagttgacgtccggctgcgccttatcgaaccggggcagataccactggccgtcggccacgcgcgcccaggccgggccgccgaagaaggattgccagtcgttcgggggcagttcgccatgctcgccgcggccgtcgcggaagatgtagcggtcg

SEQ ID NO: 2830 - DNA, 8570 bp, Unknown
  R36_18m  MAG No. k141_25742
atgccgtggaagaactcgtggagctcttcgtcggagatgcgggacaggatggtcgggttggcgatcttgtagccgttgaggtgcaggatcggcagcacgataccgtcggtgcgcgggttcacgagcttgttggactgccaaccggtagccagcgggccggtctcggcctcgccgtcgccgacgatggccgggacgaacaggctcgggttgtccatgatggcaccgtaagcgtgggacagagcgtaacccagctcaccaccctcgtggatggagcccggggtctccggagcgaagtgggacggaataccgcccgggtaagagaactgacggaagaacttctgcagaccagcttcgtccttggtgatcttcgggaaggtctcagtgtaggtgccgtccaggtaggactgggaggtaccggccgggccaccgtggcccgggcccatgatgatcacggtgttctggccgtggtcagcaatgaaacggttgatgtggccgatgaggaagttcaggccaggggtagtgccccagtggcccaccagacggtgcttcacatcttcgcgggtgaagggctccttcatcagcgggttggaacgcagataaatctggccgatggaaaggtagttggcaacgcgccagtacttgtcaacgccttcgagggcttcctcggaaaccggagcgttgagcttcttccaaggggtgccaataacaggactcgtcatgtgtactcctgtactcctgcacgtgatcgtgcgattgattatttctgttcggtcacggttcctgacccttgcggtgccaaggttttccgttcccaatcaatcgtcatggtacgaggacaacgcgacttttgaacgatttcttgcgggtgtgttcggaattgttgcggaaatttcagtatttgtgcggttcaactgaccgtttgtcaccattagttttttcaacatactttttcaaaacggcggaagcatgcggaaatccagcatttggctagagcagcgcacgttcgatttcccatgttcgaaatcggcgtgttgtccgactacaggcatgtagtttgttcgatttacgcacatagtctctgcgtgtcggccttgtcgccttgaccagtgataatcaggtgtgttcagcccacgtaaaattccaatgaacgttaggggaatatcaatggcaaacggtcctgtgcttgtcgtcgacttcggcgcccagtacgcccagctcatcgcccgccgcgtgcgcgaggcaggcgtgtactccgagctggtccctcattccatgccggtcgacgagatcctggccaaggatccgaaggcgattattctgtccggcggcccggcctccgtgttcgagcccggcgcgccgaccatagataccaaggtattcgaatccggtgttccggtgcttggtatctgctacggcttccaggtcatggcctatgagctcggcggcaaggtggataaggccgcgctcggcgaatatggcaagacctcagccaccatcgacgacgccgacggcatcctcgccgactcccccgccgagcagaccacgtggatgagccacggtgtggcggtcgaacaggccccggccggcttcgaagtgctggcccacaccgaaggcgcgcccgtggccgccatggcggacgaatcccgcaagctctacggtgtgcagtggcacccggaagtcaagcactccccgcttggccagaagcttatcgaaaacttcctgcaccgttgcgccgcgctgcccaacgactgggacgcctcctcgattatcgaggatcaagtcaagaagatccgcgagaaggtcggcgacgccgaggtgatctgcggcctgtccggcggcgtggactccgccgtggccgccgctctggtgcacaaggccatcggtgaccagctcacctgcgtgttcgtggaccacggcctgctgcgcaagggcgaggtcgagcaggtcaagcacgacttcgttgccgccaccggcatcaagctcatcaccgtggacgcggccgacgacttccttgaggccctgaagggagtctccgagccggagcgcaagcgcaagatcatcggtgagaagttcatccgcacgttcgagaaggcccagcgccaagtgcttgaagaggccggcgcgcgcggcaaggaagtcaagttcctcgtgcagggcaccctctaccccgacgtcgtcgaatccggcggcggcgacggtgcggccaacatcaagagccaccacaacgtcggcggcctgcccgaggacatcaagttccagctcatcgaaccgctgcgcactctgttcaaggatgaggtgcgcgccatcggcaccgagctcggtctgcccgacgaaatcgtctggcgtcagcctttcccgggcccgggtctgggcatccgcatcatcggcgagatcaccaaggagcgtctcgacctgttgcgcgaggccgacgccatcgcccgcgaggagctctccaaggccggtctcgaccgtgacatctggcagtgcccggtcgtgctgctcgccgacgttcactcggtgggcgtccagggcgacgagcgcacctacggctcccccatcgtgctgcgtccggtgagctcggaggacgccatgaccgccgactggtcccgtgtcccctacgatgtgctcgccacgatctccacgcgcatcaccaacgagtgccgccagatcaaccgcgtcgtcctcgactgcacgtccaagccgccggccacaattgaatgggagtaattgctctctgtgacgaatgggattctccatcggggaatcccttttttgttgccgacgatgcccggtataatttttccgcttacgacgtcgtccggaaagggatgccgacctctttgcgccagggattcgacaacgaaaaatacatcgaactgcaagccgccaacatctcaacagcgtgaaccgacgcttgcactcggatgaaacgctgattgcattgtcaatcaccagcgccaccagtcctgtggccgctcgcgtcatcgacgggctcaaacagttgcagggctgcgacgcctttttctccgttatcatctcatccacggacgaggcgttgtatcgcaaactcggcatcaacgtgtgctgcgaaccgaagtacgaacgggtgagtctgtatcaccggtaaacgccaccggtaagcgcggtatgccgcgaatcgtcaagccggtaatcatgcagcatgcggcctgacgattcgctgctgtcgcattgtctctcccctctaccatgctgggcttgttttccgtttgttggagagaacgggggacgccatcagcactacggtgagagaaggattatccgtgaagcggttcgtgggtctagacggtattaaaggactggcgctgatagccattgtgctgtaccactgcatgcagcaactgctgccaggcggattctacggagtcgacgtgttcttcaccgtctctggattcctgattgccgtcagtttgattcgttctctggcgaaaaccggatcgctgaatctcgtgcgatatatccccaagcgtgcagtacgtctctatccggcgctgtttctgctgattccggtcaccgtctccgtcggctggctgctcgatcacgacattctggtttccatccgcgatcaggtcatcaccgtgctgctgggctgctacaactggtacgccattgccggaggccaaagctatttcgaccaaatgaacccgcaggtgtttcgccatctgtggttcattggcgtgctcatgcagttctacgtcatcgtgccgttcatcgtctggctgatgtggaagctccgccagacgaaactgccctcactcatcccactgggactcgcggcgttcagcagtatcgccatgtgggtgatgtacgtgcccaagggcgaccccacccgcgtctacttcggcaccgatacccacagcatgggcctgatgctgggtgtggctctcgcctggtgggtcaccgctcctcagttgggccacgctcgtcagggagctgtgccgatgccccgcaccattagatcgagcgcttcggccgccacgtaccgggctccgttacctcagattcctgtaaagcatcgcatctggaatgcgacggcaccggtattggcattcctcagcctgattgccttggtcaccatgacggttatcggcaaacaggatgcattcgccttccgcggcggcatcatattgtccagcctgttgtccgtgctgctgattgccggtaccatctccgacgattcctggatgcaaagcctcatggtgttcaagccattggccgccctcggcaagtattcgtacggcatttacctgtggcactggccgttgtggattctttccagcgcccttgccccgaagatcttcaaggcagcagggccttggcctctcatcatgaccgcgttgctcaccgccattgcggtgatgatttcctggctgatggtggagaaaccggcggcaatgcactcggtgatatccgtcgtggtgccccttcgcacgaacaagaagaatcatgcggcccgggttattgccgttgacgttatcctggcgctgtcgttggtcggctgcgcgcagggcattactcatgcacctgcgaaaaccgccatgcagatccagctggagcaacaggccgcacaactggaacgcatacagaaaaccgaacacgtgctgctgcgccatgccgtgccggcaccgcccaagcccaagcatgagatgcccaccggcgatcagattaccgccataggcgattcggtgatgctggcctcatcacagggcctttcggaagtcttccccggcattcagaccgacgcgagcgtttcccgctccatcatggtcgcccccgaactcatcggcaatgatctgtccgccggcagtctgcggcaatgggtgctgatcggccttggcaccaattcggcaatcacccctgatcagctggaccagattcgtaatatgatcggccccgaccgcgtgctggtactggtcaatgcccacggagaccgtacgtggattccacctaccaaccaggtgcttgccgactatgcggccgcacatccggacaatgtggtgctggtggattggaatgccacagccaacgcgaacgcgcaggtgctcggctccgacggcatccacccgagcatggatagcgatatctatgcaaaggcggtcaaacaggccatcgaacaatggatcgcaagcggcaggtgaacggcaggcaacgctgagttgtccaaccggtcgtgaagaacggctatgctgaagactgcatcaacgagaccacacgttgggagacatggtgagcgcaatccttgaagggaagcccgataagaatcttattctcgttacgggaaggattcatccgaaattggctgaggatgtcgccgagcagctcggcatcgacgtccttgaaaccaccgcatacgatttcgccaacggcgagatgtacgtgcgctacaccgaatcggtgcgtggcgccgatgtgttcgtgctgcaaagccactacaaacccatcaacaaggcgattatggagcagctcatcatgatcgacgcattgaagcgcgcctcggcccgttccattactgcggtctgcccgttgctcggctactcccgtcaggacaagaagcaccgcggccgcgagcccatctcctgccgtctggtgttcgacctgctgaagaccgccggtgccgaccgcatcatgtcggtcgatctgcatgccgcgcagtcccaaggcttcttcgacggcccggtcgatcatctggtggccatgccggtgctggtcgactacatccgtgatcgtttccaaggccatctcgacaacgtcgccgtcgtctcccccgacgccggccgcattcgcgtggccgagcagtgggcgcagcgtctcggcggcggtccgctcgctttcgtgcacaagactcgcgacatcacccgcccgaaccaggcggtcgccaaccgtgtggtcggcgacgtcgccggcaaggactgcgtgcttgtcgatgacctgatcgacaccgccggtaccatcgcgggcgcatgccacgtgctgcaggacgcgggagccaagtcggtgaccgtggtcgccacgcatggcgtgctctccggcccggccgtcgagcgactcaagaactgcggtgcgcgcgaggtcgtgctgaccgacaccgtgccgattcccgaggaaaagcgctgggatggcttgaccgtcctgtcgatcgccccgctgctggccagcgccatccgcgccgtattcgaggacggctcggtcgccgaactgttcgacacctaccccgagcaccacggtcaaggcttcctgttcgcctgatcacgtgcgtgtttgttcaaggaaagcacacgatgcgagacgcgacatggcgtagtctttcggtaaataccgacagtatggtataaatgaacacttgtgggccgaaagcccacgactcccccatggtgtaatggcagcacacgggtctttggaaccctttgtcttggttcgagtccaggtgggggaacggctgacggccgctcgacatccgggcggccgtctattgttttgaggtgtttccaccctcaatagacattccgatcgaagggaatacgtcagttatggcattatccgcagccatcgtcctcgccgccggcgagggtacccgcatgcgttccaacaagccgaaggtgctgcatacttttgcaggcaagaccttcctgaacagggtcatggattcggtggccgtcctgaatcccgacacgctggccgtggtcgtgcacttccaggccgagcgcgtcgccgaagccgcccgctcctatgacgagcaggtcaccatcgtgaaccaggacgacattcccggtaccggtcgcgccgtgcagtgcgcaatggcacagctcaccgaggctggcaaggtcgatggcccggtgctgatcgccgcctccgacatgccgctgctcgacagcgagacgctgcaccgcctggtcgaattccacaccgcctccggcaacggcgccaccgtgctcaccaccatcctcgatgacccgaccggctacggccgcatcatccgcgatcgcgaaggcaacgtgctgcgcatcgtcgagcagaaggacgccaaccgcagcgaactcgccgtgcaggaagtgaacacctcggtctacgtgttcgaggcttccgtgcttaccgaggcaatcgccggactgaagtcgaacaacgcgcagggtgagttctatctgaccgacgcgctggaaaccgccaagaccgctggcaaggtcggcgcgttcgccgctccggatccgctcaccgtcgaaggcgtgaacgaccgcgtgcagctggccgcgctgtccaagacctacaaccgccgcgtctgcgagcgctggatgcgcgacggcgtgaccattcttgacccggaaaccacttggatcgaggacgatgtccagatcggccgcgacgccaccatcctgcccggttccttcctgcaaggccacacggtggtcggcgaggacgccatcgtcggcccgtacaccaccctcattgacgcaaccgtggacgaaggtgccgtggtcgagcgttcccgcgtgcaggaatcgcacatcggcgcacgcacgaacatcggcccgtggacctacctgcgcccgggcaacgagttcggcgaggatgccaaggccggcgcgttcgtcgaaatgaagaaggcgcacatcggcaacggcaccaaggtgccgcacctgagctacgtgggcgacgcccagctcggcgaccacaccaacatcggcggcggcaccatcaccgccaactatgacggtgtgcacaagaatcgcaccaccatcggctccggctgccatgtgggcgccggcaacctgttcgtggccccggtcgaggtcggcgacaacgtgaccaccggtgccggctccgtggtgcgccacgccgtgccgagcgacacgatggtctactccgagaacacgcagcacaacgtcgagggctggaagcccgcctgggagcgctgaaccatgcccgcacttcaggattccatcaacgccgtccgcgtggccgccgaggccgcagaccgtatcaaggccaccgacatcgtggccttcgacgtagccgacctgctcggcatcaccgacatcatgatgatcgccggcgcctccaacgagcgtcaggtactggccgtggccgaggaaatcgaaaaggacctgtcccttaagtgctccggccgtcagccgcgctctcgcgagggcctgaccgagggccagtgggtgctgcttgactacggtgatttcgtgattcatgtcatgcacgaggaatcgcgcgaattctacgggctcgaacgactctggcgcgactgcccggccatcgatcttgaactcgcacacccggaaacggcggagcatgcggaagatgctgccgtcaccaccgcgtaacgtgcgaatcacataacgctgatattcgctgatattcgcgtgtcgggctgcctgttgccgaacgtcattgacggcatcaggcagccctcccctttttcctgtttcctcactggaaccgaaaggatcgtcactatgaccaatcatgttcgttccgttttccttatccgtcatggacgcacctcctacaacgccgctcacaagctc

SEQ ID NO: 2831 - DNA, 3536 bp, Unknown
  R36_18m  MAG No. k141_25755
agcttcttcagaccgcgctcatccagctcaggatcggcgatgaacatcagttcgtacttgtgcgcagacatcacccacctccttcggactattcggccacggacgttccgtggcaggagtgtgtatgcgtgttagcccatggcgcagcaccaaaccggcaccgcatcttcgggcaacttggacagtctatatataaggcgggacagggtatggccatattcctgccggtttcgcgatgcccaccattttggccaagcccgcgcagccaagcccgcgcagccaagcccgcgcagccaagcccgcgcgccatcacccagtattgtccatttcgagcctcgccctatggtcatggcgctgattttgcgggtacgatagtgctcgaagaagcatcagaagaaagggggactatatgttctgtcctaattgtggcgcagctgtgcgcgaaggagcgcaattctgcggttcctgcggcaaccatcttgccgcggcgtcagctccagcagcagcgacgcccaccgcacccacgcccggtcaacccaccggcgccgttcccacgaccgcacagcccgcggctcccgcaccatcgattccgttgcccggcgcagcggctgtgcagccgacgcctcagcccgctgcacagccgcaggcccagcccgcaggcggaccggcattcaccgcaccgaccacggccattccgaacccagggcagcccggcccatcgccggctcccgccgctccggcacaacccatctcttccagtccactggtcaaggaactgttcggcgcccccaacatgcagactatcggcattgcggccggcatcggtacggcagccgccttggtgctttcgattttccctgcaatcgcaatgaattccatgagcaccgcagcacccagcctcggggccgattcaacactgaaccaagccgttggcggcatgttcatcaccggcaacggcatgaacttcttccactacctgttcctatcgttggtcatgggcctgtctggcggtattcatttcgacatcgtcgacctctcatcctccagcatggacgccagcaacatgatgtcgtacccactggggctcaccggcttggcattgctggtcggcaccgcattcggcgcattcatgctggcccgttccaagagcattcgattcaagttcaccggcctgatctccggctttatcaccggattgctgccggccgtggtcatcacgctgcttgcggccatcgcggcggcaccactcgccagtggcaccaccatcgtggccaaggtgaccggcgccacagtgcgtacgttctttatggcctacctgctctccgcgctcggcgctctggccggctatgcactggcccaatatgcttccgattccaagaatgtgttcggagctacttggcagtgggcacaccgcgttcgcggatacacgcgcacggtggtcagcgtcttgagcttccagctggctttgctcttcatcgtcggcctggtggccctgttcgccgtggcattctcctcaggtcagggaatcctgatactgacgttcccggtcacactgctgatgatcggcgagttcttctttacctggggaaccttcggcgccattacactgaccgagtccggtcagctgccgcaggatctcagcctgttcagcatcaacctcagcgttaccgtatggcctatttggatcctgttcgccgtgttcctggtcctcaccttctacacggcattgcgcgtctccgcacgcaacctgtacgaccgtgcctacatgggctggcagcactgctggaaagccccgatcgccatcatggtgttctgggcgattgccacgctgctgatgggtactatgggcaaccgcacctccgtcacgcaagttcagaccatcggacctgccatgtggtacttcctggtcatgggcctgtgggcattcctggttgaggtcgttgcgctgacgttcggcccgaccatggtggtttccatgccgggactgcgggcactgcttgtaggcggcactgtgcgtgctacgcctcagccggtggtcgactacatctatgccagcggcgcaatggtcggcaagtggcccacgtggggcacgccgagcgccggtgtgggtacgggcgcaaacgctgcgcagcctcacgtcaacgccacgccgacgtccgccggccagcctcctgttgccggtgtcggcgtacccgcgcccgctgccccaggcgccccagccgctcctgcaacccccggtgctccgggcaccgcattcgcaaccgcggctcccaccactcccggagcggcaccggtagccgcacctggcgcgacctccaccaccatgaatgagcagcagaagaagatcttcatcatcgttggtgccgtggccggcttcctcgtactgttcggtatcgtgtatggcgtgctgtcttccgccgtgttcagcgcgaagagcgtggcgaacagctatgtggccgccatctcctccggcgactacgacaaggccaacaccatcgccgatcctcacgtggatacgaaccagcgcgcactgctgaccagcaaggcatcctcgggcgagaacacgcacatcaccaacgcgcgcatctcgcagacttccaacaatgccgatggcaccgtgagcgcccagctgacgtacacgcttgaaggcaaggaggtcaccggcgattccatcaagatggtggccaacggcagcaagttcctgatcttcaagaactggaccgtcgccgaaccgttggtcaagaccatttcggtatatgcgccaagctcgctgggcagcatcaccgtcaatggcgtgaccgtaacgcccaagaacgccgtgaacaacgacgcggacgaaaccggcaactaccggctcaaggtgtaccccggcgtctacaaagttggcgtggtgaagtccgactattacaccgccaagaccgtgtctctgagcaccaacagctccgatagcggcactcttgacgctcagcctacggacaagttgacgtcggaaatcgacacggcggtgaagagcaagctggatgaatgcgcggcttccaccgatgcggaaccgcagggctgcccgttcggctactacacctccaattccagccgataccgcaacttcaagtggacgattgacggttatccgaaggtcaccagcgtgagcctgtcggatagctcgttcagcaccgacgaaggtgatgtgacggcgaattacgagtaccgttacagcgatggctgggaaccggaagacgattccagcactttctcggtgtacggcaccttcaccatcaaagacaataaggtcagtgtcgagttctccgaataatttcggcaatctcaacactcttacgaaataggcaccccgccgtggcgttcgctgcggcggggtgcttgtacactggttaaggcgaaaatcacacagcgactcaaacaaaggatgcgaacgcatgtcggcgattcttgaaggcactccggataaacgactcgtattggtcacgggccgcgcctaccccgagctagctgagaaggtggccgaatgtttgggaaccgaa

SEQ ID NO: 2832 - DNA, 14835 bp, Unknown
  R36_18m  MAG No. k141_25784
catgggctaacacgcatacacactcctgccacggaacgtccgtggccgaatagtccgaaggaggtgggtgatgtctgcgcacaagtacgaactgatgttcatcgccgatcctgagctggatgagcgcggtctgaagaagctgaccgagcagtatctggaactcgtcaccaaggaaggcggctctttcgatgagcccgattactggggccgtcgcaagctcgcctatgagattgccggtaagaccgaaggcaactacgtcgtggtgaagtacaccgccgagcccgctaccagcgatgagctcgaccgtgttctgaacctcaacgaatccgtgatccgtacgaagatccttcgtaagggctgaatcaagcgtttagtcagctgaacagctggtattcaaggtaagtaagaaggaccgttatggcaggcgaaaccgtcatcaccatcgtgggcaacctcactgcggaccccgagctgcgcactattggcagcggtgcgaccgtggcgagcttcacgattgcttccaccccgcgaacctggaatcgtcagaccaaccagttcgaggatggtcaggcgctgttcatgaggtgctccgcttggcgtgacctggccgaccactgcgcccagtccctgaagaagggcatgcgcgtgattgccaccggccgcctccagcagcgttcctatcaggcacaggatggttcccagcgaaccgtcgtggagatgcagctcgatgaaatcgggccctccctgcgctacgccaccgcacaggtgacccgccagtcgtccggtcagggcggcttccagggtcgttccggtggtctccagggtggtcagcaacccaatcagggctatggcaaccagagtggccaaggtggttatgccggtggccagggcggttacaacggtggctatcagggtggtggcgctggatactcccagcagcctgccgctcccgccaacccgtccgctcctgcggccgacccgtggagcaatgccggtgcatctgatgccggtagcttctccacgttcggcgcttcctccgatttcggcggcggcgacgattccgacccggagttctgatcagtacttacctccccgctgccagcagcaatcaatatcaagatttataaggagaacatcatgtcacgtaagaggccgcaaccgccggtcaagccgttcaagaagaagccgaacccgctgaaggccgccaaggtcaccgagatcgattacaaggacgtcgcgctgctgcgcaagttcatttccgatcgcggcaagattcgttcccgtcgtatcaccggcgtgaccgtgcaggaacagcgcgagctctccaaggcgatcaagaacgcccgcgagatggccctgctgccgtacgccacctcgggtcgctgagttagggaggctttgaacaatggctgaaaccaaggttattctcaccaagaccgtgtccaacctgggccattccggtgacgttgtcgacgtgaagtccggctacgcccgcaactacctgttcccgcagggcctcgctttcgcgtggaccaagggtgctgaggctcagatcaccgctatgaagcgcgctcgtctggccaaggccgtcgctacccgcgaggacgccgtcgccgctaaggccgccatcgagggcactaccgtcgagatcgccgccaaggtgtccgagtccggcaagctgttcggtggtatctccaacgaggccatcgccatcgctctgtccgacaaggccgcggtgaacccgaaggccatcgaggtcgagaccatcaagaccaccggcgatttccccgccaaggtggccctccacccggagatcaccgcttccttcttcgtgaaggtcgtggccgagtgagtcattccggcctagtgctggaatcacacagaccaagagtctgagcttaagcatcatcccccgtgcggttcgcgccgcatgggggatttttgtattagcaaaaacgccggaaatagacgcgacacgccgagagttgcattcgcttcaaatctgagtatatttatcacctgttgcaaggaacacttcaacatctaaccacgcccctgtagctcagttggttagagcagctgactcttaatcagcgtgtccagggttcgaatccctgcgggggcacagacaaccggaatcgaaagattccggtttttttttccagcatcagtccgtagctggtgcggaaaggccgtcttcgcgcgtgacggccggacgtgtaaggagcggcgtcatgtctcagatattcgcgttcaccgtatccgaccccgaaggcatgcacgcccgcccagctggccggttggttgccaaagcgcgggaatatgagtcgaacatcaccgttgcctacggcggcaaatccgtggatgccaagcgtatcttcggtgttatgggacttgatgttcaacaaggtgacgaggttacggttcgggtgcagggcaacgatgaagctgtcgctgccgcagagttcgagcgattcctcaaggagcacctgtaatgagaacgatacagggcgtcggcgtatccgctggcattgctatcggcacggtccgcgtgctcgccgccgccgatcatgctgtagaacgccgcgtaatcgacgatccgcaggctgagatggatcgattccgcgcggcccgtgacatggccgtcgctcagctcaagcgactgcgtgacaacgtcgccgctgagttcggcgaaaacaaggccgagctgttcgacgcccatcggcttatgctccaggacccggactatgcgggatgcgtcgaaggtttgattgcgcaagacaaggtgaacgccgaatttgcggtgaagagcgtcgccgaacagttcgccgccatgttcgctgcgatggatagctcgaccatgcaggctcgagccgctgatgtcgaggatgtttctcgccgcgtgatgaacgtgctgcaaggcaaacgcgatagcacggcgcaggatggcagtatacaaggcgatgctgtgcagaacggtactgtgcagaacggtactgtgcagaacgggattgcgcagaacggcgaaagccacatcatcttcgcccaagatcttgctcccagcgagaccgcgcagctcgaccgcgctaaggttttgggcctcgtgaccgccaagggctcagcgaactcgcacaccgcgattctggcgcgcacgatgggcctgcccgccatcaccggtatcggcgacgccttcgacccgactgatgacggtcacgttgccgtaatcgacggcgccagcggtgcggtgttcgtcgacccggacgaggccacgctgaccgagtgccagcgcaggaaggccgaagctgaggaacacctgagcctactacggaagctcaaaggcaagcccaccgaaaccaagtccggtcagcgggtccacctgtacgccaacatcagccgtccctctgacgtagccgccgtgctggccaacgatgctgagggcatcggcttgttccgcagtgagttcctgtatctggaacgcgaggactggccgaccgaggaatttcagttcgatgcatacagacaagtcgcacaggagatgggcgaccgtccggtcatcatccgcacactcgacatcggcgcggacaaacaggtcgactacttcaatctggaccacgaggataaccccgcgcttggttaccgggcaatccgcatctgcctgacccgcccggagattttcaaagtccagttacgcgcattgttgcgcgcctcagcatacggcaatatcgccattatgctgcccatgatcacctcggtgcaggaggtgcgcgacgccaagcggattcttgaagaagccaaaagcgagctgcgcggcgagcacaccgacttcaacgagagtatccagatcggcgtcatgatcgagacgcctgcgtcggtcattatggccgacgagctggccgccgaagtcgatttcttctccatcggcaccaacgacctgacccagtacacgctggcctgtgaccgtcagaccccgagtctcgaacgctttgccgacccgcattcaccagctgtgctgcgcatgatccagatgactatcgaggctgcccatcgtcatggcatctggtgcggcatctgcggcgagcttggcgcagacctgagcctgaccgatacgttcctgtgcctaggaatcgacgaactgtccgtctcgcccaccagcgtcctacccctgcgcaacgtcattcgcaaccactgagagtcaaggtcgcttcggctgattccggtggcttttttgggcattgcattcggctggacattcgacatcgcatcctgccagcatttcgtcgtggggcaaagtgtacaatcgccacgtttgctttcgcgcccagcgtaaatcgcgtcgccggctccgcgaacggatttccaatcacacagaatgccgtgaacagtcagccatgcctgttgcgcggcgaagagaaaagaagaagcagtggaatactctctctttaccaagctggccgccgagttcttcggcaccgccattctgatgatcttcggcaacggctccgtggccaacgtcgagctcaagaacaccaagggtcaccacgccggctggttgaacatcgccatgggctacggcttcggcgtcatgttcccggtgctcatgttcggtagcgtctccggcgcgcacatcaacccggccatgaccatcgcccaggccgtcaacggcctgttcccgtggagcgacgtgctgccgtacatcgtcgcccagctgctcggcgccctgctcggccagttcatcgtctacctgacctactacccgcactacaaggagaccgaggacgccgacgccattctcggcaccttctgcaccaccgacgcggacaaccagaaggtcaactacttcctcaacgagatgttcggcaccctggtgctcgtcttcggcgccctgtgctgcctgtccctggcttggggcaagcaggactacgccgcggcctccatcgtcgtcggcttcattgtgtggggcctcgtgacctccatgggtggcccgaccggccctggcctgaacccggctcgcgacctcatgccgcgtctgctgcacgccattctgccgatcccgcacaagggctcctcccgctggggcgaggcctggatcccggtcgtggccccgatcatcggcgccatcatcggcgcttggctgttcgtgttcttcttcgccagctgattcgttgattgattcatatatgcaaatggcctccactcgttttgggcggaggccattgtcgttgaatcaggtaaacgcagaggctactgctccaggaacacctgcggggccttcatgaagttcgtggcacagtgttcgccgcagaagtaataggacttgccctcatactcgcgcgtgatcgcgtcggcgttcaccgccacggtcatgccgcacaccgggtcggtggcggtttcgccgtccgcgggggcggtgtggtgcatgtgcattcccatatccatagtgttctccttgttggttggattattggattggtcagatgcgtgattggtgtgattcagcgtggtgcgatcgtcgatgatgatggttggctcgtgaggcgcgttggatgtggcggagccggtgatgttggcggcgttggctgattcggccgatccggctgattcgacatccgccgtgctgctgcccgagccagcggtgccatcgacaacgcccgcgttgatgttcgacccatgcagcctgttcgcgttcagcaccaggcacactgaactcaacgccatcgccagacccgcgatcatcgggctcaacagccagccggtgaacgggtagagcacgccggcggccaccggaatgccgatgacgttgtaaccgaacgcccagcccagattctcccgaatgttgcgcatcgtggcgttggacaggttgatggtcttgatgacgccgcgcaaatcgccgctcatcaaggtcacgtccgccgactgcatcgccacgtccgtgccggtgccgatggcgatgccgagatccgcctgggccagtgcgggggcgtcgttgatgccgtcgcccaccatcgcaatcagagtgcgggattgcgcggccgtgcgggaggcgccatccgcggacttggcggcggcctcgtcgcgttcgcgctgcagtttggcgatccagtaggccttgccgtccggcttgacctcgcagatcaccgtatcgatgccgacttcgcgggcgatgcgcccggctacctcggccttgtcgcccgatagcatcaccgtgcggatgccgcgtgcgcgcaacgccgcgatggcctcgcgcgagccttccttgactgtgtcctgctcgtagctcggcttgtcccagtcggcggccgcgtccaccacgccgcgcgtgatggtgccggtcttgtcgaacaccacggtgccgatgcgacgcgcctgttccagcgccttggcgctggtgaccagcacgccgttggtggcgcccaagcccagtgagaccgtcaccgacagcggcgtggccagtcccagcgcgcacgggcaggcgatgatcagcacgctgaccgcggtgaccagcgcatgcgccagttgcggcaccgggcccagtgacacccagatggcgaacgtccagatggcgatgatcatcaccgccggcacgaaataccgggcgatcttatcggccagctgctgcaccggcgccttggtcgcctgggcgcgggccaccatcgccgcgatctgcgagagtaccgtgtccgcgccgacttgggtggcgcgcatcacgcagtcgcccttgagcagcacggtggccccggttaccggatcgccgacggttttggaaaccggcttggattcgccggtgatcatcgattcgtcgatatgcgcctcgccggccacgatgatgccgtctgtgggcacgcgctcgccgttcttgacgaccagcaggtcgccggtggcgatggcgtcgatgtcggtgtccgtgaaatacgccggattgcgccattcgatgccgtccacattgtctgcggaagtggcgttgagtttgtgcgcggtgcgcgggcgcagtttgatgagcgactgcaccgccttgccggtgccttcgcgggccttggtttccagaaggcggccgaccagcaccaaggtgatgaccacgccaaccgattcgaaatacggttcgcgcgagccttccgggaacacccacggggcgatgcaggtcaccagcgaatacaggtaggcggccgaagtgcccagtgagaccagcgagttcatgtcgggggagcgatgcgccaacgcggggaagccgaccgtgtggatcggacgcccgcagtagaacatcaccggcgtgatcaggatggcctgcaaccacgggttcaccatccaatgcggcaccagcgtgggattggccatatgcagcatggtgacggcgaatgccggcaacgtcagtaccgcggccacaatcaccagcttcgtcagcgccttgatctcattggcgcgttcagccgcctcccggcgctccccctccgccgcatccacggcggtaggtgccgtatacgaagcatcaggatgaggaaggggcgtgttctcatccgagccgtcctctccctcaaccctcaacaacccatgcaccatattcatgccgcacgcaaacggatactcgcccgccggcaacgccggcagtttcacgtcggtggtggcgttgcccggcagcatggcgtcaagtcccagatcagcaaacaccacatgcgaggtgcattcgccggtctcctgccggtcgaaggtcagtgtgatcggcgtacccgcacgcatgctcaccacggcgggggagtacccgcccttgacggtgatcgtcgcggattggcgttcgccggaagcgtccatggccccggccgttgccttctgcgttccgaagaagaaccgcaggaccagccatgtcaatgcggccgccactatcagcgccgtggcggtcgagaagatgctgaactccataactgttccttcccattcctaatgcactgaacaacagtgtataccctatacccctagagggtatatgatggggtgtgttcagctgacggataagtatcagggggttgcgatgcatggttatgacgaagacaaggccaaggtcatcgcacgattacgccgtatcgaagggcaggtgcgcgccatcacgcagatggtggaggatgacaaatactgcatcgatattctgacgcagatttcggcgtcgaattcggcgctgaaatccgtggcgttattgctgctggacgatcatctcaaccattgcgtgcggcaggcgtcggtccagggcggcgaggtggccgatgaaaaacttgcggaggcttccgcggccattgcgcgtctcgtcaaatcgtgacgagttctgccgcatgatgacgcgcgctggcaaatcatgaaaggccgtctgacgctcggatacgacacagcataataacggttgatgctcgactgtgataaggccaagcgtccaatgtgggctgctgagcgtccgtttaacggcttgaaatcgtcgagttcggtaaaaatttaccgtcattcaccatcgatgacatactgggtaccatgtttgagcaaataggaaccgtgattatcgtcatcgtcgtgctagtggttggtgcagggcttggcctcttcgccggcttcgtgctaggccgtcataagggtcaggagatggctcgaggcgtcaaaagcgaggagctggaagaggccaagacctcgctggagaatgcgcgattcgagaacgctgagctcagtgctcgcaatgctgccgcacaggctcagattgaaggcgtgaaccagcaattggctttcgccaagtcacaacttgcccaggcgcagcaggctgagcagattcgcattcagcaggaacgtgagcgtgcagctgcggaggcagaacggaagcgtcaggcggatgctcaggccgccgaggccaagcgtgctgaacaggaagcacgtttgaaagaacagagcaaggtgctcgaggcgcttgcgccagtggccaaaaatcttgataccttgcagaacaaggtcacgcagatcgaagagggccgcaagagggaaatgggcgcattgggagcccaactcaaggggctcaacgaccagcaggcccgtttggacaaggaaaccagttccctgtccgccgcattgcgcaacaacaaggtgcgtggcgcgtggggcgaggcccagctcaagaacattgtcgagtccgccggattgctggaacatgtcgatttcgacattcaggtggtggtcacggatgccgatggacgtacgttgcgcccggatatgatcgtgcatctgccgggaggcaagaccattccgattgatgccaaagtgccttatgccgattaccagcgtgcctgcgagatcccggacaccgccagccccgaggatattgcccgccgcgatgatttgttacgagcccatgccaaggcgttgcgcgagcatgtacgtgctctcggcgaaaaggcctattggaatgcctttgatgtggcacccgattttgtggtggccttcatccccaatgaggcgctgttgcaggccgcgctcgaagccgaccccacactgatggatgatgcgttctctcgcaaagtggcgctcacctcgccggtcacgctgtgggccgtgctgaaatccgtggcctatgcctggcagcagcagtcgctcaccgatgacgccaagcagctgttcgatttgtcccgagaactttacgaacggttctccacgttgggtgattatgccatcaaattgggcacccagatcaccaagacagtcagcgcttacaacaagttcgcgtccagtttggaacgccgtgtgttgcccaccgctcgcaagctgcaaaaaatcgaaccgaccaagatcatcgaggaagtaccgatcatcgaatcagacaaaggcaatgtgagcgaactgtccgcccctgaagtggtgccggccgatgaaggtgatactcatctgactgcctcaggcgatagtctggagtcatgactgaatctggattccgccccactggtaccccggacctcgccgtcgcgaagagccacaatgactttgccatgctggagccgcgtgaacagctagccaccttgctgagggagcatgtggtgggccgtccgttctccgaacttgccgcggtgactttcgaccaccatgccgccaccgtcatgggccatgtactgattgacgctttggaagatgcgggctattcggttgatgacttcgatgctgttggtgccttgaccgcagcatctgtgcccatggtgtccgccatgatccaggccgccgcctctcgtggcgaggacctagacggattcgtgatggacttcgtctacccgtccatcaagggcccctccatcgaaggccgccgtgtggtgctgttggatgcttggctgtccgaaaagtcgtacgtgcagaccagctcgctggtcaccctgcgcaacggcaatgagctgagcctcgactttggcatagtggagcagctgggtgccaaggtcgtggccatcgcctcgctggtcggtggcggtgccaaagacatcaatgtggtcaacccctccaccggcgacgagcaaacgctccccttcatccaggtcttcgacgaatccgaactgcggtaaatccacctttgacttccctcgcataaagtcagccgggctgagccgcgaagttgactaagaggaaccggtgaatagcgttatcgaggagaaagattgcacgcacccaaccagatttctttggctgccaaagcttcaggtgaaccggaattccgtgaaatcggccttgggccgtggtctgagacccatcccggcgagcctcgtcccgacgatccgacttctccgaattatgacggtcgtttcgactcggtgctgttgaatgacggcgaccgccgcaacgtattggatcgttaccgctactggaccgtcgctgccattaaggccgatcttgacgctcgagggcgtcatgacttcgaagttgcggtggaaaactggacccacgatttcaacatcggttccatggtccgcaccgccaacgccttccaggccaagcgcgtacacattgtcggtccacataagtggaatcgcaagggcgcgttgatgaccgaactgtaccagcacgtcgaacaccacccctccatcgccgaactggtggaaagctggcatcatcgcatcgccggtgaaatcgcctatgaacgagccaaggccggtgccgccgccatccatgcgcatgatgtggctgtggatggagacaacaagcaccttcatgagctgctggccgaaatcgatgcttgtgatgcgcacatcaaggagcttcaagccgcccgcgtcatcgccctcgatatcattcccggcgcagtgccgatggaaacctataccttccccaagcggtgcctgctgctcttcggtgcggaaggccccggattgagcgagaaggccctcgaattggccgacgatgtggtctacatctctcaattcggttccgtgcgctccattaatgcaggcgctgcggcggccgtggccatgcacgcatggattgcccaacacgccgtatcaggcgtgtagccatgcatcgacaatcccgccgcatctgcccaatatgggccacattagaggcatgatctacgccaccaaatccatcgccgcggcattaattcgcatttgccgccggcatcgtcggcatcctgctcgccgcaggcatcagcagctccgcgcagtccacactggccgaagccgttaaaccggactactggattcccgaatggtggcagtccggcctgattctcatcgcctgggctgccgccgcatggatcggcggtctcatcatcaccggaaaagcggatatcagatatcaaataacgcgggttactgctttggcagttctgccggttcggacatggtcctggcagtttgtcatggctatggctttggcggttctgcagtgaccatggttctggtgactctgaccccatggatttgaccaccgtggttcactgcgcttaaccagctcccatcactgttccagcatgaggtatgccggctgcccgcagcttattgagtaaaggatgttgttgcatcacctcctcataggtgaatcggacaatggtgtcgactttggcccggtacagtgccgtctcccgttctttctccgcctgaactgcaccacgaacacccttgcggtcattcatatccgggttcacatatttttcatagccatcgaattcgcccacgataagccgattctcaggtagccgccagaggaaatccacgcgatacagagcaccggtttgcgggtcggtgatgttttgttgcagttctggggctaataggccgcctgcgatgatggtgcctcgtccaagtgactcgccaccattctcactcgccggattggcataatgcagtaggcggaatatcggcgtgcaatcacgtcgcatagtgctgcacacattcagaatgtccgtgatggcgacgccgttgcgcagcgccgaatcgataatgggcagtgcaaatcggaagtcgacggacagcccgcaatccaccaccgttctggctttgctggtcaccgggagtccattggcatattctggcgtgctgcttgacgtgaagatgcgtttgacctttgcactgctggcgttggggcctcgtgatgttgtggcgagagtgatggtgccagcatgaagatgccattggtgttcaaaatcgtggatggccgctgccgtgaccccggcgaacacccaatccggatgtctgttatgaagagttcgtgcaatatgtctgatacgttcgtcgggttgcagcgaatcccagtattccgaagcggcgtacatgttggggaatacacgtttgagttcgcgcgcctgcacgcgccgagccagcgccgagcggtgtgccttggttgttccataagcgcactgttgcgttgcttcagccttcgtgatgagtatgtccactgctttgtgatgtttcatgattcgacggtatgccaatggtgaacacggtgtctatctgtctggggttatgtggttctagcttcggtgcctagatgtgtgtttttgcctgattatcaggcatctgaccgtattggactgattatgtggattcttttgggtgggtatgcaaaatgtggataactggcgaggtgcgcagggcgattgtcgttcatatgttcgatgtaggtgtgtttgggctcattgtgagcttattagggtggccatgcagatacttcagtggggcacatttgaggttgggccgtggcgttgcctcgctgcggggcgtctcagcggggcgttttattggttggaccgcggttttgttttgctgggatggctgagcggggcgtttcatcggtcagctcgcggttctgctctgctgcgagtcgtctcagtaaggtgaacttgcggtccggcaacggttttgccccgccgaagaagccagcagcggggcaaatgctcgaccggcttgagcttctgattcgctgaggggctccagtaggcgggaaaatgaggcttcccgacaactgcgtgtcacatacggctcatatagttatggccatgccaacattttcacgtgaagaaatcgtgcatttgggcgatctggcccgaatcgcgctcaccgatgaggaaatcacccgtctgcagggcgaactgaacgtcatcgcagactccatcaacaaggtccaggaagtcgcctccgacgatgtgccgccgaccgccaacccggttcctctggaagcctacctgcgcccggacgtcgccgaaaccccgctcacgcaggaagaggcgctcgccggtggcccgaagaccgaggccggcatgttcgtggcaccgcgaatcctgggaagcgaggagtaatcgatgagcaacgaaaccgcaactctcgtcaaactgtctgctgccgagcaggccgctgccatcaagaagggcgacgtcacctctcgtgagctcgtcgaagcccacctcaaggtgatcgaagccgccgagccgtccatcaaggccttcctgaaggtttccggcgatgtggctctcgagcaggccgacgccttcgacgccaagtccgccgaagacaaggccgccctgcctgagctggctggtgtgccgatcgccatcaaggacatgatcgtcaccaagggcattgagaccaccgccgcctccaagatcctcgaaggctgggtgccgccgtacgacgccaccgtcatcgaaaagctcaaggccgccggcatgccgattctcggcaagaccaacctcgacgaattcgcccagggctcctccaccgagcactccgcctaccagaccacccacaacccgtgggataccgagcgcgtgcccggcggttccggtggtggctccgcctccgcggtcgccgcattcgaagccccgctcgccctcggcaccgacaccggcggttcgatccgtcagcccggcgccctgaccggcaccgtgggcgtcaaacccacctacggcggcgtctcccgtttcggtgccatcgccatggcctcctcccttgaccagatcggcccggtctcccgcaccgtgctcgactccgcactgctgcaggagatcatcggtggccacgacaagcgtgactccacctccatccccgaaggcccgcgcccgatggtcgccgccgcccgcgaaggcgccaagcgcgatctgaagggtatgaaggtcggcctcatcaaggaactcggcggcgacggcttccagcccggcgtcgaggcccgcttcaacgaggccgtcgacaagctcaaggagatgggtgccgaggtcgttgaggtctcggtcccgcacatcggctactcgctaggcgcttactacatcatcatgccgtccgaggtcagctccaacctggcccgttacgatggcatgcgctacggcctgcgcgtgatgccgccgaccggcgtgcc

SEQ ID NO: 2833 - DNA, 3787 bp, Unknown
  R36_18m  MAG No. k141_26223
acgccgccaccgacacctacgaagacctgctggccgccggtgtgaccgacccggtcaaggtgacccgctccgctctgcagaacgccgcctccatcgctggtctgttcctgaccaccgaggccgtcgttgccaacaagccggcgccgaagcctgctgccccggccgccggtgccgccatgggctactgatccgcaaacgatcgctagctgattgagctgaaaggggactccttcgggagtccccttttttgtattctggctcccctctttgaggggagctgtcgaacgcagtgagactaaggggagctgcggtgtagggatactccctcagtttcgcttcgcgatcgagctcccctcagggaggagagccaagaaactagctggcgaacaggcgcgaagcttggatttcggcgtcagcgtacacggtggaggcttgcgtcagcgagcgttggatggactcgagtgaggcctccatctgctgttgggccgcacgccactgttcggctaccgcggtgaactgggtggccgccgaacctcgccatgcgtcctgcaaggcattgagattggtgtacatgccgcccacggcctgcctgatctgcgagatcgaagtggccactgcggccgaggatgattggattcgctcggaatctacctgatattggggcatcgttgctccttttctagagggttaatggtatgtatggcggccgcttgccaataccggccgctaaggtggaggatatgtcaacaacgaatcgggaagacggaaaaacaactattgtggtcctatcttcggagccgtcctgttcggccttcgggaatatggtccgaaaatggcttgtttgtgccatttgcgcccttgctgcagtagcgatgaacgcaatgtggataaccgcaaatgcctatggggataactcgggcgacagctctgacagctccagcagcagcaccgacagcggcgtgaccatcaccgagaacatcacggatacggaaaatctcctgggctcccatgcggccgaagtcgcggatgccatcgccaaaaccgagaaggaaaccggtgtacacgtgcatctgctgtatctttccagtttcaatagtcaacagaaaccggaagactgggcggcaaccgtgatggagtccatgaatcccaagccgaacacagtgatgcttgccgtggcctcgaatgacggcaacctggtggtcgtcgtgtccaagaactccgataagtggcttctcgataacaaaaccgtcgataagctatccgaagccgcacagcagccgttactggaaaacccgccgagctggtctggcgcggcaacggcaatgatggatcaaatcgtgaaatccaaaaaagcctccacctcatcatccacggtgaccgtaggcataatcatcatgggtgtggtgttggtggcgctggtcatcatcatcgtggtcatggtggtgattcgtcggcgcaaggagatcaagaaggattccaaggccgaactccaagatgacattcaggaaacgcccagaagagcgcgacactctaggaagcatgagtaagcctattgaagcatcgattgttgttgtcgacgacgagccgtccatccgagaactgctggtcgcttccctacacttcgccggattcgaggtaaacaccgccgcttccggttccgaagccattgaggttatcgaaaaagtgcagcctgatctcatcgtgttggacgtcatgctgcctgacatcgatggatttaccgtcacccgccgcatccgccaggaaggcattaacgcccctgtgctgttcctcaccgctcgtgacgacacccaagacaagatcatgggcctgaccgtcggcggtgacgattacgtcaccaagccgttcagcctcgaggaagtcgtggctcgcatccgcgccattctgcgccgtacccgcgaacaggtggaagacgacccgattattcgcgtcgccgacttggaaatcaacgaggactcccacgatgtgacccgtgcagggcagccggttgacctgagccccaccgaatacaagctgcttcgctacctgatggacaatgagggccgagtattgtccaaggcacagattctcgaccatgtctggcaatacgactggggcggcgacgcagccatcgtcgaatcgtacatctcctacctgcgcaagaaagtcgacggcatcgaggtcgacgacggcgaaggcggcaagcgcaaggtgactccgctgatcgaaaccaagcgcggtatcggatacatgattcgagaaccgaagaactagtcgccccatccataacgcatcgcaatctcatgagtatccccgataagcagtcaggcggcgtaccgccgagcagcacgccgaacgccgccccgaacacgaatcccatgcctgcaatgccgccgttcgccgcccatttccaagagcggcgcgagcgtaagaaaaacatactgatgcggcatatcgaccgtatctcgttgagcagcaagctggtggcctgcaccatcgccgtgctgcttatcggcgtgtcggtgatttccttctccatccgcgcgttggtgaacaactacatgctgcagaaaaccgacacccagttaagctcgcaaagccagctggtggtcaacaatatcgatctgctgtcaaaaaatgactcatcggggccgaactcgtactttctgcagattcaatataccgacggcaccaaagacaaagagggcaatcctctggtcgtgaccccgctgatgccgcagatgcaggacggtatcgtatcggtgccgattcttcctacctatggtgataccagtggcatcacgctcggccaggcattcactacgcaggcagtggccaagcagatcatcacggtgcagtccgacagtgcggacagccagaacgatccggccaacggaaactccaattcctctgacaccatcaccaaggtactggccaaccccactgccaatgccaaccatgccgccatcgtcacggcgagggcaccatggcgtattctgccggtgaccttccagcaaaacggcaaggaccgtgccgtggtgtacatcggcttgtcgctggccgaccagatcgacaccgtcaacacactcacccgatactgcattgtggtcggcatcgccgtggtgctgctcggcggctccctgtccacgctgatcatccagcacacgatgacgccgctgaagcgcatcgagaagaccgccgcgaaaattgcagccggtgacctgagccaacgtattccttccgcgccggaaaacaccgaggtcggctccctggccgcctcgctgaactccatgctcacccgaatagaatccagtttccatgagcaggaggagaccaccgacaagatgaaacggttcgtctccgacgccagccatgagctgcgcaccccgttggccgccatccatggctatgcggagctgtataagatgcagcgcgatatgcctggtgccttggagcgtgcggacgagtccatcgaacatatcgaacggtccagccagcgcatgactgttcttgttgaggatctgctgtctttggcccgtctcgatgaggggcgcggcatcgatgtgaccggcacggtgaaactctcgtcgctggtcaccgacgccgtcgacgatttgcatgcgctcgacccggaccgtgccgttcgccgcatgcagattttcctcgaaccggcgcgcgatttgaaccatcccgccgaattcagccttgccgaaggcgattggcctgaggtcgtactgcccggtgatgcctctcgactgcgccaggtggtgaccaacatcgtgggcaacat

SEQ ID NO: 2834 - DNA, 14684 bp, Unknown
  R36_18m  MAG No. k141_26352
acgatcggtgacctgcaatgcgatgacgatcatgcaccaggcgagaatcgcgaagaacagcaatacgatggcgcaaccgacgaatccggtctcctcgccgatgatcgcgaaaatgaaatcgttatgggcggccggcaggtaattccatttctcacgcgaattgccgatgcccaatcccagaaagcctccggaggcgatggcgtacttggcgtggatggactggtagcatacgctctgcgcgtcagtggccgagcaatcaccatatgtggccagaatacgacgcatgcggttcgggctggaaaccgccaatgcaccgaccataaccaccgcgcccaatacgccgattcccatccatttgccggggaatccgacgatcaggaaggccacgcctccgatggagaccagaatcatggccgtgccgaggtccttgccgcccatcaccagcgccacgcctatcgcatacaacaccaacggcgcggcatatgctttgattcccttcttgtggtacatcttgctgcaggcatgcaacgacgagggcagccatatgcacatcgcgaacttcatgaattcggccggctggatagtggtgaagccgaggttcagccaacctttgttgccgtagacgtcgatacccagcggagtaaaggtcagcgcctgcaacaggcaggcacccaccacaaagaacacgccggtccgtttccagaacgtcaccggcatcgtcaatgccacgaagcccagcaccaagccgatcaggcaaaacgcgccctggttcagaagctgaaggaacggcgacttgcccagtgcggccatggtgaccgtggagctggagaacaccatgatcaggccgaagcatgtcagccccaccacggccatgcggaatccgtggtagcaccatagcgggttgagcaagcttcgccaacccgtgtagtcggtgatctcgagtgcgggcctgtcaggggctctgtatgccttacgcttatgggtatcagtggaggccatgcacctcgctccacgtcttggctgcggcggcgaatcgattgcctcgatccgcataggacttgaactggtccatggaggcgcaggccggagccataagcacgatgtcgccggcggcggcatacgtgccgcaggcttcgacggcacgatccatgacggtatcgttgtcttcgggatcgatgatggtcaccgggatgtccggagcttggctggcaaacgcttcgaccatcggctgctggtctttgccgatgatgacggccgctttgatggtatgtgcctggtccttgaccaggtcctcgaatcgactgcccttggccagacctccggcaatccagatcacagacttggccgggaagctggacagcgaggcgcgtgccgcatgaccgttggtggctttggaatcgtccacgaaacgaacggagccgccctcgactgcggcctcagccacggtttcgatgcgatggccgcccggcttgaacgaggtaagcgccttcaacgcggtatctcgatcagcgccaagtcccagcaccaacgccaatgccgtcaatgcatcggccaccagatgcgggtacagtgagccgtccggctctgccagatgcgtgaaatcggtgatggcggccagtctgaccggctcccccactgcgccgccggccacgccgctcctgtccacgatccagccatcttcaatgccgatctgaccggcctggggggcctcgagcgtgaatcccaccttgcggcatccttcggcggtttgggcctcggccgccagttcgctgactttggcgtcctgcgcattgtagacgatggcgcgtttggcgttgtggaacaccttggatttgtcggcggcgtaattctcgcgcccgccatgccagtcgaggtgatcgtcggcgatattggtgatcgccgcgcagtcaagtgccagcgaatcggtgaagtgcaattggaaggagctcagttccacgcacagtacgtcgtgctgaggattggtggcgcaacgagacaggctcatgctcatgtctccggaggcgatattaccggcggtcggcgcgtcgagtccgcaggcggtgagcatttccgaggtcatctcggtggtggaggttttgccgttggtgccggtgatgccgatccatggagccggagtaccggtgcgctcgttattcacacgcagctgccatgcgaattccacctcgctcatcacggggatgccacggcgttgggcttccagcacgaacggggtgcgggggttgaacaccggggacgacatgacgtagtccacatggtcccagtccacgtcatcaaaggagcggagaccggcctcgggcttcctctcgtcgacgccaatcacgtgggcgccgcattccctcaatacctccgccaacgaggtgccggacacacccagtccagcgatcaccactgtcttatccgctacttgcattgttcctcctgatataggaattccgtgggtgagcataatcccacccagatttccgctagctgaacagcaggccggagcgggtgacccagtcgccgtagaaaatcgtcagggcgagcagcacgaagatgagttcgatcatccagaaccgcaccaccaccttggtttcggtccaacccttcagttcgaaatgatggtggatcggtgccatcttgaatacacgtttgtgggtcatcttgaagtacccgacctggatgacgtcgctcatggcttccatgacgtacagtccacccagaaccaccgccaggaattcggtgtgcgtggcgatggacagggctgcgaacaggccgcccaaggccagggacccggtatcacccatgaaaatcgatgcggggttcgagttgtaccacaggaagccgaagcaggcgacggccgcgcatacggcgatgacggtcagatcgagaggatcggacacagcataggaatagccgccatggctgccgcccttgatgtggtagctttcccagaatgcgatgatgccaaaaccggtgaaggcgatcatcgacgaacctgccgccagaccgtcaagcccatccgtcagattcactgcgttggtccatgcggtcatcaggaagttcacccagatgacgaacaggatgatggttacggcacggccggcgaagtcgaagttgaagaacggctgttcgatgaagctgatgcccgcctgcgcactggggaatcccgatttggtgggaatcagcagcgcaagtaccgcgtagatggtggcgaagatgaactggccgatgaacttgccgcccaccgataggccttcgttctgcttcttacgcaccttggcgaagtcgtcgataaagcccagcagacccatcgacagcatggcgaacagtacgagcaccgcggaccaggagggcacgtcgcccgaacgcaggtatcggtacagtgcggaggatgcccaaccgagcagaatcgcgaagttgatgaccacgccgcccaacgtgggggtgccgcgcttgaccagatgcgactgcggcccatcctggcggatgtactggccatagtgcagcttgtggaccagccgaatcagcagcggggtgccgactaaggtgacgatgagcgacaccagcattccaatgatcagagcaatcacgtgcagcttctctttcttgtcggtttcttggggtggttatcgggtcagttctttgcccagcgttcagccaaagcgctcaggcctgacgcgtgcgatcccttgagcagtaccacagcgtcggaatggttgcgcgccaagtcgatgaccagctgttcggccgcatcgatgtcgtgtacgcaatccaccgacgcggattggctctgacgggcaccgtccgccagagcctgtgccagtgcatcgagatgttggtcttgggcggaaccgaccgcgatgatcgcgtcgatgcccaattcggccgcatacgtgccgatagaggtgtgcaatgccgtctcatcggcgccgagttccagcatggcacccagcagcgccacgcggaacggatccttgccgtcatttgagttccaagccttcaacccgttcaggccggctttcatggagtcgggattggcattgaaggaatcatcgatcagtgtgaaggaagtcccctcgcgattcaccgtggacaatgccatgcgatgagggctgatggtgtgctgcgaggccagaatccgcgccaccgtttcgggtgccataccgtaacgcatcgccacggttgcggcggccaacgcgttcatcacgttgtgacgtccaggaatgcccagatgcaccggcgtatggttgccgtccgcatcgaccaacgtgaattcagcatgatcggaccggtcggcagtgacatcaatggcccgcacctcgggctcctgcgacgatcccaagccgaaccacagcacgtcgccgttggccaggccggccatgggaaccacgtgttcgtcatcggcgttcagtaccgcggtgcctccgggaagcagtccctgcacgatttcgcttttcgcctgtgcgatgcgttcgcgggagccgaattctccaaggtgagcgacgccgaccttcaatacgattgccgtgttcggcggtgcgatacgggtcagtcgcgcgatttcgccgatatggctggcacccatctcagccacgaagaaccgggtgtgctcatcgacccgcaacgcagtgagcggcaggccgatctcattgttgaacgatcccaccggagccacggtcgggcctacggtggcaagcagggaggagagcagatccttggtggtggtcttgcccaccgaaccggtcaatccgatgatgtcgaagtcgccgtccagctcgcggcggcgaacgatgttgtgtcgggcgagctcgccaagggcgtcgaccgtgtctttcactacgatctgcggcaggccatcggactccacctcatggtcgacgatggccaccgtggctccctgttcagcggttttcgccacaaagtcatgcccatcgacacgctcgcctcggatggccacaaacaccgatccggggccggcctgccgcgagtcgctgaccgtattggtggctcgagactcggaatcggcgtctccgatcaatcgaccatcgacggccttggcgatctcctccacactcatcggaaccatggtgtttcaaactcctttacgattacgcttcgtcccgcatccacggacttaattgagattgttggccacatgcagggcactgcgtatgttgtttttcctcacgccggcggccagtaccatggcgatggccaaggacatgtgcccgagtcggacgcggtcgtacattgccggtgaatccgcagccatttcatccgattcgggtgtcgacgaggtcatggacatgtcatgttccgcaacgaatgcgtagcgtgtcttcaattcgtccaagcttgcgcttgcgttgacatcttccgtgcccagcacatccacgttcaccgattccaacgcatgctcggccaatgtgcggtcatccatggcgatgatcacggccgccacaccgtcttcggcgcacacggacagcgcgcgctgcatatcgaggatgcccagaggatagttcaggttcatggtacgtgtcatcgacgtggacccggatgcggtgattaccgccaccggattgcccagcatgtgcaggaattcggagagctgggacacgcctgcgtcaacggcctgctcatccgcaccggtcaccgcgaacaccgccatggcgttggatggtccgccggccaggccgctggccagatcgccgagtacgcgatcgtcgaaatcgccgtagagcaacggtatatcggcattggcgatctgccctttggacgcgcgtggcagcaacgccgcataggcaccggcctgtgcggcatgcagcacatcgggttcctgctcatgcgtgcagatgaacagcgagccgggaatcacggtatccacggcatcgctgagtgaggtaatggtgacattggtggcgaagggtggatcgacttcaaaaccgtaccgttcgaccagcattcccaaggtcacccgctgggcgatggattcgctcactgcactcatgggctatcgcctttctcccctgatccttaccacgtgactggaatagcattttttcgtggactggagacaggcacctcgtatttctgcataaggaactcacaaatctgtgcggaaacagggccggccgtcagaccgccgaacacaccattcggatccttcagcaccacggtgaccgcatagcgcgggttgtccgcgggaatcaccacggaataatcggagataatggacgagagcgcgccatccgaaccctgcacctctgcggtaccggacttggcggccatgcggtaaccatcgaccttgacgaacttgttgtagctctccgccactgattccatcgcattcatcatgtccgatgcgaccttttcatccaccacgcgagtggcttcgcccttcttggtctcagtggtcttgccattggcatcggtggttgatctgatgatcgactgctgctgcttgacgcccttgttcgcgatggtggccaccacgttgttgagctgcagggcgttgacggtgtagccctgaccaaacaggatggtgttgcgcgtacgcagatcccatgccgaagggctggtgagcagaccgctcgattcaccgggcaggttcagtccggtcggttgtccgatgccgaatttggtcaggtactcgtagcgttgctcatccggatagttctccccggccataatcatgccgacgttcgatgagttctgcagaataccggcgagcgtccagcgctcagtgccatggtcgaatgagtccttgtaggtctggcccttctgtgtgatgtggtccgggaccgacaattgatcgctcatcttatgcagtcccatctgcagatagccggacatggagatgaccttgcccaccgaaccaggctcgaaggtttcggacacggcccgagacgggctcatcttcgccgcatcggtaccagcctgtacttcatcgctatcggccagtgcgagaatctccccgctctggacatcctgcaccacggcgatcgcccacgctgcaccatacttggattcggcctccttcaaggcctttttgacataccattgcacatcacggtcaatggtcagggtgacatcgtcgccatttttggccgccaccgattcggtcatggtgccgggaatctcttcgccgccattaccacgctggtaggtttcatggccatcggttccggtaagcgtcttgttctcgacctgctcgatgccggcgacgccatcgccgttgtcgttcacgccgccaagcagcgcgcccatgagatcgccatccgcatacagtctttcactgctcagctcaccccagacaataccgcccaggtgcaacgcctcgatgctgcgcttgacctgtggggtcacgtctttcttcagaatcacatactgcccggtaccggacagatcagcgcccaattccatggcgttcatatccaggactttggccagcagtcggcccacggccgccgctccggtagcacccacgggtttgccgtcaatttcgtggcagtaatcacgggtgttgtcattgcaagtaatcggctcgaactcctgtgcagcctccggattggcgacgatagtataacgctccacgctttgagcgagcacggagccgttggcgtcgaggatacgcccacgcttggcgctcaacgtcacggtcagggtgcggttagccgtggccgcttgtgcggtttgacggccgccgatgagctgggtggaggccagctgaatcacgcatgccgacgccaccaacgccaatgcggcgccgatggcaatgcatttgaacgcgaaggtcttgaccttggcgaactctacgatgcgacgaatggtgttcactgggttccgcctttgttggactggtatccgcttaagtcgatggacactgatccctgttgcgggaccatgcccatgtcgctggccttgtcgggcaggttcgcgactaattgatcgagtttggcctgatcgtcttcgacatcttgggtaagtctgttgatattggtttcgatctgtgccgcctcaaacgagttctgcaccatctgggtacgcaacatcagcgcaccgaacaaggtgccgacgaggaagatcactgcgatggccacgtgcaccagcggtgcgcttcttgttctggtccattcgatgacccgtccgacgacattgccccgctcgtctccacgcgggttggagaccacccgcagctcaggtcgggaggaggactgatgcttggtgtgcggtcggttcgaggctggagccgcgttcgatcgaatgctacgtgcagttgccatatgttgttatcccctccttgtacgaattcgtgccgtgtttttggctctgcccggagacgcggagccttgtatcttgacgtcattcaggccctgcgcggtttgcgtaaagcgtttcctccatcgtgacggaatctcacggctgacttccaccgcccgcaaccgcaccgaagccgatctcgggttggctgcgatttcatgttcgtcggccttgatggcacctcgcgtgagatccgtgaaaaacggttgggcatccggcggtatgacaggcagaccagccggaacatccactcgcagcccttgtgccatgaacgatttgacggttttgtcttcgagcgaatgataggactccaccaccagtcgtcccccgacatgcagtcggttcgcggcttgcggcaatgtggaggcgagcttgtccaattcgccgttgacttcaatgcgcaacgcctggaagacgcgtttggcgggattgcccgccgggcggtgggcttgcggcaccacttcatcgaccagacggttgagctgtgcggtggtggtaaacggctccttgtctcgacgtgccacgatggcgcgggcgatctgacgcgagaaacgctcttcaccgtattccttgaatatacggaccagttccgccgcatcataggtggcaagaatccgttcggccgtcaacggctggctgacgtccatgcgcatatccagcggcgcatcatgcgaataggagaagccacgatcggtttcgtcgatctgcaggctagataatcccagatccatgaatacggcgtccacacgttctatgcctcggtccgtcaacacctgatcgagctgatcgaaggcggcatgcaccgggatgaatcgatcggcgagcccctcccgttccatgcgttcggtggccagccccagcgcttcactgtcacggtcaatgccgatgagccgagcctgcggcgcggctttgaggaaggcgatggaatggccggcaaggcccagggtgcaatccgctgcgatggcgttctcatgttccagggcaggcgccatcaggttcacgcaatcgtccagcaataccggcagatgaatattcgccacatcaaccatcagaattccacctccggcaacacatcgtcagcaatatcggaatatccctcttccttctcggcgaggtaggactcccacgtgtccttattccacagttcggcacgggtgccaacgccgatcaccacgacgtcggaacccagattggcgtaatcgcgcagcatctgcggcaccagcacgcggccctgcttgtccggctgctgatcgacggcaccggaaaggaacacacgcaggtattcgcgggcggctttgtttcccaccgacacacgctgaatctgcgaggcgatacgtcgaaattcgtcgaacggcagcaggtacacgcaccgttcctggcctcgggccatgaccaggccctgccccagctgggagcggaatttggccgggagcgccatacggcctttggcgtcgatcttcggcgtatatgtgccgagaagcagcggcggcagaccagccatgagatcagccatagtggtggagccttgtacgttggcatcagcgtcgcgaatcgtctgatcggcaaccatggctccacctccttcatcgttacgtgggatacacttcggccaactggttcaccactctaccccacgattccccatttctccccactcatgcacgatttgctcacccttttagggcaattaccgatggattgcgcgtgtcggccacgactgtcgcacgaatgggcgctccgcacatccaatccacgttgcgcactccaccgaccgagcagcatggcgaattcacgctgaattcacctattccgggttgtccgcatcactgacgtagggggtgtgcggtaaatttgaatgccttaagttttttctgccccacggaaatggaacgaagagaacagcatgtcgagttacgcctcccagctgcatgaggagcagcaggccgtcgatcgcgcctatggacgattggatgatctgcgagccgaaatgtggcaacgcctggacaccgtacgcgccgccggctcccacggatcccccacgcaacgcagcgaacgagactcctttgccacaatgtacgaaaaccgcctcacgcaattgcgcagcgttgaggatcggctggtgtttggtcgtctcgacgccaagaacggcgaccgtcattacatcggccgcatcggcctgtcgagcccggaccatgagccgattctgaccgactggcgtgccgaagccgcacgtcctttctatgaggcgaccccctccaatcacggcgacatcgtgatgcgcaggcatatcaccttgagtttccgcgaagtcgtgggcgttgaggatgaggtgctcgacgtgcattccgaccaagtcggccaggcgtcttccgccggcacgttgaccggcgagggtgcgctgctggcttcgctgagctcacgccgcaccggcaagatgaccgatatcgtggccaccattcaggccgagcaggaccgcatcatccgctccgacatgaatcgtgccgtggtggtgcagggcggtcccggcaccggcaagacggccgtggcgctccatcgcgccgcctacctgctgtacacgcaccggcgcacgctggaacgttccggcgtgctggttgttggccccagctcggcgttcctgcactacatcgatcaggtgctgccctctttgggcgagaccggcgtggtctcacgcaccatcagcgatctgattcccggcatcaccgccacggcggtcgactccccttatgcagccaagctcaagggcgatcgacgcatgacctccgtagtggccaatgccatcgccgcacgcgtgcgtgttcccgctgctctgccgacagtaaccattagcggcattcaggtaccaatgctggccactgatatcgagcaggcgcaggcggacgcgaagcgcacccggcaacctcataacaaggcccgcgagacctttatccgttcgatgctgaccagcatgcagaaccgttatgccgaacagcttgattacacgccggatcaggcggagctgaaccgcgcgatgtcgctgctacgtatgaacgagcaggttcgcaagaccctgaacctgtgctggctgccgatgaccgccccatggctcatcgatcagctgttcgcccatcccgaacgtctgaagtctctggctggttggctgaccgacaacgacatcgcggcacttgcccgccccaagggctccccgctgacccgctccgatattccgctgctcgacgaagcgatggatatgctgggccccgatcccaagacggtggcccgccagtccgccgccgacgcacgtcgtgccgccgaagagcagtatgccaaagacactctggccgcgaccggtctgggtggaggcatcgtctccagtcagatgctgctcgaccagatgaacggggacgacgccgagctgaccgcgcagcgggccgcggccgaccgtgaatggacctacgggcacatcgtggtcgacgaagcgcaggaactgaccgccatggactggcgtatgttgatccgccgttgcccctcccgctcgttcaccatcgtgggcgatgtggcgcagacctcggcgctgggtggcacccgacgctggagcaaatcgatgaaccgcctgttcggcgaaagccactgggatttgaacgagttgaccatcaactaccgtaatcctcaggaagtttccgaacttgcctcacgatttgccgaggaggaaggcctctacatctccacggtcaatgcggtgcgcaccatccccgattcggtgtcccgcaatgtggtgcccgacatgtcgtccttgctggaaacgacggccgagcaggcggcgcagcttgccgaacaattcgtttcggcagacggcaccggccgcatcgccgtcatctgtccggatgatctcatcgccccggtgcgcgacgccgtgcgccgcaaactggccgccgttcttgacccggccgaatacgcaaggctcatcgagcagcccgaatgggatgagcaaatcagcgtctgcggcaccgaaacggtcaagggtctggagttcgatgccgtcgtggtggtcgagcccggtctcatcgaggatgacgcgccgagccgcctggtcgccgcctcggacctgtacgtggcaatgaccaggccgacccagaaactggttatagttcggacaagaacggacgaaaagtccctgaacatctaaggtatgaagcatgcccaaagcactgttattggaaaacattcaccccgacgcggccaaatcgctgcgtgatcacggtttcgaagtcgagaccatgaagggagccctgagcgaggacgaactcatcgacgcgctggatggcgtggacttggtgggcgtacgctccaagaccaacgtcacagcccgcgtgctggatgcgcgtcctacgctaagcgccatcggctgcttctgcatcggcaccaatcaggtcgatctggcacatgccggcaagcgtggcatcgccgtgttcaacgccccctactccaacacccgttccgtggtggaattggtgatttgcgacatcatctgcttgatgcgccgcattcccgcacacacgcatcacatcaagcatggcctgtgggacaagtccgcttccggctcgcatgaagtgcgcggcaagacccttggcatcatcggctacggcaacatcggctcccagctgtcggtactggccgaggccctcggcatgcgcgtggtgttctacgacatcgaggagaaactggcactgggcaacgcccaccgttgcgataccctcaacgaactgctggaacagtccgatgccgtgaccctgcacgtggatggccgcaagtcgaacaccggcttcttcggcgaagaccaattcgcccacatgaagcaggacgcgattttcattaacctttcgcgcggtttcgtcgccgatctgggagctctgaagcagcacctcgattccggccatctgtctggcgcggcggtcgacgtgttccccgttgagccgaagaagagcggagatccgttcgagacctcactggccaacgaagacaatatgattctgactcctcatattggcggctccaccttggaggctcaggaatccatcggccatttcgtctctcagcgtcttgaggattactggttcaagggttctacctcattgtccgtgaacctaccgcagatcaacctaggtgaacgcaagggcgtgtgccgtatcgcccatctgcacgacaatcttcctggtgtgctggctcatgtcaatcgcgtgctcggcgaagagaacatcaacgtttccttccagtcgttggccaccgaaggcgaacttggctatgtggtcaccgacgtggctcagaagcccagcgccgccacgcttgaagcactacgcaacatcgagggcaccgttcgcatgcgtgtcatcagctgacgcagctcatcctcgattgatatgaaagagacccgtcgctgacgggtctctttcataagtgctgggcttcatgattggctcgcaccatggtttgcgaatcactcgcatatcacggtgcatggcattcgcatattattcacgcaaaccatcaatggcgctttggaaatcctccagacctgcaaagttctggtacacactcgcgaatcgaaggtacgccaccacatccaagtcacgcaacggtttcaggatggctttgcccacttcatctgaggtgacttcggcaaggcctcgggagcgaagatcctcttcgactttctgtcccagcagcttcagatcctcttctctgaccggccgcccctggcaggctttacgtacgccggaaatcactttgtctctgctgaatggctccacgccacccgaacgtttagtgaccagcagcatactggtttccaccgtggtaaaacgcttgctgcatttcgggcatacgcgacgccgtcggatggaatgaccgtcatcgctaatgcgcgtatcaatgactttggtgtcggggttctggcaaaaaggacaatgcatgctccccagaataacgtgtacgggcggaaaaaccatgccgctcgggtttcatttactcaaccggaacaataatgcgctgcccggcctgcaatgatccggactcaagattgttcaacgcaatcagctcatccaccgtttccgatacatcatggccagcaggtgtaatagccgaagcatatgaccagagcgtatcccccggccgcacgatataaccggtcacctgcgtggcccccgtatccgattgggcccgctgaacggtaagcgcgccgaaaccacaccaggccagcgccaaggcgaccatcactgcgataatcttcccacgcgcattccggcgggacgttccagcatgctgcatagctacacgtgcgctacgggccggggccatcaccattgaac

SEQ ID NO: 2835 - DNA, 3771 bp, Unknown
  R36_18m  MAG No. k141_26704
ctcgacccgatgggctcgctggccgacatggccggcagcctgttcagcttcttctccggcgacgccggagccaccgccgtcaacgacttcacggccacgttcgtggaaccggtgaaggccaagctcgacgaaatcggacaatggttccaatcattgccgcagaaggccatggacgcggggagccagttcctgaccaacatcggccaatggttccagcagctgccgcagaccatcggctactggctcggctacgccatcatgctccccatcgcgttcgcccaacaactgggttccaaggcgatggaagccggacagaacttcgtgacgaacctatcgaactggatacagcagctgccgtcacaaatctggacatggctgactcaaaccatccagaacgtgcaggcatggggaagacagatgatggcgcaggccggagacgcgggaagccggttcctgaccgggcttggccaatggcttcagtcgctgcccggacgaatctggcaatggctgaccggcgcgataagcagcgtacaggcatggggcggacagatgggggcgggcgcacgcaacgccggcaaccagttcctgcaaggcatcaccggcacattgcagagcctgcccggacgcatacaaagcctgttctccaacgctggctcgtggctcctctcatccggccgcagcatcatggacggtctcgcccaaggcatcaggagcggcatcagcgccgccgttgacgccgcatccaacgcgatggaggccatctcgaaactgttcccgcactccccggcgaaggaaggcccgttcagcggccacggctggaccctctactccggccaaagcatcatcgacggtctggccgagggcatgctccaacgccgggccggcctcgtggacgccacccgcgccgcgatcagcccggccagcatggaactcatgcacggcatggacacgccacgctcgggcgtcggcacaggcaccgcgaacggcacataccagaaccagtccgacgaactattggccgaaatccgctccctgcacgcggacctaccgctgattatggagaagcttggcatcaaggtcgacggacgtgaattcggaagggtggtcagggactatgcgctcgctgagttatgtgtgcgcctcgaccggtgagacgattccgctggaagggcccgatatctgggctcagacggcggagggactgcgcggccgcgaatggtcgtacaccctcggataccggagtctgaccggagtaagtcgtacggcgcgcgaggccgagcttgacctaacctatgtccgctgccccgagaaggtggattggacgcgtcgcctgttcgacgcggacgttgccgcaggcacacccggtgtgttcgacgcggacgggtggaccacgcgcgcctacgtggtcaaggccgaacccgcgagcatcacgccgaacatcatccgtcagaaactttccatcgtcctgttggacggcatctggcgcaagccgggcgacgtgcagcacttctattcggacgcgctgcaacccggactcgacctcgactacccgcacgactatccgcacgactacatgccgacctcgcgcaacgcggtggtctcgaatcccatgcccacggccatgccattcaagatggtgatttacgggcccgcgtcgaatccgcagctcacgtttggcggcaaccgatacgcgttcgacatggagattccaagcggctccttcgtgaccgtcacctcgattgcaggccgacgtaccatcgtcatgaccgccgagaacggcgacaccacgaacgtgttcgacaagggccggcgcggaaccggtctcaacggcggcgaatacatcttccagcccatcccgcccggagacaacgccgtacagtggcaaggtttcggcattgatctgaccgtctacatggaagaaagcgaaccagtatggtcgaattgataatcactgaccgaaacggcgtcgaccgggaaagcatcgccgattacaagctcgatgcagcctggggcgcggacgagaacgatttcgaactcacagtggaccggctcatcgacgccggcagctacgtgtatttcgacgggtccgaatgcggcggaatcgtggacgccctgaaggacaacctgaaacggggcgaatccaccctcacctactcgggccgcacgtggcatggcatgctggcggacaagattttggagccggacaagggcaaggattacctcaccgtttccggcacggcgagttcggtcatcggctcgctcatcagtcgtgtggggttggatgccgtgtttgacgcggtggatgcgcccactgccggcgcgcagaccatcaaaagctaccagttcgaccgttacgtggatgcgtactcggggctgcggaagatgtgcgccgcgtctggcctcaagctgcggctcgcctacgcttccgggaaggtccgcgtctgggccgaaccggcagcgcattacggcgactcgattgacagcgacctcatcgatttcgacgcgacgcgcacgtggaggaaaccgaaccatctcatcggcctgggcaagggcgatttggccgcgagaaccgtcgtccactggtatgcggacgccaaaggcaatgtcagccaatcccagtcgctcaagggcgtggacgagataacgcaggtctacgactacagctcggccgaggcgaacgagctgaatcagaagacacgtgagaagttgcaggaactgcaatccgagggtgatgtgaaggtcaccgtccatgagggtacgggcatcctgttcgacgtgggcgacaccgtgaccgccagggataatctcaccggcatcaccgtcaacgcttcgataaccaagaaaatcgtcaaggtctcgggcggcgtcttgtccgtcgattacgaggccgattaggaagggggccattatggcgcgtatcgacaatgcgacggtcatgcaatgcgaccgttgcggcagaaacaaatggtacaaggacttggacgacccggatatcaagacgtggtacaacgtcaaccggctggactccaccggcacgggccacgactacctgttctgcgaccaggattacaaggactacgcgaacaagctcaaggactacgacaacagtttcgacagttggatgcagaacggaggcaagcagaatggttgaactcgtcaccgggcacgcgaacaaggctcacgccacggcggaacaggccgctggtttgaacgccggcatcctcggcttggacgattatgtcctgaacgtgcacgacaagctcaagatcacggtcgtttcggcgaacaaggtgaccatcggcacgggcgagctggtcatgcagggccgtcacgtcagccaaggcacgcccgaggacctgatcgtcaccaacgggtcgcagggtcagaaacgcaacgacctgatcgtatgccgctatgcgaagggctcgcagaacatcgagagcgcgaaactggtcgtggtcaggggcacgcccaccacgggcacgcccaccgaccccgccgtgaacaccaccagcccgttggacgggggcaccacctacgacatgcccttgtaccgcatcccgctggacggcatcaccatcggcacaccagtcgcattgttcaacgtgttgaagccgatgagcgacgtgtgggattccctaacccgaatgccgtatattctgtgcggaggccataccgtcaccacgaatgatgacggcacattctacatcaacgtccaatccccaaacgggaagaaagccgattacgcggcctacacgattgggccgttca

SEQ ID NO: 2836 - DNA, 22784 bp, Unknown
  R36_18m  MAG No. k141_26841
gtcgcaccccactggggtgcgtggattgaaataggctggcggtttcgcccaccctcaatgtcaacgagtcgcaccccactggggtgcgtggattgaaataatgctcgtcagcggaagctggacgagcaggccacgggtcgcaccccactggggtgcgtggattgaaatcgtggcgacgcatggcagtgggatctgtacgccaagtcgcaccccactggggtgcgtggattgaaattatcaggcattaggcattaaaaatctaccgttgaagtcgcaccccactggggtgcgtggattgaaatttgtacggtactgccccagtacaggttttctttttgtcgcaccccactggggtgcgtggattgaaatacgttcgcacccgctctgaccatgagactcgcggccgtcgcaccccactggggtgcgtggattgaaattgcctgtccggctggccgtcatatcgcgcgatggcgtcgcaccccactggggtgcgtggattgaaatcaagcgtgccgccttggaacggcagggatggcattggtcgcaccccactggggtgcgtggattgaaatgtaacggagccgcgccatagcataggtcagcggccgtcgcaccccactggggtgcgtggattgaaatgtattgttgacacccaatgcggcgagcatgccgcgtcgcaccccactggggtgcgtggattgtaatcacacggtctggaagaacgacgagatcgcgttccgttgcaccccactgaggtgcgtggattgaaatataaaaaatatggcgcaacatgaatatgcatgtcgtcgcaccccactggggtgcgtggattgaaataacgacgagattcccacggatgctgatttcgagaaggtcgcaccccactggggtgcgtggattgaaataagaacagattcgtaggacactgcgaaaaacaaatagggtgctttccgccatcaacagcggaaagcaccctattcttatggtattcttatgatctctctgtcctaattagagcacctcactccgcagcaatcgcggccttgagctcctcgaccttgttggtcttttcccacgggaactcaacgtcggtacggccgaagtggccgtaagcggcggtcttcaggtagatcgggcgcttcaggtcgagcttgtcgatgattgcggcggggcgcaggtcgaagaccttgcgtacggcggcggcgatctggccgcgcgtcacgccttgctcggtgccgaaggtctccacgttgacggacaccgggtcggcaacgccaatagcgtaggcgatttggatttcgaccttgtgggccaggccggcagccacgatgttcttcgcaacccaacgggtggcgtacgcggcggaacgatcgaccttggacgggtccttgccggagaacgcgccaccgccgtggtgggcggcgccaccgtaggtgtcgacgatgatcttgcggccggtcagaccggcgtcggccgccgggccgcccaggatgaacgaaccggtcgggttgaccagctggcggtagttgtcatgcggcaccttggaacccagcacctcatcaagcaccgggtcaatcacgtgcttcttcagctcaacagcaagccaatcctgcgtaacctcaggatcgtgctgagtggagatcagcacggtgtccagacgaacgggcttatcgtcatcgtcatactcaatggtcacttgggtcttgccgtccgggcgcaggtgcggcacttcgccggacttacgaacctcggtcagacggaaggcgaggcgatgtgccaagtagatcggaagcggcatcagcgtcggggtctcgtcggtggcgtagccaaacatcacgccctgatcgccggcaccctgtgcttcgtaacgttcttcgcggctggcggcggtctcctgatcgccagtcagacgggcaacgccctggttgatttcggcgctttgctcggtgatggccaccacaacgccgcaggaatcggcgtcaaggccgacttcggaggaggtatagccgatgttgcgcagggtttcgcggaccttggactgcacgtcgcagtaccccttggacgtgacttcgccgaagaccaggaacacgccggtggcggcggaggtctccacggccacatggctggacgaatcctgggccagcaaatcatcaagaatggcgtcggagatttgatcgcagaccttgtcagggtggccttcggtcacggattcggcggagataagccgatgttcttctgtcatatcatccctttcttcaggacttatcgccccgcggggtgcgaggcacaatgatacggtgtcaatttttacttgtcactgcggaagcgggcataaataaaggcccgtgccaaccagcgcggtggctcgagccttacgtcttgttcgctcctgatgatgagttatagctgattgcgataactcaggcaagcgtgtcgctcaaaatcagttgtgagagaactctcacaccatcattcggcgacgaactgtccaaacaatccaaacgaatcgtctgaatcgatcagttgccctcgttggcgtcgtcctcgcccaaggtctcctcaagcagaccctcgtcgatctcgcggaaggcgatggacagaggcttctcgttgttctggtattcgaccagtgggccgacgttctgcagcaggccctcgttgagctgcgtgaagtaggagttgatctggcgtgcgcgcttagcggcgaaaatggccagcgcgtacttggaatcggcgtgcttcatcagatcgtcgatcggcgggttcgcaagaccgtcgggtgtcgggtcagtaccaaaagccattgttcttatctccagacattggaaaatctatctcaaccgaagcaagtgtagccgtttggggggacttctgtcagccctataccggactctcgccagaggaatgtattccaaaaaaatgtgtgagaaacattacgtttttgcaaattccattattcgactcttgacaagtggcgtgtccctcacaagggcttgaatagaaccatgactgaaatgcgatctgcaaaaattatgtcagggcgcgtctttgcaggcgcccgagccctctaccgtgctgcgggcgtcagcggagacgacatgggcaagaagcccatcatcgccatcgccaactcgttcgatgagttcctgcccggccatgtccacctcaacaaggtcggccgcatcgtttccgaggctatcaaggaagccggcggcattccgcgcgagttcaacacgatggccgtggatgacggcatcgccatgggccacactggcatgctctactccctgccttcccgcgacatcatcgccgacaccgtcgaatatcagtgcaacgcgcactgcgccgacgccctcatctgcatcccgaactgcgacaaggtcgtgccgggcatgctgatggcagccctgcgcctcaacattccgaccgtgttcgtctccggtggcccgatggaggccggcaccacggtgctcgccgacggcacagtcaagagcaccgaccttatcgacgtgatgtacgccaccgctgacgacagcgtctccgatgaggaactgctcaactatgagaagaccgtctgcccgacctgcggctcctgcgccggcatgttcaccgccaactcgatgaactgcctgaccgaggccatcggcctggccctgcccggcaacggcaccatcctcgcctcccactcctaccgcaaggacctgttcaagcgtgccgccaagcaagtcgtcaagatcgctcaccagtactacgacgattccgacgattccgtgctgccgcgctccatcgccaccaaggaagccttcgagaacgccatgaccatggatgtggccatgggcggttccaccaacaccgtgctgcacatcctcgccatggcccagtccgccgacgtggacttcaccctggacgacatcgagcgtatttcccacaccgtgccgtgcatctgcaaggcctcgccgtccggcaagtgggagatttccgacgtgcatcgcgccggcggcatcaccggcatcctcggcgagctcgaccgcgccggcaagctgcacaccaacgtgcattccatcgactacccgacgctggaagccaagctggccgattgggacatcatgcgcccgacctgcaccgaggaagcccagcagatgtacaaggccgctcctggccacatcatctccccggagccgtggacgcacaccaccctgttcgactcgctcgaccgcgaccgcaccaacggcgccatccacgacatcagccacccggagattcacgaaggcggcctcgccgtgctgcgcggcaacctggcccccgacggctgcgtggtcaagaccgccggtgttccgccggagatctggaagttccgtggaccggctctggtggtcgactcccaggagcaggccatcgaggtcattctgaacgacaccctgaagcctggcatggcgcttgtgattcgttacgagggcccgaagggcggcccgggtatgcaggaaatgctgtacccgacctccttcgtcaagggcaagggcatcggcaaacaggtcgccatgctcaccgacggtcgctactccggcggttcctccggtctggccatcggccacatggcgcctgaggctgccaacaagggcccggtggcgctcatcaagaacggcgacatcatcgatatcgatatcgaagcccgttccgtgaacgtcgaactgactgacgagcagctggacgagcgtcgtcgcgagcttgaggctggcgacggctacgtggctcaccgcaaccgccacgtctcccaggcgctgaaggcgtacgccgccttcgcccgctcggccgacaagggtgcgacgcgtgacccggagctgatcaacaagctctccggtctcaactgatcgccgattgcatagctgaaaggcccggcatcttctttatgaagatgccgggcctttactgtgcttccgaaggcgggagcgatattgcttgttatcgcacgcaggcggcgggggagaggcgtgcgcctcgggcccagtcggcggcgcgcatggccttcttgccttgcgccttgacttgggtgagttccagcggcgtgctgccggtaccaacccacacgttcttcttgcccaccttcagctcgccgggctgaagctcggccggagtgttgggattggactggtcggccggttgtgcggcgagaatatgcagggcgagggatttagcggttgactcgtcattatcggcgattggcccttccgcaaacagttcggtccatgccccgggatgtggcgtgcaggcgcgaatctgacggtcgatggcctcggcctcgtccgtccaactgatgcgggcgtccttcaccgtgatcttgtgcgcgtattccaggctctcggccggctgcgcggtgaatgtggcggtgccttcacctacggcggccagcgcatccacatacatgggcgcgccttcctcggccagacggtcaagcagttcgccggaagtctcacggccggtcagttcgatggtcagggaagcgacgatcgggccatcatccaaaccctcgcccaccttgaacacgtcggcgccggtggtcgggtcgcccgcccaaatcgcacgctgggcgggagcggcgccacgccacttcggcaggttggagaaatgcaggttgtaccagcccatgggcaccgcatcaagcacgttattgggcaggatattgccataggcgatgacagcggcgatatccgcatgcaggtcgttcaacgcctccatgaattcgggggagcggggtttgagatcgatgacgggcaacccgagctccagagccgtagccttgaccgggctgggcgtgagcttgcggccgcgaccggtaggcgcatcggggcgggtaatgacgccgaccacatcaaaacgtggatcggtggcaaaggccttgagcgagggcaccgccacgtcgggggtgccggcgaacacgagtttgagcatggtcctccttgaaatgtcgatgctcactgcacggccggaatgttcacgccattggcgatgagcagttcacgcagcttgaccggatcctggaaacgtacgccacggatgccggccgcattcgagccgacgatgttcatggccttgtcgtcgatgaacaacgcgccatcggccttgatgccgaactggttcaacgcggcctcgtagatttccttgtgtggcttgcgcagcttgacaaaaccggagacgagcttgccatcaagctgctgcaaaatatcgcactgttcctcggccacgtggaacagactggattcccagttgctcaggccccacacgccgatgccggcagccttcaggtcattgaccagcacgcgcgcgcccggcacgatgccggtcagggagtcgcggaagttcttgatgtagtagtcgaggatgtccgcccacttatcgcccttgtcacggcgcatgatggcgatggcctcgtcggtgctggtgccgccgtccatcaggtcgttgacatcgtagaagccggagatgtcgttgtcgaggaattcgtcgatggtcttctggctgtagcgggggatgagtacggcgaccggatcccagtaaatcagcacgttgccgaaatcgaagatcacgtcggtgatcggcttgccggcgttcgcagcggcctcgccatccgcgaccagcacgtcgtaatccatatccggctctccaggccaacccttcatagtgtcctccttctagcgatgttcattctgtaattatcgtttcacgtgttgaagacgattagatcaggtccttgggatctactcggaagcgaagctcgccgggttcgcgggacgccacatgacgagcggtttcccggtgcagtcgggccgccagctcggctcgccgactctgcggcacacggattactgccttcacccggtcggccgtggcttcgagctcccgggcgtcgaccgtgtccggttgcgcgatcggcaccgggcccaacatgccgggcagctcgccgcaggccgtccaatcgccgcccagggcgccgatacgctgcatcagcatcatcaccgcatcacggcggccccacacgcaggcggcggccacggccggcggcataccggtctccacacgctcctcaagatccttggctgcaagaatcctcgaatcccagagcatcagcgattgggcgatggccgggtcggtttcgccgagaatcaacgcctggccgccacgggaacgcggcgcgcacaacgacaccgcacgcatccacgcggtcaatgtatccaagcgagcatccacgcccaacgcatacaagctggtccaagcgtcgagcacggccacggcacgatactcatggccagccgatccctgctcggcactgaccggacgcacgcgcggttcgaaaccgggagtggcgatgacgatcatcggctgacaagccacatcgcgcaccaggccctgcgtcttgctggacaaaactactggcacgccacggaacaatccggccagctccgccgcagtgcctgcagcacccacgcgcaccacgcgcatacgttcatgcccacagcccggacacttccagttgatggcggcagccccgcaccagcggcatcgcggtgtggagtcccggcggtcggccggtagttgcaatggtccggaacacttggcacaacgcgcctgacgatggcatttcgcacaactcagagtctcactgacgctgtcttgcggaatggacagcagcacggggccgctctccaaagccttagatagcacgcggacggccgtatgcggcacgcgcgccccgatggacgggtcggcaagacgcgcaagttcatcgcgattgagccaacgcacccaaggagtggcgtccttcagcggcgaggcgagcggatgaattgtggtggaatagccgctcaccggggtctccaccgtatccgggccggtgttttcccactggctttgcggggtgcgcgcattggccatggccacgaacacgccgccatgggacttggcgcgcagccgcatcacgccacgggcctgtggatatggcatcataccgtccatgttctgataggcggcatcctccagaatggcgaacagcgccgggccttcaaccggcgcatacatcaccgcacgggtgccgatcaccaccttcacctgtcccaacgccacagccagataggtgcgataccggtcggccgcgggcatggtctccgcgttaagcacggcgacgtcgcccacccagccgccggccggagcaggggcgaacggtttgagcccataattgcgcagcataggcatcaggtcttcgacctcgcgcatggtgggcaattcaaccacggcagctttaccggcactcagcgcagtggccaccatccatgccatgttccgttgccactcctgtgcaccgggcagcgaatcaaacacaaaagattggaaacgctgaccggtaagcgcatcatgaagcacattgacgtcggcgtaattggcggtcagacgacgatacccctgcgcagccccctccgaaacggtactggcaacggcaaaggtagagccagcaggcatggtcccatcgggattggtgccacgcccggcaaaaccgccttgcgtattatctggcaatgagccgccgaccggtcggcggaacgacgcggccaaccgctgttcggcctccaccttggccacgcgcggtggcacagcgaaacgcagaatattggcccgtgtgccgccataggctttggcaatcagaccgatatcctcacgcatcgatgcgggaaccagcacatcggggctcaacacccgttcgatatagcgaatcgaagagcgcggggtatcgctggtatcggtgcgtgcccagatcacgccgctgaccctttgaccgccaaaccgcacgcgcaccagcacacccggttgtgcggcctcgctgtctttttcatcaatgaagtaatcgaatgtctggccgaggtggagcgcctgcacatccaacacgacttgcgctatgggatgctgctcggccggcgtatgctccgcaggcgcacgtttacgccgcttgcggggagccagccccgcaagcgtcaactgttctgcgcctgaagtagtcatggctcaactataagtgccggagccgaggtcggtaaaattttaccggcgcagataatcgagcacgtgggttaggtcgcggtcgttgatggctttgtcggcggcgagctgggtctttggcttggcacagaacgcgagacccagaccggcggcctgaatcatcggaatatcgttggcgccatcgcccacagccacggtctggctcatcggaatacccaaacggtccgcccatgtctgcaaggcgtgcaacttcacggtcttgctcacgatttcgccgagcaccttgccggtcaagcacccatcggcaacctcaagccggttggcaatccaatagtcgatatggccctcggccgccagcatgtcaaccacttcatggaagccgccggacaccacgccgaccttccaaccgtgttcatgcagcgtgtcgataagctccagtgcacccttggtgaaatgcagcttgtcatgcaccgtgtcgaacacggagatcggcaggccctccaacagggccactcgtgcgcgcagcgcatcgcagaactccagttcgccgcgcatggcgcgtgcggtcactccggcaatctcctcaccgcagccagccaccacgcccaactcgtcgataacctcttcgtcaatgagcgtggagtccacatccataaccagcaggccgggcttgctcagcgtcggcacagaaaccgcagaatcagccgggctcccaacttcgctctcggcggacttgtcaacaaaatgcacatcttcttgcgtcatgcttctgattctgggaaaaccttgggacaatgccctctatgagtttttccatggcagccgccactattcttgcaaccgaccccacacccatctgcaccaccaccgaacccggcctgatcggcaccatcaccgactggctgatcatgctgatggaaaccatcggcggtatcggcgtggccttggccatcgccctcgaatccatcttcccgcccatcccgtccgaagtcatccttccgctctccggcttcaccgccgcacgcggcaccctgagtctgccgggcgcaatcatctgggccaccatcggctccgtactgggtgcctggaccttgtacggcatctcccgctgggtgggcctgcatcgcatcaatctcgcggcagacaaaatccccggcgtcagccgcaaagacgtgagcaaagccaacgactggttcaccaaatacggcacatggtcggtgctcatcggccgcgtgattcccgtggtacgctcgctgatttcgattcccgccggattcaaccgcatgaacttcctgcacttcaccggctggaccctgctcggctcggccgtgtggaacaccatcctcgtttccgccggttacctgctcggcgaccagtggtgctcgattcaaggcgcgctcggcgtgttcgaggacgtggtcatcgcggccgtgattgtggtcatcgtatggttcgtggtgcgaaaagtgcgtactgttatacgtaacaggaaatccgccgacggcaacgaatagggtctgccgactgccataagttgccgaaaatcccggatagaagggaagcgaagaacccgcatgagcgacaccgaagatctcgccgcgctgaacgatcgcctgatggccaagaaccatgcgctcgccgaagcgctgagccgcgccggcaaggaactgaccaaggcgaagtcacagctcgcccagctcgctcagccgccgctcaccttcgccaccatggtcaaggtcgattccacccgcaccgatgaagacggcatccagcacgcgtcggccgaagtcatttccggcacccgccgcatggtggtgcctgtggcctccaacgtcaacgccgcccgcctgaccgccggagccaccgtgatgctcaacgagaagctcgtgctggtcgagcagcgcgatgctgacaccgtgggccagattcgcagtgtcaagcaggtacttgacgacggtcgactgatcgttaccgacgcctccggcaatcccgtgctcatccgccgttccggcgcgctcgcgtatgcgggcatcaatcagggcgaccgtattatcgtcgatccgtccgtccgcctcgccatcgaagtgctgcccgccgagggcgacaaggatctggtgctggaggagaccccggatgtcacgttcgccgacatcggcggcctggatagtgagatcggtcgtatcagggacgccgtccaactgccgttccagcatcgtgcgctgtttgagcgctacgatttgaagccgccaaagggcgtgctgctgtacggtccgcccggcaacggcaagacgatgattgccaaggccgtggcgaacgccctatgcgagggtggttacgattcgaatggcgacggcgcaatcagtccggccgaaacccatgtcaagggcgtgttcctgtccgtcaagggcccggaactgctcaacaaatacgtcggtgaatccgaacgactgattcgcctgattttccagcgcgcccgtgaacgcgccgcggacggcaatccggtggtcgtgttcatcgatgagatggattcgctgctacgcacccgcggctccggcgtctcctccgatgtggagaccacgattgtgccccagttcctctccgaactcgacggcgtggaatcactcgacaatgtgatggtaatcggtgcctccaaccgcgtggacatgatcgatccggctgtgttgcgaccggggcgtctcgacgtcaagattcgcgtcgaccggcccaaaaccaatcaggccatcgccatcgtggaccattacctcaccgacgacctgcctctggaagatggcgtcgacgcgcacgccttgtccgccgtgctggtgcatgacatctacggaacctccgaacgccgccatctatgcgacgtgcaggaggagaacggccagtggcatgcgttgttcctggccgacgtggtctccggcgcgatgctcaagaacatcgtggaccgggccaagacccgagcggtcaaggaatccatcgaaaccggcttggacgtggcactcaccgtgccgctgctcgctgccgccgtggaagacgaataccgcgagacccgcgattccatggccgacgtggaccccgaacaatggtcgcgcatcaacggcatggacccgatccgccgcatccgcaccgccgaatagctcaagctcaaggagcactacatgaccgttaaacgagtgatgggcaccgaaaccgaatacgcggtatccctgaacaccccggaccgctacaatccggtgcaactgtccttcgacgtggtgaacggcgccgcggacagccacagcaaatccatccgctgggactaccggcaggaggacccggtcaacgacgcgcgcggcacccgtctcgaacgcgccgccgcccgcccggacatgctcaccgacgccccgcagctcaacatcaccaacgtgatcgcccccaacggcggccgcgtctatgtggaccacgcccaccccgaatactcggcgccggaaaccaccgacccgttcgaagcggtccgatacgaccacgccggagacctcatcatgcaggccgccaccgaacgcgcccgcaaacagactggcactcccattgccctgcatcgcaacaatgtggatggcaagggctcctgctggggcacgcacgagaactatatgatggcccgcgcggtgccattcgacttggtcacacgcctgatgaccctccacttcgtcacccgccagatctacgccggctccggccgcgtagggattggcgagaacagcgagatcccgggctaccagctcagccagcgcgccgactacatccacgccaaagtcggcctgcaaaccaccttcgaacgcccgatcatcaatacgcgcgacgaatcccactccaccgatgcataccgccgtctgcacgtcatcgtcggcgacgccaatcgcatggaggtgccgcaggcactgaaactcggcaccacgagcatgctgctgtggctgctcgaacatgcggacgaggccggattcgacctgaacgccttcctcgacgaactcgaactgtctgacccagtcgaggccatacacaccgtttcccgcgacctgacgctgggggcaatcttgccgctggccaacggcggcgaaaccaacgcatggcttatccagctcaaactgcgccaagccgtctaccaggttgccgcactggtcgaaggcaccgacaccgccggcgaacccgcctggccggacaaatccaccacatccattatggcgatgtggcagcaggcgctcatcgactgcgcctccatccgccatgccgccgatgatgacgaacgtctggccatgaccggcgaggccagccgcatcgaatggctgctcaaatggcagctgctcgaaaaactgcgccgcaaaatcaccacaacgtccgcacccggcgtggccaacggatggaatgatccgcgactgaaggtcatcgacctgaaatgggcggcgctcgaccccgcggacagcatcttcaccaaactcgaaccccgcaccgaacgggtggtgagcgccgccgacatcgcacgcgccaccaccgaaccgccggaagacacccgcgcctggctcagggcaaaactcgtggcgcaattcggcgatgaggtggccgccgccagctggtcccgactcactgttcgcgacccgcgcgccgcagacgagggcgaggcggtcgaattctacggcaatgccggccatatggccgctaccgaccatcacctgttctccctcgacatctccgatccgctcgccttcaccaaggcgcactgcgaaaccgaactcaattcagccgaacacgccatcgatctgctgaagtcgctggccatcaacgccgaacgatagacttggtagctatggaagaaacacgcgaagagaccccacaggacctgcgcaaccttgcgctcaaagtcgccggcctgctcgaagaagccggccagcatgccctccacgaccaactcaatccgcgtaacctcgcccagccgagcaccgagaacgcggaccgtggcccccgctacaagcttgaagtggacaacaagatcatgcgcttcatgagcgccagaatcgccgacatcgcccacttcgacggcttctggaccacccgccccgccgaaagccgccctggccagcgttactggtacatcggcaagatcgacggtgtgatcaactacgtacgtcgcatgagcgaatggacggtgaccgccgccctgttcgaattcggcccggacaacgagcccaagccgatcatcggcatcgtgcacgccccggccctcggcctgacctacctggccgccaggggagcgggtgccgtgcgcatccacaaaaccgcggtcggcgagaagcgcgacaaggtcgtgccgtcgatgacctcctcgctggatggttctgtgctgagctacggcatgtccttcatccccagcgaatcgcagcgtgcgctcgacgtggcctcctcgctcgccggacgcccggccgacatcaagcgcgtgggccccgtctcgctcgacctgtgcaaagtggccgacggcacctatgacgcctacttcgagccgatgctgcacgtgtgggatatcgcgggcatcgccgccggcaccgtagtggtctgggaggcacagggcacgctgagccgttgggacggcgaacgcatccactggcgtcacgataacgatgtagtggcctccaatggactcatcatccgcgaactgcagcattacctgcagcagtatccgtggctcgactccatcaaccagcgataattttttgactcctccggctcccctcgggtgaggggagccgtcggccgaaggctgactgaggggagtttgacagcccaaaaagaagacaacatgccacaacaattcgaacaacctcaagcacagcaggccgcgacccaggaagacgacgccctcgccaccacgcaggccgccgcccaaaccgagtccaccgaccaagccgacgtgttggacgacatcctcgacgacatcgaatccgccttggaaaccaacgccgaggaatacgtcaacagcttcgtgcaaaaaggcggcgagtgatgccccaactgcgtgacagcggcacccgctccctgcacgccacggaacccgtaccatccgccgagatggacgggttctgccgtattttcggcgtcgaaaccgaatacggcgtggcggtcaccggtgccgaacgccccgtggacgccggccaggtggcgatgaccatgttccagcccatcgtctcccgttcccgctccaccaacacgtatctggccaatggctcacgtctgtatctggacgtcggatcccaccccgaatacgccaccgccgaagcgcgcgacccgcgcgaggccctggcccaggacctcgccggcgaacacgtgatgcgcaacctagccctgaaggcccagcgcaagctgcgcgaatcctacggcgcacacgccacgatccatgtgttcaaaaacaacgtcgactccgccggccacgccttcggctgccacgaaaactacctggtccgccgcttcgtgccgttggagaccatcgaacaccagctgctgccgttcctcatcacccgccagctgtacaccggtgccggccgcatgaccccggacggcttccagatcacccagcgcgcggacttcctggacgaggccgtctcctcgtccaccacccgctcccgcccgatggtcaacacgcgcgacgaaccgcacgccgaccccgactccttccgccggctgcatgtgatcatcggcgactcgaaccgttcgcaatggtccacatggatgaagcttgccgtcacgcaccttgtgctgtgcgcgatcgaagacgccttccgccatggcgttccgtccggattcgagcagtatgcctttgctgatccggctgccgccaatcgcacggtcagtcgattccttgacgatccgcgcgccgaactgacgctcgaatcaggcgaatccgtgtccgcactgggtctgcagcgccggtattatgcggcggtcaaggccttcatcgaaacccatggcgatgcgctggcaagttcgctgccggccaccacgatcgacacgattatgggggagtggagccgcgttctggacgcgctggagcgtggtgcatacgatgcgctcgccgaccgcgtggactgggccgccaagaagcgtctgttcgacgcgctcaaacgccgtcgcccggacgtcaccttcgcccagatggaacagcttgagctcgactaccacgacatcgccaacggtcgcctgtacggttcgctcgtagcccgcaaccagatgcgtgagctgctgacaggagacaacgtggaatacgccgtgcacaatccgccgaccgacacccgtgccgccctgcgtggccggttcgtggacgcggccctgaacgtcggagcccagttctccgccgactggacccacctgaccctgaccgcccccgaacgccgggaagccatactcctcgatcccttcgaggccgagcccaccctgggattcgagcagcttatggaagcgctgaactagtccggaataatacggttggacaacacgtcacagcaccacaacaaaaagaccccgaccatctcggtcggggtctttgtcgtcagtaatgctcgaagtaatcgctacgagcagaaggtcactcggtgacggccttcttcagcagggagccagcggagatacgaacgccgtaggaagccggaatgtcaatctgctcgccagtgcgcgggttgcggccggtgcgagcggcgcgcttgacgcgctcagcggagaacaggccggtgagcttcaggccttcgccggacttcatggcctcgacgaacacatcctggaaggcgttaacagcagcctcggcctgagccttggtcaggttggacttctgggcgatcttcgaaacgaggtcagacttgttgtatgccataaagcatccttcttgggtcaggggacaagcacttttgcttagtccatgttgtcatcaatgatactagcgcatgtttctgcgaaaacccgcgttttataagggttttcacatctatttccccgaagggggtatgaaaatagacgaatcagacaagattatgcttgtcaagccacttcatggccgccgcgcccagcggaatgcgcagccagtagaacaccacgcggtgcagcaaagtggcggaaagcgccacgccctgcggcactccgaccgccacgaacgcgaatgtcagcgccgcttccacaccgcccagaccgcctggagtgggcactgcggaacccaatgcataggccagcaggaagacgaacgtcgtttcgatcggattcgatgaatggccgaacgcttgcagggccgcccagaaagcgagcccagtggtcgcgttctggaacagcgcgcccaggcagctgactgtgagctgtcggggctgggaaagcacgtccagcagctggttgatatacgtcttggccagcggcataagacgacgggtcacccagtggcgcaacggtggaatcatcatcgcaatggacagcaccacgaccacaacgcccagcacgataaccaacgtgtttgtcgggattgcgccggagaacatgttgcggccggtgaacaggccgatgatgaccagcatggagaagtacacggcgtaatacaccacgagcacggcgctcataattgcggtcgcctgggtgttgcgatagccggatttgcgcaggaactgcaggttgacgaacgaggggcccacgccggctggcatggatacggtggcgaagccgcctgccacctggctcatgaagacgcccatattgtcacgcttgtgccgcgccatcagggaaccgagcgaaatcgacgagccgatccagccgcagacaccgaacgcgagcgtcaccaccgccatcaacgggttggcgttggtcagcgcggtgatgatctcctcgggcttcagttgggtgaagaccacgaccacggccacgatgaccagcagcatggtgatcatcgaacgccaggagaatcgggccagcgtcaccggttcggcggattccaccgtctcctcgtcagccagcgcggtgatacgactcctcaggcccttgagcagctgcttgtcccaggattccagcgcgcgcgtgggggaggggaccgcgaccttctgaatgaacggggccaaggccgtcagagtcgtgtctccccacgcctcgcgggcggcctccaccgccggttccacgccgatcagcgcggcgaacagcactagcagctgaactttgtcgagcgcggtgttggccggaccggaagcgttgtcgccgttgagccagccggcaatcacggcggtgccgtcttcaagccgggcgagcgtgtccggcgtgatgcgccggtgcgtatagccgcgccggctcgccacggacaggtagcgcatgtaggccacggcatccgccttggtaagcgtgttcaggttggcgggcagttcgatggtgtgtgcatccagcaccagaatcgcggattcgtcggtatcggcgatgccgtagggtgcgggcgcgggcagtttgatattgtgcagacccagcagcatggcgaaatgatgctggacggcgtcacgcacggaacggtcacgtcggatggacacactggtgaaacgcacccagtcccacaactgcttcagatagccgacggtatgggtctgcgcgtcgatgacggaaacgatgaaacgacggttgtccgtggtatccagatcgtagatgcgcgagccttcggccagatcgtcgtccagcgtgacggccagtgaaccgtggccgacgccgggctcctgatgccgaatcagcgaggcggtgtccagtccgatgcctttcagggcggcgaccagatcttggccccacacgcccttgttctgcgtgccgaccacgaatcggatcagcatgcccactgtgcggccggcggccatcgacaccagcatgccggtgaccgaatgccacgacagcaccaccatcaccgcagcgatggcatacaggatattccagctccatttgaccgtggagcgggtgcggcgtggcccggcggcggtcaggaaggacgccatgccggcgtagatgtcgggcaacagcccggagccgtatgaggtggcggctgagactagtgccattggcagggtgaaatcgttcagactgctgattgccgtcgatacgacccacaccatgccgtagccggcgaacatggccagcgcggacaccgcggcctgcagccattcccgggccagtagcaattgagcgagcacgatgatcacgatgacgatggtggccagctgcgtcagcacggtggaggggaagtcagccaaccagttgatgacctgggctgcggtgtgtgcgtcggattcgacgccgcgcgtcatgccgcccagatacacggcgaacaccatgaccacggcggccatcaacagcgacagaccggcccgggtcagatcgccgaagtcgcgcgtgcggcgcggagcgatgtcgtcgatgtacggtccggaatcattgctgtcgtcggttgccgggctgtccggtccgctgacagcaaaactggccgaccggccgtcaccagaggcgatcggccggtcggtagtggaggaggtcgccttgtccgggcgatcttccgtagtggactgctcctgttcagtagtcatgaaatggttacctgacgcctgtccttgttcggttcagtttgtggtttggtttgtgactcagcgcagtagtgtggtggatgcgatgggctcgagggactcgcatcgcacctatttcagcggtcgaaagcgacgagctggctggccacaccggtgtaggtggcgggggtcagagccttcaagcgagcggcggtttccgggtcgaaggactgctggtcgatgaactgctcgacctgttccttgttgatggtgtggccgcgcataagctccttgaccttctcgtacggcttatccatgcccggcaggcccttgagctcgcaggcgcgcatggcggtctggatcggctcgccaagcacctcccagttctcatccagctcacgctcgatgacgtgggtgttcgggtggatggactcaaggccgcccatgaggttggtcagggcgagcaaggagtagccgagcgcggaaccgatgttgcgctgggtggtcgaatcggtcagatcgcgctgccaacgggattccaccagcgtggcggagagggtgtcgagcagcgagcagctgatttcgaagttggcttcggcgttctcgaaacgaatcgggttgaccttgtgcggcatggtggaggaaccagtggcacccttgaccggcacctgggcgaacactccacgggagatgtacatccacacgtccacacacaggttgtgcatgatgcggttggcgtgggagacggtggagtacagctcggcctgccagtcgtggctttcgatctgcgtggtcagcgggttccaggtcaggcccatgcggttggtgacgaattcgcgggagacggcgacccagtcgacatccgggcatgcggccaggtgggcgccgaacgtgccggtcgcgccgttgatcttgcccaagtactcctggttttcgatgtgcttgagttgacggttcagacggtagacgtagacggcgagctccttgccgagcgtggtcggcgtggccggctggccgtgggtgagggagagcagcggcatatccttgaattcctcggccttgccggcgaggtggtcgatgatgcgcttgaactccggggtccacacgttttccatcgcgttcttgacgcaacgggcgatggagaggttgttaatgtcttcggacgtgcaggcgaagtgcacgagggtcttcagctcgtcgttgatgttggccagctcggccggagccttgtcgatctgatcatcgatgtagtactccacggccttcacatcgtggtgggtgatggcctcatgagcggcgtgctgcttgatgccttcggcgccgaagtcctcgggaatggcgcgcaggaaggcctgctcttcggcagtgaacggcttgacgccgtcaacgattggctggttgccgttgccctcaaagccgttggccagaagaatcatccattcgacttcgacacgcatgcgttcgcggttcagggcaggttcgctcatgtattcgacgagcggggcggtggccttgtggtaacggccgtcgagcggggtcaatgcgattgcgggggaaatatcggtaagcttcataacctccaagggtacttccagccgtgaaccgagcggctacactgtggtgtggcgttcccgcccgagccgcacaggtcaaggaacgcccgtgattcgattactgtgtgcggcctttaaggctaggagatcaccatgcctgcaaccaccattcatactcttccgaaacgttcggtcgccgtatcgtcgctgaaatggcagccgttggacatcgcggtcggtgccacactgggcgcggcctgcggcgtgatcttctggggattcaacttcgcgtacatgccgatctcttcggtgtttggtgcggttctgcccggtttcgccagcatcgtgcacgccgtctggtatttctccggtacgctggcggtgctgattctgcgcaaacccggagcggcgctgtacgtgaaccttatcggcacgctggtcgaaacggtgattggtagccagttcgatttgggcttcgtgattatctcggcgctgctgcagggtgttttcgctgagattccgttcgctttgacccgttaccgcatgttcaatctgccgatttccattgcatccggtgcgttggtcgccttggaatacggcacatatctgatgctgtttcgctacgtgggtgtgtcattcgtcagcccgcgtggcatcgtgcacatgatttccgaggtcaccggcggcgtgcttatcagcggcgtgatggcctggtatctgatgctggccatcgccaaaaccggtgtgctcgaccgcctcgcatccggccgcgcactcatcgagcgacgcgcctgacactctttgcgcgccactttcccgggaatgttgcgctgatagagggggtttcgggcatgctagcgcaacaatcccgggaaagtggcgctagccgcgtctctgcggtgattgcattgtggggggtagccgattgatgctaagcattgacagcattgacaagttgatgtgcccgttgccgtgagaccccgagtatatcgcctatttgctgtagggcgagacccatgccatgtagttcttgtgccgcggcgcgagtttcccgcgctgcgttcgatctgcattccgcttcttccttgcgcagtcgccgagcttcatcaaggtgctcttgtacggattgcggcagttttgtctctatggtgagtgcgaaatcagcatcttgcgtcatgacggtgataaggtcgcgtgccatactttcaatctctgctgttgttcttgcctgcgtgaaaccgataccgggaatctcaagaatccagtatttttcgccaggacgaacgatgacctgatatgttttcactgctgataccagcctttcccgagtttggcttctgcttccttacaaatgatgttcgcgaggtcgttgtcgatttcgttatggcgtgggatgggaatcatgagtccatcgagttggaatatctcatgactccctctttgcctgatactctcaaacgtaatattcttgcgtttcgccgcttgcttcatcagtttgatgagccatctcctactcgtcattatattgttaactcctttcttgacaactctgtcaagtgtggtatttacttttaaccgccgaacgtgctgaactcggtggtgcgctcgccgggagcaa

SEQ ID NO: 2837 - DNA, 6279 bp, Unknown
  R36_18m  MAG No. k141_26907
ccagggccgggagaaatcagcacgccatcgtaaccgtccagtacacccggcgcggctgggtcgatagcgtcgttacgcaccacatcaacagtggcgccaagggtttgcagatagcctacgatcgtgtagacgaaggaatcgtagttatccaccaccaaaatatgcgcggaatcggtcatagggctctccttgagggacgtgtactgcaagccatagtactaggctgccgtcagctcactgccacgaagttcgacatctgctgtaggaatggaatattggcggcggcccaagggaatccccactggaacagcgccgcggcggctgcgaacagcagcagagccagcagcagccatcgaatcggtgccacgccgggctgcagacgcaacagtccgccatagatgctggcatccgggcggcgacgctcacccgcgcgaatctcgcgcagcaccggccagcgccatgccaccgcagcggcgatgaacagaaccagccacactaccagcgcgccgaataccaccttgtccagcgagccaatgcgggaagcgatcgagggggtttcggtggtggagaacttcactgcaccggacgaatcagtagtagccagctctttgggcacgccatcagacactttggcccagtacgccaactcaccatagctgatccatcgatgggtgggggtggagtatttcggctcacaggtggtcagtgtgatcatgcgtttggtgggattggcagtggagtcttccggattgggcgcgatcacatacacgtccgtgggcagcacaatctcgtaccgggtgtagtggtagacgtaccagtaatccttggtacgaacgatgatgggatcgccttcctgcaacttgtccacatcgcccaacggctgcccgtagccgttgcggtggccggcgacggcgaagttgccgacctgccccggcatctgggtggtgtcgtaatggcccagaccgtggcgattgagctgctcgagcgtggtgccttccacgatgttgcgatgccattgggagccgaagcgcggaatgtagatctgcgcaatcaagtcgccatatttcgcgtctttcggctgtactggagcatcgccctcctgggctttggcgatggtgaccgttcccccgttgttgctggggtcgctccagtcgacggactgggtggtttcgttctgggctcgctccgcctcgacaccggtccaccacatctgccagacgatgtacagggcgcaaatcacggcagcggtaatcagcagttcggcgcagatgccgagtgcctgccagatcaggctccgctggggcgaagacgcgccgcgtactgcggcacgacgggaccttgccctgctggcattggccgggtctgccgccattcgtgcggcgtcgtcctcggggaagggctgtacgtccgacacggacgcgagatcaatgggcgccggtgcgccgctgttgtgcctgccgtgtctcattgctgagtctgctcctcatctgtggtctttgacgtatcgaccgtggcatatttcaactgctgcagcaaggcggcggtagcggggaactgaaggccctcggcattctccaccttgtagccaatgccaaacgcggtcacatattgcttaagaatggtaatggcttcggagtcgttcaacgctgcgcgaagtctttgagggtcaccaatcgcggaaatggtgaacggcggcgagtatttcttaccgtgcaacgacagcacgttgccggaacagatgaccgccgaattgaacagcacccgctgatccataatcatcagcgcatcggcaccgccggcccacaaggcattcaccaccgattcgacgtcctgctggtggatcacgtaatcgttgatattggcggtcgtgccgttgttgttgactgcgttctcccacaacggagaatcatccagcgttaccgttacgccgctgccgctgagcgcgggcagcatcaggctggaatccacattgctggagtccttgccttggttctgcgtgctgtcagtaccgtcggtgccatcggccttgagcgcgtccgtaagattggcgacctgtttggtcagatcgctgacgtcctgctgcagctggttggcctcgtccacgccttgctccaccagatcggccgtatcgttggtggcggcaaccgtacgattgaccctcacgttggtgctcagcagaaaaccggtcaaggcaatgacgacgaataccgcgacaccaccccatagggagtgccgtgcgccgtgcttacctacatgtctggccatgaatttcctgtcttcttgccgactctggtcgccgctttcgagtgtagccactattatgacttttagcctattgaatggagactatgctgatggctgacgaagagctgcacgagaccgactcgaacaaccagaaggactggcagagcgagacctcatccagcaccgctgctgacgagaccgccaacaaagacaccgagcagaacgcagagaacacttctgccgaggaagacgcggcttacggcgtgaatatggagcaggtgcaggccgtgctcaacgccactgccgataaggccacgctgaccccgcagatgcagcgcatgatgaaccgtcaggcggagaacaccaagcgtgttgaagaaaccattaagggcaccaagtcgaacccgcgttggttcgtgccgctgttctgcgcgtttatgatcatcggcctgatttggtgtgtggtgtactacctctccccgtccggctcctggccgattccgaacatcggcgcgtggaacctgggcatcggcttcgccctgatcatgatcggattcctgatgacgatgggatggcgctgagttccgactcgttgcgcttatctatcggtagatcgttttttctatcgttaggttgttcttagttcttatgcgaaaggccgacctcccgtatgcggaggccggcctttttcgtgccttcacctgttcatccacagctatccaccacttatccacgacttatccactacgttatccacagcctgtggatgaatcacacccatgtagttttccaccgaatgtggaaaaccatgtggataagtggtggataagcggcgtttctcggtgtatatctcgtgcataactttggcttggcatacatcgccacagcgagggaacagttatacacccgagttatccactgcaacaaacccagtaataccgcggcattcctaacttatccacataagttatccacagtcttatgcacttttctacacacttgtgcacaagtcaccattgtggataactcgttatcgtggataactcgtcattgcgcgcatctcattactgtggatatcttcattactgtggataccttcatacagcgcatgcccactcaccgaatgacgatatccacatcgctaatatccacatcgccgctttccgtacatacactgatgccgggcactgcatgttccgcaatactcggcatcaatcgttttttacagccatatcaagccatatcagtgcagggagccgaaactcatccacccgtaaggattggccatattgcacaacagaatcaacacaacgaccagcaccaccatggcccagccgtaaacctgcatacgccatttcaggcttttacctcgccacgccggcacaccacccaccagcagccatgtgagtattccacccactacaaagccgccgacatgcgcctgccacgccacgccaccgaccacgaacggcaaggcgaagttcaccgccatccagatcaacatggagcggatatcggcgccgatacggcgatataccaccagcaatgatgcaaacaggccaaataaggctccagaagccccataggctgccatctgccagccgatgcctcccggagccaccgcagcccacaccataagtcccagagagccgccaaggccggaaatcacatacagtcccaagaaccgccagtggccgatcattcgttccagcactgggcccacggaatacagagcaatcatgttgaacaggatatgcaatagcgagttcggcgcatgcaggaacatcgaggtgatgagcgtccacggctcagccaccagtctgaccggagccgccatgccgaggtacatcaaccaagccctcaggcccggggcaataaatcccagcaatacctccagtagccacactgccacgcacgcaccaatcagcgcccaggtcatcaccggaccaccgcgctcccactggtatcgaatctcccgttgtgtaggaatatgcatgcaatccactgtatcgaaggtctcggatgcgtttcacgcgccgcgaagatgctgagccggccgagggcagacgggcgtggatgaatcgcccacgaatgtcattccacccaatcgtcacaaacagcggcctagaatagggagcagagtcggtctgaatgggcataccgaccagacgatccctagggaaaggagccgtcatggagaacaagtcttctaacggttggaagttcttcgcgctgctgttcggcggattgctcgccgcgcttgtcggcctgtacatctacaagcagcagaacccagattacgatccgtgggaggagccgtgggagaacagctcctcgccggtcgacctgggtctgaacaaggccgaggatgaggccgatggcgaggcggaagccgccccggccgaagcctgatagggcggtttttcaacgcaagaagccccgcaaccgatggatgtcggttgcggggcttcttatgttctggttcccctctccgaggggagccgccccaccgactcagtcagccagaggagcagtgtgccagatgtgcggagccgttaagcgggaagcccggcgggcttcccgtaggcgacgccgagcggcgacagccgcgaggtagaaaccagcacgtagccggcgcgctgctccggcggccgtcaggccagaggagcagtgtgccagatacgttccaaatagtcttccatggagcggtcggagctgaagtagccggagttggccacgttgagcacggccttgcggttccattcgagctcgtcggcgtagagggcctcgatctcggactggatgtccatgtaggcggagaagtcggccagggtcatgaaccagtccttggtcagccagtcggccacgagcggggagtaggcgttgcggtcgccgttggagaaggtgccgtcggccaccagatcgatggcctgcttcaggcgcggatcggcctcgtagtaggaggcgggattgtagccctcggcgtacttcttctcgacctcgtcgacggtcatgccgaacaggaagaagttctcggcgccgacgcgctcacggatctcgacgttcgcgccgtccagcgtacccacggtcagggcgccgttcagagcgaacttcatgttgccggtaccggaagcttccttgccggcctgggagatctgctcgtcaagctcggtggccgggatgaggttctgagccatctcgacgttgtagttcggcagcatgtggacggcgagcttgcctttgacggccggatcgctgctgatcacgcgggaaacgttgttgatcagctcgatggtcatcttggccaggtagtagcccggagcggccttggcaccgaagaacacggtgcgcggagtgatgtcctcggccttgaccttgccggacttgatgtcggcgtagttggagatcacggcgagaatcttcagagactggcgcttgtactcgtgcagacgcttgaccatggtgttgaacagggtgttctcgtcgatatcgatgccgtagtggtccttggcgaagcccacgaatgcgtgcttgttggccttcttgacggcggcgaacttcttgacgaactcatcgtccttggccagcggctcgaggcccttgagcagttccagatcggcgacccacttgtcggtgcccaggccctcggtgatgaggtcggacaggcgcgggttggcgagcttgacgaagcgacgcggggtcacgccgttggtcacgttggtgaacttgtccgggtagacgtcggagaagttcttgagggtgacgtccttcaggagctgggagtgcagctcggccacgccgttgacgtgggagccgccgtaggtggccaagtaggccatgcgcacggcgtcgccagtgtagatggccatgtccttgatggtgttcttgtcgacgcccttggacttgagctcgtcctcgaactgcgcgttgatcttctcgatgatctcaaggtgacgcggcagcagctcgccgatcaggctggccggccagacctcaagggcctccggcagcagggtgtggcaggtgtagttgaag

SEQ ID NO: 2838 - DNA, 10312 bp, Unknown
  R36_18m  MAG No. k141_27005
agcaaattaggcgtattcccggctgcttggctgccgacgttcgggggattggtgcgcaaacatgccacagtgctgattaccggcggaacaggcgtgggcaagaccaccttgctcaaggcgctgctggcgcaatgcgacgtgaacgagcgcatcgtcaccgtagaggaagttcgcgaactgggggaactgggacgcgacgatcatgtctcgttggtaacacgcgaggcgaatgtggagggcgtcggagccataagcctggcggacttggtcaaagcgacgttgcgaatgcgccccgaccgcgtggtgctgggcgaatgccgtggcgcggaaatcgtcgacctattgcgcgcgttcaattctggtcatcacggtggcatgaccaccgtgcatgcggacggcgtgaaccgagtaccgtccaggctgatttcgcttggattactcgccggagtcagtccacaggcgttgaccatgctggcggcaggcgctttcgacgcggtggtgcatttggagcgagtgaacggacagcggcgtatcacgcagatcggcgaactgcgcgtagcacatggtgaactggcaggaacaccgctggcggtatggaatggctgccatcctcctcggtatgccgccgaatgggggcacttcattgaacgatggggcatcgttcccaggccgagtggtggtgggtgatgatgtggtgtgctgttctggtggcgctcgccgtgctgatatggccggggaacaagtccgggaggctgtaccggctggcttaccgcgggcgcgcggtcgattccgcagccataaacgaacctcgatatgccgactcacctcgcgtgggcgttgcgcaggtgattacgtccgccatcgcgcgattgcgaggtggcggcacattggttgaagcattcgaggaacaatccagcagacgcttcgccactcatcgcattactgtggaacggctcataacggtgttcgaacagcggcgtctgcccgacgaatcaccagcgcaggtacttgaagctgcacgcggggtcgccgccgcagcggttttgagcgatgagctcggttgccaagcggtgccatgtctggaagcggtattgactgcttaccggcagatgaggctgatgcagaacttgcgatcgcaagcatgtgccgttcctaaagccactgtggggctgctgagcgcgcttccggccgtcactgtggcattgggcgagcttctgggagctagaccattggcgttcttgcttggatcgccacgcggtgtggtctgcttgacattgggaggatgttgttatgctgccggcttggcatggatgcgggcattgttgaaaggcagcggattatgagtacggtgtgggtacacgccgcggcaggctgtgcggcgattgctggttggctgtataaggctctgtctcgtcatgacagccgcttgccgggcgaggagccggccgtagcgcatgattgcgggtcgtcatggaccatactcatattgcgtatgttgcaggtgtccttgcgtcagggctcctcgattccccgggcgcttgacatggtgggcaaagccgtcggcggcgactgcggcgctcgcatgagcgaggtcgggaactccctgaccagaggggttccctgggctgatgcgtggcatgccgctatggctgttcagcatgagggtgcgccagctgatagtccatccaagggaaatacgaataccacgcaacgagatcttggcctgctgcaatcggctttggaatcgtcatggacgcatggcgatatgcctggtgtgcgcctcgaatccgccattgaacagctggaccgtgacgagcgtgctgctatcgaacggaatgccgcgaagctgtcggtaaagctactgatgcctacagggctatgttttctgccggcattcgtgctggtaggagtcattccggcgattgcgtccttcatgatgtgaatataggcgtgaactgagtgcgcttaggctgaatcttgttgtattgctcggtattgtacttggctgcgtttggttatccacatttgtggtggacgacacgtcgaggtgtggataactcggcaagctagaaccacataccccgtttttcctggtgcatgaagcgttgatagtccacagtggtatgcaccccgcgtcaacccggcgcgggggccaaccactcacatacgcatggggaaggtgcgaagccactgcgcagcttcccctccttaccgaaaggaacgccaatgaatacccctatccccgtcatcgtcgacgggcaggccggcatctttgcgcacagcaaggctcgtgtggccacgctgaacgccaaggcgaaagaacggctatgcctcatggacgcacgcatccgcaccctcatggctgagcccgaagaaggcgcagccactgcggaatacgcagtcgtactcgttgcggctacaggctttgcggcggtgctggtcgccatcctgaagtcggatgccatcaagacgttgctgaccaacatcatcaaacaggctctgaaagtcgggtgacagccatgaagaccatgacatgccggtggcggctcgccagactgccgccagacctatgcacgggatcggccaccgccgaattcgcgatcgtattgcccagcgttatcgccatcgccgggctgatactggcaatgggacgtgtggtcatcgtttccatggactgccaaggtgccgcgacggcggctgcacgcgagtttgtggttaccggtgacgaatcatccgcgcgcagcatagctgcggacgttgcagggggagatccccgcgtcagcattgcccacaacggccaatcgacgagcgtgatggtcgaatgttcggtactgcccggcccactggatgtcactccaacgcgggtcaccggcaacgctacggcgataagccaataactggtcggctgctggctgggcggccgcaatagaaaggaactgcggtgcagggaatgcgttatgaggagggatcgggcacgatggccggagccatgctggttatggcggtgggcattgcgctcgcggtggcggcaagtgtgggcaacctcatgatctgccagaatcgagcgcgttccctcgccgatctcatcgcctttgacgccgcgtatgcgctgtggcatgtggatatcggtgatccatgcgcgcttgctgcaaacatggctgaagcgaatggcgtcacgctgggctcctgctccgtgcgggatgaagacgtgttggtaaccatcaaggtggaaaccatggttccggtggcatcatccgtggagcggatggctcgggccggaccggtgaattgtacggaaggagacaattatcacaataatggaccgtaagcactgatgctctggcgggcttctggacctttggttaaggtgagagcatgagcgagagtgaacgcacagaacgccgtcgcgtggtggccatggtgggcaatcccacttccgataagggccgtggtgccaaggtggatgcgcgagtattgggactgctggaggacgccggccgtgcccataacttcgacgtcatcgacatcaccggcgtaagtttcgacgattccctgaaccaggcgcgtgaacgcgcgcacgagtacgactatctggtggtggtcggcggcgacggcatgatcgcactcggtgccaatgccgtgggttgcggcggtaagccgctgggcatcgtggccatgggctcgggcaacgatttcgctcggggacttaagctgccggtcaatcgcatcgaaaccgcagtggaaggtatcgtcggcgctatcgtgcgcggatcacacattgatgtggacatgggacgcgtgacctctttggatggtggctatgccgtgaacccatccaccggcggggaatacgagtaccgggagaacaagtctgccgagcacccgattgaccggtactatgcgggcatgctgtcttgtggtcttgacgcaagtatcaacgaccgtgcgaatcattcgcatctgccgaccggcaccatgcgctactttgcggcggtgctggtggagctgacgcatatgaagcgttatgggtaccacgtcaaggccacgctggcggacggtaccacggatgaacgagacatcatcacgccgttgctgacgattgcgaattcgcgtcatatcggtggcggcatcgaggtctcaccgtactcctgcttctccgacgggctgttggacctggtgtggatgaatcatgtgccgaacttcggcgaatgtgcggtggccatctcgaacgcctataacggcaagctgctcgcctcaaaggtgttcgggtggaagcgcatacgcgagatcgaagtcacgcgagccgcagaaggcgacgagccaccggtgctgatggcggacggcgaatacatcgggcatctgccattcagggtagtggccgaggactgcgcgctacgcgtactggtaccgccggccgtggccgcccgtgaggtggactcccgacaggaagtgctcgacgccatcgcccgagacggtcgcgaccccgtaaccggccagttcgcctgacctgattatattggctcccctcattaggctgagccgtaaagcaaacagcccagtgggatgtttgtaggcgagggttcgacgatagtcgaaccaggagaaagtcagccgtaggctgtccgcgattgcggacgagctggccgcgaagcggactgaggggagtgcgggagagcggtaccagagccaatggccgtcagacctcagacgacatagctttcgatatgcagcgtctgcgccatgacctctttgatggttcggtcgctgatgttcggatgcgagcgaatcagtgagataagccccacaatcagtgtgaagaacgtctcatggacgttggtgattggcaggccatgcatctgctcgaaatcacgtacggtggtctgggcaatgtagtcggcaatacggtccgccgcgcggtcaatgaacttgatatacagttcggcgttgccatcttggatcatacggtttgagaaggggctctcgtcggcgattagggaacggagcacatgcacgatgtcgtctaatgccttgttcacgttgcctgtttcgcgcgcttggttccactgcttcaacgtggtgaggatttcgtcgatgacgtcatcgagtactgcgtcggctacggcttccttgtcttcgaagtagtggtagaacagcgaacgcgtcataccgacttcgcttgcgatgtcggaaacggtgattttggagaagcctttttccagacacaccttgcgcgcggcttgcacgatggcgtcgcgccgggcatcgccacgggtggggcgtttctcgtcgaggatatcgctcatgggcacctcctgactacaaccgttattgacactatgttaatacaaagaaagcggttaataacaataaaaatgcggtaaccgttgtcagatgaatgtcgttggaatataaagagttttcccgattcggcagctatgagcccggtttatcttgactttttatcggttaattctgagggcaaaggtaggttagtagctatggcacttgcactgtatcgtcgctatcgtccggacaccttcgaaggggtcatcggccaggaccaagtcacggtcccgctgatgcgcgccttggacgaaggcaagcttacgcatgcctatctgttctcagggccgcgaggatgcggtaaaaccagctccgcgcgtatcctggcccgttgcgtcaactgtgccaaagggccgacttcccacccctgcggcgaatgcgaaagctgcaaggacctggccaccggcggtccgggttccatcgacgtggtcgaaatcgatgcggcctcgcacaacggtgtggatgatgctcgagaattgcgagaacgcgctggtttcgcccctgcgcgcgaccgctataagattttcattctcgatgaggcccatatggtcacgcagcagggcttcaatgcgctgcttaaaatcgttgaagagccgcctgaacatgtgatgttcatcttcgccaccaccgaaccagacaaggtgatcggcaccatccgttcgcgcacccaccactatccgttccgtctggtgccgcaggaagtcatgggtccctacctggagacgatctgcgacaaggaaggcatcaagcccgagcccggtgtgctgaaactggcgatgcgcgccggtggcggctccatgcgagataccctgtctgtgcttgaccagctgatggttggttcggtcgaaggcgttatcacccatgatgccgctgtagccctgctcggcttcacaccggaggcgctgatcggtgaggcagtggatgcggtaatcaatcacaacggcgaagccctgtacggcgttatccagaaagtcgtggtcggcggattcgatccgagacgattcgtcgaagacctgctggctcgtgtgcgtgatctgctggtgcttacgttggccggggaccgtgcggaatccgtgctgtccgacacggctgaggccgaggatatggacgatctgcaccgccaagccaaggcgctgggactgggcgcactgaccgccatggcagacatcatcaacactacgttgggtgccatgaccggagccatttctccgcgtatgcgcttggaactgctggccgcacgattgttggccggcagtgaatcaggctttgcaacagccgctcccgcgccagcttcttctggcatgccgcctgcggctgcttcttcgacttcgactacgtcagccgcttccggtacgggtgccagtggttttgccggcgcatcgcgaggcgggtttgccggagcctcacatggtggattctccggtgctgcacgcaaccagcaagcagccgcgcctcagagcaccgcttcccatgaatccgctgtgggagacaatggccctgtcagcagcccagtcagcgaccggcccgcgggctctccgtctgcgcaacctgccgcagcaactgctgctgccaatgcctggggtgctcccgccacgtcgccggccgtcccggcccaaccggtgacctcgcctgcggcatcggataatcggtccatcgacgagaagtgggatgcagccgtcgccgctttgccggaaaccattcgtgaatatgtgtcacgagacaaggtgccgaccgtaaaattcggtcccaaccgtaagagtctgccttgcctgtcgatgacgttcgacaagtcgctgagccagcacgctttcgccttggccgtggacaacagcggtaagaaggcggcgtccgtggtgttggatgccgtgcgcaacgagttcggtgccaatgcggttattgcaccttctgcggtcgcggcgaatggcgagcgagtcgaatccgtcaaacgtatgagcccggagcaattggccaaggtcaagcagcagattgccatggccaaggccggattggccgcgtcgagtttgggcgcgggtctgggcattcatatggggagcgagccgaaagctccgaagccgactgcaacaggccaagccgaggatacggacgacagccatcgagccggccaatccagtgcatccacggcggcgaagagctggagtgacgatgacccttgggccaagccggccgtaagcaacgcttcaccgcaatctgcagacgggttcgcacctaacgagcccgctgctgcgcctgcgcccgaagagcatcacaagaagcatgttgcggttccggacatcagtgatggtgttgatccgtgggccgctccggctgctcctgttgcacccgctgcgtccgttgcgtccgctggactcactggacagtccacggggcagccagccaccgcagctcccgctacggcagttgccggcgcaagcgatgatccatggaatcagccgcaatctcaggctacggcctcgctggcactgcaaccggtcgaagccgacccgtggaaccagccatatcagcagtctcctcacgacgacccgtggaatcagccgcagtcccagactccggcttcttcggttcctcagacagtgtcgggcaatatgtcgggcgatgacccgtggaaccagccccaatcggttccgcagccggctgccggcgatgacccgtggaatcaaccgcagcccgcacagccgacgccgaatgccgacccgtggaatagccagccgcagccgcaaccgcaagtcgcggccgaggacgacgaatactcgatgaacgaccagtcgctcggcgaggcgacggccatgaatcttgacgatctgaaaaagctattcgaggtcaaaaaagtcgagcaattcgcggcagatgatccgaagaaccccaagaacatccagcctgccaagaagcactcggatgaataatgaggacgaataacgaggaatacccatggcacttgcttatgacggcgcaatacagcgactgatcgacgctttcgggcggctgcccggcatcgggccgaagggcgcgcagcgtatcgccttctacatgctgtccgcgcccgaagatgaagcgcgcgatttggccgaggccatcgaggaggtcaaggccaagatccgcttctgtgatatttgcggcaacgtgtgcgaatccagcccctgcccggtatgcgccgacccgagacgcgaccgttcggtgatctgcgtggttgaagagcccaaggacgtgatgagcatcgagcgcacgcgcgaataccgcggcctataccatgtgctcggcggcgcaatcaacccaatggccaacgttggccctgccgacctgcgtattcccagtctgctcaaacgcttagaaggcgatgaggtcaaggaagtcattatggcgctcgacccgaatattgaaggcgaggccaccaccagctacttgacccagctattgcgacccgtaggtgtcaaggtcacccgacttgccagcggcctgccggtgggctccgacttggagtatgccgacgaaatcacgctgggcagggcactggccggtcggcgcgaggcctaagccagcgtatcattggcgctttcgcccttgcggcgcatccacggccagaatgcgccgtggcggatgatgcgcgcggccttgtgccgtcgtgccaaccagataatgaacagtcctgccgccagtatgcccaggccaacaccaagggcgatattgcgcgcgtcaagcacgtcattcggctcgggggccggcatcggaattgccacgcggtgcccggagataagcagtcgatgcgtgttcacgccgtatggcgtacaggtcatcaaggtgacatggtcctcacccggcacaatcttgagcttcgacgtgtcatccggcaaaatcaccgaaatgcggtccactttgtagcccaaagtttcgcccatgacttcgatgtagaagaagtcgccctctttcacctcgtccaaacgggtgaacatcagcgcttcaaccaacccgcggtgcccggtaatgaccgaatgggtggatttacctcccaccggcagcgacgtgccgtacaagtggccggcaccagaagccagtgcttcctcggaagtgccgtgataaaacggcagattgatggactgcttgggcaccttgattgtgcccatcacgccgttgccggtattaagcagtgactggtattccttgtctttctttgaggcggaatcctcgccgctggcttgggatcccccttgagcggcggcgaacggatcgacggcttcacccaagataggctggccggattcagcgagcttcttgttgtatgcgcgggccgccgtgagcttgtcttccgcctgcgggtaaggccagccagctacttctttggccgtggtggctgtggtggcggccaagttgcggtcggactcgaattgcaacgctagcgggaagcaggccacggcgattgcggcgatcagcagcacaatggtgatgatgcgcatcgcccacaggttgcgttgcaggcgtcggcgctcggccacgagatcgctgatatcgatgacttcgtcaaatggtgttggaacgaatgctgcgggctcgggccgcgctgaggaaacgttgtcatttgcagatgcgtcatccggcatggccgcgttgttttcccacattttctgtgaggcacgcttactcgtcgaacgtcgatgcagcaatgccatagtcgcctgttccttcgcttgatctgctcatgatttgcttatacaagacggccgggtccgtcttagtcgtgcatggcataggtgctgtcgcaaatggcaacaccgcacgcgccacactgcgaaacgttactccgcaccaagcctttcatgcaacatgccgacggggccatataggggcaatggagggggcataagaagtctgaaaatgcgatacgaacaacgttgctacggctgtcagtgatgcggcttacttcggaccagccggtgagatgcaaggggatgcaaaggat

SEQ ID NO: 2839 - DNA, 9384 bp, Unknown
  R36_18m  MAG No. k141_27086
ctgcggccgcgggcgcccaggtggtgccgagcgccgaaatcgccgcgatttgcatggaccgcgagcgcctgcgcgtactggcccacgaagaattgggcttgccgactacaccgtatcgttttgccggctcgctggaagagctgcgcgccggagcttcggaagtcggctatccgtgcgtggtcaagccggtgatgagctcgtctggtcacggccagtcggtggtgcgttccgccgacgccatcgatgccgcttggaccgaagcgcaggagggccgccgcgccgccgatgagggcgatgtgtcgcgcgtgatcgttgaggcgcttgccccgctggagcgtgagctgacggtactgaccgtttcttcgtccgccggcattgtgacgtgcgcgccgatcggccaacgtcaggagtccggcgattaccgcgagtcctggcagccggctaccgtgcccgatggtgaggccgagcgggcgcgcgacatcgcacgtaccgccgttgaaggcttggtggccaaggctcaggcgaccggcgaaaccggttggggcgtattcggcgtggagctgttcgtgctcaccgacggctcgattctgttcaacgaggtctccccccgtccgcacgataccggtatggtgacaatggcctcccagcgtctgagcgagttcgcgctgcacgcccgcgcgattctcggcctgccgatcacccccgagcatgtggcgctcacgattccggccggctcggtggcggcaagccatgcgattgtggtggccggcgacggtgaggccgagttcaccgatgtggccgctgctctggccgaacccggcacggacctgcgcatttttgccaagcccgaagtgcatggccaccgtcgtatggccgtggcactggccgtcggcgagtccgaagccgacgcccgtgccaaggccggccgtgttgccgatgcgttgacgattaccgtggagtagtccacggcctgatcagctcagcatggcctcaatattgttgccgtccgggtcgtggatgaacgcggcgtaatacgtggggccatagttcgggcgcgggcccggagcgccgttgtcggtaccgccagaggtgagaccggcctcatggaacgccttgacggcggcctcatccttggcgcggaacgccacatgagacggcaccaccgggttgccgtccttcggagactccagccaaacgctgtcgccatcctcgtcattggcaaagcacacggcggtcgggtacgccactttcttgacgtaacccagcggggccagcagcttctcgtagaaatccgcgtactgtgcggcgtcggaaacaaacaaaccaatatgatcgatcatgacgaacctccttgcaccatttcgtcactcccattatcgtgcgtgcgcggccgtacactcacgttttgtctattgacgaacatctgagtgtccgcgtgcttgcgtagatactgttactccgaacgactatgcgaccggcaatgagtcgattgtcggaccaataccgtccgcctccgccatcccaacagcgtatggccgttcgatgcagcgacgtatgatgcgctggccgcatcgtagcgtcatgccgagtgttgttgtagccctcgattggtacccttttaccgttagttcacccagaaattccactcctgaaaggtgagtcatggagaagctggaaaagctctacgagggcaaggccaagcaactgtacgcaaccgacgatcccgaggttctgtgggtcgaatacaagaacaccgccaccgctggcgatggtgaaaagaaggaagacttcaccggcaagggccgcctgaacaacctcatcaccaccatcatcttcgacctgctcaagaagcgcggcatcgacagccatctcatcaagcgagtgaacgacaccggccagctggtacgcaaggtgaacatgttcccgttggagatcgtgctgcgcaacgtggccgccggccacttctgctcccgtctgggcgtggaggaaggcctgccgctcaaggagccggtgcttgagtacttcctgaagaacgacgatctgcacgatccgttcgtcaacgacgatgacctggtggccctcgacgtatgcactcgcgaggatctcgccgagatcgccccgctggcccgcaagatcaacgaggccctgatcgagatcttcgccaagatcgacgtcaagctggtcgacttcaagatcgaaatgggccgcgccaccgacggcacgctgctgttggccgacgagatcaccccggattcctgccgtctgtgggaccagaaggaccactccggcaaggtcgagcaccttgacaaggacctgttccgccgtggtctcggcagcatcatcccggcctacgaagagatcgaggagcgcctcgccgaactcgccaagtccgaaggcatcgaagtcgccgaataagtcgtttaggtgcaggtagcagaacatacagctggctcccctctccgaggggagctgtcgccgataggcgactgaggggaggtcaagacgttcaccgccatgacaactcccctcagtcagctccgctgacagctcccctcggagaggggagccaagttcttttaccgcgcttcttcaatttttcaatattttcaagaaaggatttccatggtttttcgcgtgtacgtggaaaagaagcccggctttgatgtcgaagcccagcagcttgcgggcgaactgcgcacgatcctcggactgaacggcctcaaggccctgcgcatcgtgaaccgctacgacgtcgaaggcatctcccaggagctgttcggccagaccgtgcccaccgtgttcagcgagcctcaggtggacaatgtggcctacgacctgcccgacttcgccggcgccaaggtcttcgccaccgagttcctgcccggccagttcgaccagcgcgccgactccgccgccgaatgcatccagctcatctcccagggcgagcgcccgacggtccgttccgccaagctgtacgcgttggaaggcgaactgaccgacgccgacgtggacgccatcaagcattacgtgatcaacccggtcgaggcccgcgaggccagcctggagaccaaggaaaccctgaagacccaggtgccggtgcccggcaaggtcgagaccatcgccggtttcaacgagatggacgccgaagccggccagaagttcatcgacgagcgcggtctggccatggatctggccgacctcgaattctgtcagaagtacttcagcgaggagggccgcgagcccaccatcaccgaaatcaaggtgatcgacacctactggtccgaccactgccgtcacaccacgttcggcaccgagctggacgaagtgaccatcgatgacgccaccgtcaaggccgccttcgagcgttacctggcgatgcgccacgagctcggccgcgacgccaagcccgtctgcctcatggacatgggcaccatcggcgccaagtggctcaagaagaacggtgtcctgaccggccttgacgagtccgaggaaatcaacgcctgcaccgtcaaggtcaaggttgacgtgaacggccacgacgaggactggctgttcctgttcaagaacgagacccacaaccaccccaccgaaatcgaaccgtttggtggcgcggccacctgcatcggcggctgcatccgcgatcctctgtccggccgttcctacgtgtatcaggcgatgcgcgtcactggcgccgcggacccgaccgtgccggtctccgagacgctggaaggcaagctcccccagcgcaagctcgtgaccaccgccgccgccggctacagctcctacggcaaccagatcggtctggccaccggtcaggtcgacgagatctaccaccccggctacgtggccaagcgcatggaggtgggtgcggtcgtggccgccaccccggccgaccatgtgcgccgcgaaaccccggcccctggcgacaagatcatcctgctgggcggccgcaccggccgtgacggcatcggtggcgccaccggttcgtccaaggcgcataacgtggaatcgctcgaactcgacggcgccgaagtgcagaagggcaacgctccggtggagcgcaagctgcagcgtctgttccgtcgcggcgatgcctgccgtctgatcaagcgctgcaacgacttcggcgcgggtggcgtgtccgtggcggtcggcgagttggccgacggcctgttcgtggacctcaacaccgtgcccaagaaatacgagggcctggacggcaccgagttggccatctccgaatcccaggagcgcatggccgtggacgtggccgccgaggacgtggacgagttcctgatctacgcccgcgaagagaacctcgaagccacggtgatcgccaccgtgaccgaggacccgcgcatggtgatgacctggaacggcgacaagatcgtgaatctgtcccgtgagttcctggcctccaacggcgcttccaagcaccagaccgtgcatgtcgaggcacagcagtcctacgagaccccgtggggcgagggcacgctggccgagcgtatgaacaagctggtcaccgacatcaacgtggcctccaacaagggcctttcggagcgcttcgactccaccatcggcgcgggcaccgtgctcatgccgttcggcggcaagcgtcagctcaccccgaacatggccatggtcgccaagctgccggtgttcggcgagaccaccaccgcttcggcgatggcgtggggcttcaacccgtacatcatgtccaagaaccagttcaccggcgcctacctgtccgtggtcgagtcgctggccaagctggtcgcggccggcttcgagcatgagaaggcctacctgagcttccaggagtacttcgagaagctgcgcgacgagccggaacgctggggcaagccggcggccgccgtgctcggcgcactgatggcccaggtggacctgggcgccggcgccatcggtggtaaggactccatgtccggctcgttcgaggatctcgacgtgccgccgacgctgatctccttcgccgtggccgtgggcaacatgaagcgcgccacctcccccgagttcaaggacgccgaccaccgtatcgtgcgtatcgcaccgcgttacctggccgacggcctgaccccggacaaggacgcgctgcttgaggtgttctccgtgatcgaggagctcaccgacttccacgatgccctggccgtctctacgccgggctatggcgccaccgccgaagccctgttcaagatgacgctcggcaaccgcatcggcgtgactctgaacgacagcatcgccgtggacgacctgttcaccccggcatatggttcgttcatcgtcgagctgacagacgatgccaagcttccggccgtctccaatttggtcgagatcggcgaaatcggcaccaccacctccgagtacgtgttcaaggccgccggcgagacgctggacctggacgctgtgcaggaagcttgggagtccggcatcgaatccgtgttcccgtaccgttccaagggcgaggacaagggcgcgaccgtcgagaccatcgacttccacgcgccgaagaagaccgtgtacgtcggctcttccgtggccaagccgcatgtggtgatcccggtgttcccgggcaacaactgcgagtacgattccgccgccgccttcgagcgtgccggcgccgatgtgaccacactgatcgtcaacaacctgacgccggccgccgtcgccgaatccacgcaggcgttggtcgacgagatcaacaagagccagatcgtgatgatcccaggcggcttctccggcggcgacgagccggacggttccgccaagttcatcaccgcgttcttccgcgcgccggccgtcaccgaggccgtgcgtgacctgttgaagaaccgcgacggcctgatgctcggcatctgcaacggcttccaggcgctcgtcaagctgggtctggtgccgtacggcgacatcgtgccgatgaccgacgcctgcccgacgctgaccttcaacaccatcggccgccaccagagccgactggtccgcacgcgcgtggcctccgacctctccccgtggctgtccaagacttcggtcggcgacatccacaccgtggccatctcccacggcgagggccgcttcgtggcctccgacgaggcactcgcccagctcagggccaacggccagatcgccacgcagtacgtggacgagaccggcacccccggcatggacctggatgtgaacccgaacggctcgctgctcgccatcgagggcatcaccagcccggacggccgcgtgtttggcaagatgggtcactcggagcgttccggcaacggcctgtacgtcaacgtgcccggcaacaagtaccagccgatcttcgaggccggcgtggaatacttcgccgcctgataatcggcgcgtatcgcgtctgatacggcacacagggaaggaactctcgggttccttcccttttttgttcatgccggtcatgggctaaggttggggtgttcgcactaccgaatccgccgctgaaaggacctgtcgtcatgccgatcaacgaggcattgttcgccgcgatgaaggccgccagctacatcaagcccaacgcgggcaagtcgtacaaattgcagcgcgtggcggaagagcttatcgccaagcaggcacccgccaatccgaaatgccgtgtcgaggacgccttcgcgcctatggcggatggatatgccgtaccattgcgagtgttcacgccgttggtcgcctatggagcgcccctgcccgaagccctggaggaatcttccgccaatggcacgccagtggcctcggcaatatccgcgattctgcccgccgtattacccaaagtcctacccaaaatacccatcaaggaaagcacgtcgagcggcaacaccgacggtattcccggcaatgccaacacggaacttccctcagtcacgccgcgtggcacgatcctgtttttccacggtggcggttggaccacaggcggcatcaacctgtacacgcaggcttgcgcgcatatggccgtacgtctgcaacgccgtgtgatctcggtcgagtaccggctggctcctgaataccgcttccctactgctgttgagaattgctatgaggtagcccggcagctgtttgctggggaattgccgatttctggggtgggtggttctgttgatgttgaccacccccagtcggctgcgccgacagcccccaccggcgggggcgatatatctgcgacaatcccagcaccggatcccgacagcatcgtgctgtttggcgacagcgcgggcggcaatcttgcggccgccgtctcgctcatggcccgcgaccgcggcgagttcatgccgcgcacgcagatgctgctttacccggtggtcggcaacgactacaatcccgagaccagcccgttcgaatcggtgcggaccaacggcaccgactacatcctcaccgcacaggacatggccgactacatcgacatgtaccgttcgtccgtggccgacctgaccaatccgtatttcgcgccgctcaccgcgcatgacctgagcaatcagccgcgcacgctggtgttgtccgccgaatactgcccgctcagagacgaggacgaagcgtacgcccgtcgtctgcaattggtgaacgacaacgtctcctgttaccggattcacgacggcatccacggttatctgctcaacacgtcggccgtggggctggtgtccaccacttaccggatcatcgagcatttcctcgacgacacaccgctggtgccggctcccggcaccggcaccagcgccaacgcatcggagggaggcgacgcatggcaagacgtacttggtaccgactagacaacatcggcaagttctactcctcccaggctggccgctcctcgcagaccgtgttccgctattcggccgagctggcggacgacatcgccccggacatcctgcagcacgcgctcgaccatgccatcgcccagttcccgagcttcaacgtgcacctgctcaacggcatgttctggcattacctcgaacagtcggacggccggccgctggtggagccggaacatctgccgatatgctcgcgactgcattacgggcccaaaagcatgctgttccgcgtgagttatttccgcaatcgtgtcaatctcgaggtctcgcacatcatttcggacggtcgcggcgccatcaacctgttcaagtcactgttgcacgcctacatcgccgagcggtacgacgtgccgggcgtgccttcggattacgacggctcggacagcgacaaagccgaaaacagcttcgacaaatactacgagaaagacaaggccggtgccgcgcccggcacgaagatctaccggctggccggccccatcgaccgggacgcgcccacgttcatggaatatcacgtcagcgccagcaaggtgcttggtgcagcgcatcagtgcggagtgagcctcacctcctacctcatcgccgcgatactgtgcgcgattcgcgacgtcatgccctcgcgcgcccgcaatcgcgcgattcgcgtggatattccggtcgacttgcgcgccttcttcaggtcggagaccgtgcgcaacttctacggcatgacttacgtggcgtacacgccggccgaaatcgaagccgatgaggactccgcgaaaacttccgcaacgggcccagacgcgaccggcgacggccagcagtccgccgcccgtaccgcgcacggcaacggtatgggtggattgctgaccgatgagccgttggccgacatcgcccgccatgtgcaggagcagctcgaccatgccaccagtcgcgagcgcgtcgaatcgcatatgaaccgcatgattgcgctggaaaagaatccggtgctgcgtcttgcgccctcccctgccaaggactgggtgctggagctggcccggttcatcgccgaccgcgagaccacgaccaccgtctcgaaccttggccgagtcaccttggacgaacgactcgcgcgccatgtgcgttcggtgagcttcctcaccacaccggccagcctgaatttcacggtctgctcgtttggcgacgacctgagcatcggcatctccaccgtctaccatgatctgaacgtcagcacgaacctgtgtcggattctcgccgcgcagggcatccgcggccgtatgaacatcgccggcgcgcatgtggagaaaggagcgtcggcatggagcagtgcgatgcctgcaacgtcgatttcaccggcgatatggcccgtggcccactctgtcagaacgaattgcacggcgaggcctctcccgccgcattccccgcgcagcagatctatctgcgtccgaggcgtttggcggtggagctcatcacgtttgtaaccggcgcgattctgctgctgcatggcttcttcagctatctgttttcgtggccgataccgattgccagtgcatcggcggccgcgctgatc

SEQ ID NO: 2840 - DNA, 14251 bp, Unknown
  R36_18m  MAG No. k141_27202
atcacctggccgaggatggggaacttctcgttgagccagtcgatgccgtcggcgagtttgccgactgcggtggcgatcccgtcgatgacgccggacacggtctcgaccacgtcggccacggcgttgatgtacgcggcgaatcccttggccgcagcggcggccgtgtcgaggccctcgccagcgccttcggcggacttcttgccgccgtccaacgccttgccgagcttttccagcgagccgatggcgtcgccgagcgcggagaatatgcgttcgagcgtgtccctccacgtgtccaatgcgccgctgtcggagagcgtgtcggtgaatttcttcacccattcggccacgcgtttgagctggtcggccatcttctgcacgaggtcggccgcgaccttgataaccgcgcccagcagttccgcggagcccttggccgagtcgaagtggtcggccgctgattcggccatgtcgccggcaccacggaaggcgtcagcgacgtctccgaccgcgtcgaacaggccgcccagtgcgccggccagttgctgcacggccccggtgtctttcagtgcggcgatgaacttgctccaccattcgacggtgtcggccacccagtccgcgaagtcggagaacaccgtgcccacgtatttgagcacgtcctcgatggccgagactatcgcgccgtccggcacgaggcccttgaacgacccggcgatgcggtctaccgcctcggtgacgcggctgcgcgcggattcgaacgccgtggagatggtgtccttgaaccgggttatcgcgccggtcttgtcgagcttgtcgtacaggcccttgatccacttgcccgcttcggagagcttcttcttcacgtccgtgaccatgctcgcggccgcgtcgcccaccttgccgaactgtgagctgaacctgttgatcgcgccggcgatgttctccacgccgacggcatcgatgatcttctgcacggccttggcgacacggttcttcacgttctccatggccgtgccgatgccctgggtcgcgtccttggcctgctgtgcgaacgaggcgtatttgccgaaaccgttctggttcagttctatgaccttcttgttgaaatcatcgaaactgattgacccgtttttcatggcctcatacaggtcgtttgagttcttccctgcgcccagcatggcctcggccacttggttgagctggcccggcattgcggcctgaatcgaacgccatgcctgcatgtcgaccttgccggcacttagcatctgcgtgtactgggtgagcgcgttctcctgctccatggtcgaagcgccgccggcgagcatggcgttgttgaacgccaaagcgatgtcggtggcctcgtcgaggttcgaggtcagtggggcgagctgctggaccatgccggtcatggccgagctggtggtgggcagaccgtcgagcgcgtcactgatcttcttgatgctcgcggccgcatcggtggccgaatatccgaggttcttcatgaccttcgggaagttgttcatctggtcggcgcggtcaactgcggaaccaaggctggacgtgacgacggacgcgaccttgctgaacacgttggacgtgatgccggccacggctccgaccttggaggcgaatccgacggacagtcccttgccgatgctctgtccggtcttactgccggtggttttggatgcgtcgccgaacgctttttcaatggccttgccgacgccatccatggaaggcacgatgggcacatatgcggtggcgagattataggccattgtttcgccttcctctgttcggttatggttgtccggtctgcggccggttctccacacggttcacggtcgtgaaccgttggctcatgaatcggtcgagctgttcgacgctcatgccaacggccttgatggtgcgcgtgcgacggatggtgttgccatcgggttctgggttctctgatccggcttccatggccgggccggttgcttccggcgtggcgtggtgttggccggggcgtggcagcggccggggttgcgggccgcgtttcctcgggtcgccgtttgcccagatccactggttcatctgttcgatgcgcagcacggccagatactggtcgaacgtccacgcgcgcggcgtgtccaacgtctgccagacgagtgagcctgcggggaggttcgcggccagtgcggccgtctccaacgggtccaggtcgtgcatgccgagcccgtactcccttctcatgtccgccgccaactggtcaggacagcggtcgagcaggagcacgagcgtcatgagtttgggaaagccttacccatctcctcgaacagctcggtcaggaaggtgcccatagtttcgccgtcgatgcgcccgtctgcgcctcgcaatccgttcttgaccttgtcgtatgagtcgcctaacaatcggcgtaggaacgggatgatctgcaaggcgttgcccttcggatcggcctgaaggtcatagagcgattccatgaactcccaatcgtccaaaaccttcgggtcgatatcgatatcgattccacggacgttgacacggcgaaccgtattcttggactgcttgtggtcctgtggtcgtcctgcaatctggctgacattggcgcggcggtggtttcggttgcgtgacattgacgttctcctcgaagaaaaaaaatctctccttgacggttaaaaaagaattcccctcgcggcaaggagagaatgaaggaatccgcgaggggacgtgttggctagtcgagccggtagatgcgcggggtcaggtcgatgtccgcggtctttccattggcgacgaacacgttggccctatagtcgccggcttcgagcttgacggacgcgccgcccagctgggcggtattattgccgccgaggaactgacatccgtaattccagccattgctgttgtcgcacgtgagcatgtaggtgccagcgtccagtctcacggatacgtcgacctgcgcccacgcggtcgccgtgcccttcacgtgcactgtgcgcccgtccctgctggtgaacgtgacgccgttgcttgtcgtgggcaacagagacgcgaacgagggcatgaggttcactggctcatagcccccccccctaaggcttgtgttgtcgggtttcatccactcgtgcgcggtgttcccgagttcgagttggattttcaggttgcccgacacgctgccggccgtgacgccgccacgcaagatgcgcagctcgacgcgtgtggtccccttggggatggtgaccgcgacgttgtttttcccctgatagacgccgccgatgctattcgcgttggcgtagaggccgatgaccagggttccgggcacatcgcccgtgtaggagaggatgagaggcacgccaacgatgccttcgggcacgtcgagctcccagcgcacgcccttgttcaatggcaccgattcggtgccgctgctgaaatcaagcgacccgtcctgcgccacggtggcggtcagaccgttgcccgacgcgggaccgtaggcgagcaggttacgggatttgaccgtgaccggcacctgtttgctgatgttcggattggttgtcgacttgatggtgattgtggtggctccgggtttcacgccggtgacgcttaccccaccactaaatacttcatcagccatggttcactccttttcgagagatcgatgcgatggacttgtcagcgacagtcgcggtcaccgtctggtccgcgccctccggcagcaccttgacgtcgaggcccgcggtctcgccgaccctgagtgtcaacgactcgggcgtgacctggatgccggtgggtttggacggcagcggggccggcagcacggcctcgcccttggcacgcgcatacgagccgttgaccgtgcaatccacgacggtgaccacctgaccggtcttgccgtttacctgaccgtccaaggggaacacggtccaaccgaacgcgaggtctaccaccgtggcgctttcaacgaccggtttcgcgtccgcgctggttatcttgtatcgacgctgaaggccggatgttggagcctccgacacattgaccgtctggcccccttcacgggccgagaccgtcacagtcagaggcgtcagccttttgggataccgatatattcgatggaggtgacgccatctcccatgtcgttcgcggccacagtgaggtcatagccgagcacgtcgctcgaatgcatctggcggtcgccgaattcggaacgggttgcggaaccgatgacggtacggtccttcacgttgccggttgcaacgatctcgaacacgagcgagaccggtgtatcgtcgggcatctgatgcttgatgaccatgctcttgtccttgccggtcaccgcgtcgttgccgtagcgcatctgcgccgctgccttgcgcaggaactcgatgagcacgaacttgtaggattcggcgtagctggagatgaccttcatcacggtcgtaccgttcgcgtccttgacttcggcggtgtcggtgtcagtcgtgttggtgatgccggcctccgacaggtagccgatgagctggaaagcggggtcgagtgcgctttccgaatcggtgggcaatgcggtgccgacgggtgccgcgtacgcgtagccgccgaccttgaacttgccgaacgacacgtttgtggaatcgttcttcgttgttgtttcattagtcatgattaggccctttctggaaatgatgctcattcgtcggtcttgacggtgagctggatgagtatctggtagcgtggccgtccgtccggcatggggaagtcggtcaggccggtgatatcccaatcggccacctcgggcagttcaacgatgcgtttcaaccgtggcagcacgagacgctgtgccacgtccgaagcctcccagcgtgaagcggcccacacctgcacagcgatcaatggtctcgacacgaaccggccttccgaacctcccgtgcgttccacggtgacgaacgggatacggttcgtggcgctggattcggcgggaacctcgaagctcgcgggataatccttgagttcgggtgccgcgttgagccagtccatgaccagcttctccgcgttcatcagccgcctcccaacgccttggcgagcgtgtcgcgcacggcgttatcgatgcgcgcggcgagattatccgtatgcacgagcaccgtcgcgcccttctcgttcgcccgcgggccctccgccgtgtacgacggctgccccgcgtgagtcggcgcggccatggagttggcgcgggccgcgatcttctgtgcctccgacaaggcggcgcgagcgccctcgttgcgcctgtacgcctggaatgccgaataatgcagtttcacccgtttcatgcactatccctccgcgtcggtgacttcgaccgtgaggttccatgcagtcggcttcattccgccgtccaatggtctcgggtctccgatcacctcgtagtcatgtgaattgatgcgcacactcgccccgcgcagactccggtatgcgtagctgcgggggaagaggcaggtgaatgcaacggtcacgccgtcaggtcgaatcgagtcggtggcgttgctcatcgcgcctggtgagacgagcacgttgtccaccgactcgatatcgaccttcgtgactggcgagccgccggggtcggtctcgccggtcggcgtgtagcgcaccactttcacggtctcgcccctcatgacgcctccccgtttgacaggtcgatgctgtagaagcgttggccggtgagcctgagcgccttcttctgccctttggacaggtagaattcgccgcgagggttcgcgaatgtcatggactgggtgaaattgcccgccgtgaggctgagattgctggcaccggtggtgtcgaaaccagcgccctcggtctgcatgtcggatgagatcgcgtccttggcgagttcgcaggcgatgcgttcaagcgtcgcctgcgatatgttccgccaatccgggcattgttcgcggaggaactgcgaggcatcggccagacgctgatccacataatcggggtcgtccggcatctgcttccagcgtttggccaattccaaatgcgtggcaaatgggttttcttccgtttcatcgaccatgacggcctccttaatgtcagaatgcgatgatgccgaagccgcgtgctgcggccagcagcatgtccgcctgcgcccgttccgcgtcggtgagaggatgccgccgggcttccagatcctcgtgaggggcgaacacggtattgtcagtcatcggacaccaccgtggcgatggacttgtcagcgacagtcgcggtcaccgtctggtctgcgccctccggcaggacacgtaccgtcacattggttgtttcgccggctcgaacggtgacggtttcaggactggtctcgatggattggggtgccggcgtcacccttttggggctgcgatcacgaaggcggggaagcgcttcgtcttgtcggactgcacgtcgttgatggggttggcgatttggaagccgacgcggaacacgactcgcatggcgacgcaatcctgctgggcgaggttcagaatcaccttgccgttatcgtccgagataaccgactggtcaagcatcttgtaggtgatgtcctgacggatgccgaccacgaagttcgaccagtccgcgccgagcagcacggccttggtggaatcccacgcgccgttgtcgacctcgttgagattgaagccgtagagggtggacggcgcgccggaggcgagcgagggcacgtagatcggggtgccgttggtgttacacaggccgataagctgccagttcaggcccggcttgctggcgaagccgttcatggcgaagccctgttcggcgagcttctgtcccatggaggccacgtccttggcgaggtccttgctctgggtgaacgtgttgcccgccgtgatggcctgcgggatgatgccgtccgggaagctggacggcttgtccacgccgaaaagggtcgcctggtccagcttgtagccgagcgcggaagccagacgcggcatgacctccggccagattgggatgccggaatccgcgagaacggcttcggggatgggcacgatggccgcaagttcctcggccgtgatgctcaggcccgaccacttcatcttcgtggtctgtttcaggccggtatcaccgcccacccagtaggcgatcggcttggagtcaagcaccggctgcgtgcgcgtgcgggtgctcatgcgaatctgacgcatgcgggtgagggacacactcgacttgggggcgtcctggataatctgggtggcgtattcggtggggatgagtccgccgccgaggtcgccgctggtgatgatggagttcacgttggaagtcatcgtcataccttctttctatgaggtggattatttgcgtttctgcttgaggaactgatcgcgaagccaatcgccggatgtgtcggatggcgcgggaggctggttggattcggaggaggcgtgcaccttcggcttggtcttctcggcgatgtagtcggcgagcgccttgccgttggcttgcatttcttcgagggtggagccgtggagcagtgcgatgggcacgccggtttccttggagacctgcgtcttccattcgttctgctgtttttccgcctcgtaggcggcgttcttggcttcaagctctttgatgtgcttggctgtcttttcggcttcggacagttgggcctccttgagctgttgcagttcgtcggcggctgtcttgttgtccttggcgcgtttctcccattcgcgggaatgggcgacggcctccttgtatttggcctcgtagtcgatttcgggcggcttcgctccgttctcggtcgatgccgcctgctggttgccgttggcctcttcggtcatggttcctcctagtgggttgggcccgtttcgggcataaaaaaccacccgtgcgggtggttggggaaaattcagtgcgaacgggacggtctgggtactccatacccgtccttgtatcggtctgggtaaagccggcgcatcaggtagacaagcgtgttcgggtcgttgggattgtcgggattgccttttgtggtggcctttatcatccgataggtgtcgtcgtccaggccgccgttctcgatgaggctgcgggcgtgcatgtattccgagtacatgcggtcagggtcataaccctcgatgtgagcttggtccctgtcccattcgggcacgatctggcagtcgcagtcgtcgtggaacagtctgaacgagcctttgacgtatttcgcggtcttctcgctgcggtacacccagccgcgcgagcagagcatcgtgcagaacgcgcacgtcttcgcgcctctcggcacgcgcgcgtaccggggttcggacgggtcgtgctcgcacaggcgtgcgatggtttcacgccccgaatacatgacccaacgcatcatcgcgccgaccagaaacgcctgcatggtctgcgggtccgtccacaggtggccggcctgccagcgtatggtcttgtcgatgccgtcgccgggaaacgagtcggacaggtcgtactcccacgggtcgggcaccgattcgccacggacgcgcatataccattcataggcggcctgcgccgcgaggtcgccgtatttgacgaccagttgcggcacgtagtcgagcagcatgtcacgctgccattcagggctgagctgttgcagcgtctcccacagtttcgccagatcgcggcgtgccagttccaccgccctggcttggctggcttgcagctgttccagttgccggttgtccgtcatccttattgcctccgttcacgagggagtcaagcacgctgcgggtctcggccttgcgcttgtcgaccaacaggcgtgtgatatcggaatccgtgtagccgagcttctccaacaccacgtcggagttggcgagccatggaatggccgtcacctgcttcacgatggcatcggagagcgcggcctgcgatgggcgttcggggtcacgccagttgacctgcaaccgattgagctcgtcgctgtcctcgctggtgccgttgaggatggcgatgtccctcgcggccttgcgtagctgcacgccgatggcgcggcaggcgttcttcgcctcgatgacaagttcgctttccgccgccatgatcgcttccgaagaagaagggccggaatccgtcatcacgccgaactggctgagcggcacgccggtcgcgccgctcatgcgtgccgcgagggcgcgaagcatgtcggtgtgcggctgcatggtcatctgcatgaactggccgatgacgggcgcttggccgtcctcgttgaggctgatgttgagcatcttcgagatggtggcttcccagccggtcagcttcctgccgttcttgtcctcgggcggctcgtccgcgccgatgaggtagcgttgcgggctcgaatagaattcggcgcttacctccatgcgcagcatggtgcgcaccgccgtgtcggtgatgctcatgacctcacggctgatgcgcgagcggccaaaggggcggttcaggtcctgatggtaggggatcaggtacacaggcacatgatccatgtacgtgttacatggagcgtccgcatgatagcggcctgattgcgtgcggcggatgcgaatcgtgtagccgggcatgtagagcatgagctcggaaggcacgatggtgttcgcctgcgcgtactgtgagcggtcgatatcggttatcgacaacgccgccgacaggccgcgacgggcgtaatcccacaggccggtctcatagagcgcgctacggaacgacacggacaccttcgagcgcagaccatcctcgggttccgcgctgcgcacgttcaggaacgagcatgagtgagtgagcgcgctgcggatggcctgcggcaattccacgtcgaagtcgttgtctgaaagaatcgaatccaaacccaacggatcgcggctgtcgtcgccgactccgacgaaaccatcgaacacgatgcggtcggccaaagcgtccaccgatttctgcggccagcccacgacctcgcttatccccgccatgctgtccggcacggcgatggacagattcttaagctcgttgcgcccgtcgtagtatttggtgcgcaaaaggttacgttcgagcttctgggaccattgacgtatcatcaaatcccacggttctcggcactcgtcgggcagattatcgacctgcacgttttcaagactgggaatctgcatcagaatgccaccgccttcgctcttcttcccggatgacgtttggaagtcttgacgttccaatacgcgagagccaccgcttccacgggactcacgtcgatgttctccatggacggctcgtagccgaacccgtcgccgattttcctgtgcttcgcatgacccaccgcctcgtcaagcagaggctggccgaaatgggtaagcccatggtcgttcacggcctgttcgagcatcgaacaagcgtccgccacgtcggaagggcgcggaaccacgatcactcttttcgacacgcccttgtcgatgaggctgttgaccagggtgggggctcccacgcgcccgtcgatgatgatgccgatggcgttgcgccatcgttccgcaccgttcttctcggcggtcagccagtcggccagccagccggtgccgccgcgcatgctgcgcgaggcgatgacctccacgtgcggcaattcactcgacttgcggggcgggcgcacgcacgccacgagggtgacgttcgcgccgtccgcgctgaacttgaccgcatacgagttgtagccatccatgcagggcttgtcggtcttgcacttggcccactcgtcaacatcgatatcggacagcgcgccggcctgatcgttccaccagccgagacgttcgcgggcgaaaccgtccggcgtcatcttctccgactcggaaacgaccacgcttttcaacaggcgggtgccgagcgatggattgtaccggtaccagcgttgctggtcgtgcacgtcgccgatctcggtcgccgcccattcgaaccagcacaggttcttcggcggcttgtcgcgatgcgcgttgcggcgcatgcgcgcgaacaccgtgcccggcgaagtcggcggggtcggcgtgcccgtgtagatggtcaacggattgcccgagggtgccgacgagatggcgggctgtatggcctccatctgctcgtcggtcagctcctgcgcctcgtcgcacaccagcacgtccaccgtgaagccacggcccgaactcttcgaacgggcgatgaactcaatgctgccaccgttcttcaacacgatggcctcctgaccgttcgtggcccggatataggtgaccaactccgccagttcggggaacttgcgcgcgttctcgaagtagtatttcatacgcaggaaatgcttgcggcaggtcttcacctcatgcgccgtatgcagaatcttcatgccgaggatcgcggcaaggtacagctccgtgaactcgagaatcgcgttcttgccgttctgacgcggcaccgcgcacccgcaatccgacgccgcccattgcagcttcgaatccgtggcgagccaaccctcaagcacgatgcgctgccacttgtccggcttcatatcgtagccggcggcgagcgcgcacgcctctcctccctcggactgcacgtgcttgggaaccagagcgaagctaggttcctgtacgcctcttcgtcttgccaccctcgatcaccctcagcttccgtcgttcggctatctcatcgagcggcgtatgccgctcctgcttctggacttccgccggcatgatctggctgcgtgcggctggtgtgatgccgtaatcctgcagtagcttgttcagtatgggcacgctggcgaaattgccggaaccccagatgtccgcgtggatcagggcggcgttcatgaggttgtcccagtcggcctcggtccacgagtccgcgccgggggtggaagccaaatgctcccaccatcgcacggtagcctccggccattcgatgccgtcaggcaactgtggctgcgttatcgtggtcttggccaactggatcacctcgaatcaatgtctaggagccgctggagcgactcgcgcgagcggaaccggcggcacgagagaaatcaaactcgccctgcacgtatctcggacgcatgacaatcacctccctcgggaaaatcaggagcctgaggaacgcgagcctccgcgagaaaaagcgctgcggatacgaccggcaacgttacgcaccgcattgccggcgcgctggaacaggtttcgcataatccacctcctttcgtggcataagaaaagccgctgcggatcacagcggccaaactctaggaggcggaacatcacccgccaagtttcttcatgacggccatgccgtccatgtacttgtcgccgagcttgcgaagaccatactcggcaaggaaagagtccttgtcgtctcgcaacgggaacgcgatggcgaaccagtgttcggaatcggtcggctccacgagcttcctgggactgcgagcctcgaccagcgccctgtgcagggcggcgaactcggcgagacaatccttttccagatcatcggagtacttgacatcggcgagcgggtcgggcgtcttctccgcgaacccgagaccaccaccgaagccgacgccggcaccgaacgccacggcggacgacttggccggcttgtacggggcgagtagcttctcgacatcacggtacgcatagattcggtgttcatcgccgaaaccataccgttcacgccaccgcgccatctcaacgggggaggggaaacacaggcacagccagaactcggtgtcggtcgcatccacgaaacgcttgcgctccgcacgggcgcgctcccggtactccttcgcgttctcgtccagattctccggcaccggcttcacggccttcttgcccttgggcttcttggaaaaattgaacttgaaatcacctgacatgatccacctccaacaaggggaaccattcaagcagcgtcgcgtaatcgtccggagccttgtccttgagcaccttggtgaacctcttatcgatgccatcgaacgaacgcccgaaccacgcataatcacacggcagctcgatatcatgcgatctgatgcagtccagcacctcgcccttgagccaatccccgataggactgaccttcttgagattgcgccgccagtacccgtactggacgaacgcgccgcgacgctgaatcgaatcggcggcgcgcacgccatccgcgcaccacgtgctcttatccaagcccacgtcggcgcggatgaaatcccacatctgctcatacgacggctcaggcaaccgcgccgcctcgatatagcgcaaccgttcgggagcctggaacaccgcattgttcaaccaccggtacagcgacgggtgcggataccttttgattctggtctggaacttctgctcgaaataatccagctcctcgtccacgaacctcaaaccgggcacatagtagaggtacgcgggaacgacctcgatacccatgtcccgcatcgccagccacgcggctatggaatccttgccgcacgaaaacgccaacaacacgggcctgccatcagcggccagcttctcgcgcaccgcgagactcgtgccctgattgcggataaccgtggtcacttcggccacctccttcccgtcatgcgaataaaccgcgaacgcgaataaaactcaacaccggcacgccggaaactcgactccgacgactccacgaacacatgcaacccatgtccactggacgaaacctccgcatagatcgcatccggcaacagctccaacgccttcgcgggcggactggtcaaatcaacatggtcgaaatcccagcacgcaagcccatcgccgagcatgatgccatagccgtcaccggccttcgagcgcatgacctccgggtatgacgcccaggtatcgggatcagtcgaactggctggtgacccatcgcacataatcgggcgcttgccatcggcgcgcacccaacggcgcaatgccttgagttcctgcggtatctgatgtttgcggctccacgccttgcggcatctgtccgagcaaaacagtctcggacgcctagggttcggtgtggattgaaagaaatggccgcaattcctacattggttgaccatagctataactatagcatatattccagtgggttgcaaccataatttcgtgacatatcaaaactgcggagaatcaaacgtaacagcctcgaaaacaagcgaggcaaaagtgtcaaaccagctccgaaacggctcgcacgggcgctcgcaggcaccccaacggccaaacgtacgatactccacgcggattgcggggggacggcggcgctaggaccttggggg

SEQ ID NO: 2841 - DNA, 3755 bp, Unknown
  R36_18m  MAG No. k141_27274
attcaaagctatgagcaatacccagccctacaccgtaatgaccgtctgcaccggcaatatctgccgttcgcctatgggcgagatcattctgcgtcacttctttaatgagcgcggtctcggcgaccaggtgaacgtggaatccagcggtgtgtccgacgaggagtggagccatccgatcgacccgcgtgccgtgcgcgtgttacgcgaacgtggctatggtgatgagattccgcgtgaccacttcgcacaccgcatctcacgtgaggaaatcgaccgtaccgacctgttcctgccgatgaccgcctcccacatgcgcgccctgctgcgcatgctgccggctggcaagcgcgccgaagtgcacatgtaccgcagcttcgacccgaatctgcccaagccgaagcccggccgcgaggatcagattgatttggtggatccgtggtacggcggcaagcacgagttcgaggtcgccatcgaccagattgaggaagtcgctccgtacatcgtcgattgggtggcgaagcagctgtaggaatcggcctgtggccgatgctgtgtgtttcgcagtcttacgaccgcgggtctctacctccgcttcgctgcgttcagcacctccctcacagagggaggtggtcgccgaaggcgaccggagggagagatcaacgaaggagaagccgagcccaacctcagaacaccagctgcaccagtagcatgtatacgatcgtgccgccggcgattgaaagcagcatactgcgtttccagacgtgcagcagcacgatgacggtgcaggcgatgagttccggaaggccgtgtgaaccggtcagaatcggggtgttgcgcagtgcgtataccaccagcagaccggtcatcgcatagggcaggactcggccgaaatattcgatgacgcgcggcggctgcttggattcgggaaataccaggaacggcagaaaacgggtgcacatcgtccccagcaccaccgtcacgatggtgagcgcgccttgccagatggtcatcgtcatcgcgtctgtccttccttctgctggttcgctgcgtggctcatggcacggtctgccgtggcttccggggcgtcggcggccggccgcaacacatccagatgcgggcgcaacgcgacgaacagtatcagcatggcgatcattgagggaatcatgaaatcattggccccgaatatcagcaggcaggccagcgacgtcagcacaccgatgacggcggacagtcgctcgcgatgcttgccggcgagccactgatcgaggaagatcaccagaaacagcgcggtcagtacgaaatcaagaccgtcggtattgaacggcagatgcgcgccaatcagcccgcccagtgtggcgccggtcacccaatacagctggttgcacagcgtgacccagaagtagaaccagcttcggtcgataccggcggggattttcgcggtggagttgatggcaaaggtctcgtcgcacatgccgaaaatcaggtacggacgcttccagccgagccccttgaatttgccgagcatggatagtccataaaacaggtgacgggcgttgaccatcagggccagcagaaagccggcgagtgggttgaacgcggagagcagcagattcaccgtgacgaattccatcgaaccggcgaagatgaacgcgctcatgcacatcggccatacaaacgagaagcccttggtgcccatgagaatgccgtatgaggcgccgagaaacaagaatcccaggcaaatcggtatggtcagcggaaacgccgctttgagcgccggcaaccaggcgttggtgttggcggtgtctgccatgtggatgatgttctccttgtgcaactggtctgccggccgatattcgccgataatgccatatgtggttatacacgcatggtgccgataaacgaggtgaggacggtgtcgggactctgtgcgcgaagtcacagtgtggatgatgtcacatcgtctacggtgggacagtccttgtggtgggcgtgaacacgtgctgagatgaaagcatgagcacatatcaaggtaacgaaccatcgcaaatcgtctacaccgctacggcgcaggttacgggcggccgcaacggccacgccgtgagccatgagccggaactggagttcgacctggacacgccggtcgccatgggcggcaagggtcagggcacgaaccccgagcagctgttcgccatcggctggggcgcctgcttccaaggagcgttggcgcttgccgccaaggagcagcgcgtggcggccaccaagctggccaagagtcaggtgcgcgccagcatctcgctcggtcctgaaggcgagtccttcggcctgaagggcaagattgaggtagttctgcccgatcttgacgatgaggctgccgccaagctcgtcgagcgtacgcaggagctgtgcccctactccaaggccaccgcgggcaacgtgcccaccgaggtcgttgtggtgaagtcgctggactgaagccttccgggttgaaacccgagtccaagcattcggcccgtttccttcagggaagcgggccgaatgctttcaggcctggtcccgcgaatacgaaaagacctcggtcgctatgaccggggtctttagtgaagtacccccagagagagtcgaactctcgttgtcagattgaaagtctggtgtcctaaccgttagacgatgggggcgaacaactcgaattactttacgggaggttgttcggttatgcaaatcgacggcatttcggcgtgtcgcaatcagttcagggtgacggcctgataggtgaagtcgtggatcgcgcggccggcggccaggcccttcttttcgaagttggtgagcacgcggccctcgaaccgctcggattcggtgaagtcggcgtgcggcatgtcggcggccatgtcggcattgcccttgcccacgtgctccagcgggaggctgacggttatgctgcccaggttcttccagccatcgaggccgtccatcacctcgtgcacgtgcagggcgtagtcctcgatgtcggtggcgatgcgccagacgccgtctgtgaccagcgcgcgatgaatgtcgccggccatggcctcctgcacgatgcggcgcttgtggtgcttcttcttgggccatggatcggggaagaaggtccatacctcggacacggtgccgggcgcggtgaccttgaacagctcgggcgcattgacctgggccacacgaatgttggtcagcccctgcttgccggcgagcagcagcgtgtgggccacaccggggtcatagacctccaaggctaggaagttcgtctccggatgggccgcggctgcggccgccacgttttctccctgcccggtgccgatttccacaatgagcggattgtcgttgccccatgaggactccacgaacgcgcggtcgagcgtgacgccttcgcgcacgtccagcaggttgccggccgcaatgtccaacagatatgtgtcggcatagttgtcccaggcgcgctgcaggcgatcgtccaaacgtccggagcggcgcacgaaggaaagcaccttgtgcagggggtgcgccggtgcctcggtgtggtccgcggccatcgcggtgacggaatcgattgctgtggattcgggatcggtcatatattcctcggattttccttgtgcgccgcaccgctgttcattcgttaggtcgatttggcgttcattaggtgggtggtgtgcgataccaaccaccatatcaagccatttacccggtgttcgtgcgggccggctccgggccgacctacctaa

SEQ ID NO: 2842 - DNA, 4798 bp, Unknown
  R36_18m  MAG No. k141_27454
gcgcacgcgcgtcgacccgtccatggccgacgagatacaggccatcgtggacgagaccgacaaccgtcccatgcgcgtgctcggctaccgcaccccggccgaggcattcgccgacgaactgctgtcattaaccgaacaacaaggatgttgcacttctaaatagacaacgggcttttgtgctgatatagggatttgtgctagtcgaatccgcgaaatgttcagtaaatgttcacgtagcgaaatcggcatagaatgcgagcaaacgcataacggcacggtgctgttcctgcgtacgccaacgccaggcgaaccgccggaaagaaggggtctccatgattgagacagcggacgatatcaagacgattgcgaacgtcggcacgggaacaatgggccatgcgatcacgttgcagttcgcgctggccggatatccggtgcatctggtcggccgcagcgaggcctcgctggagaaggcgatgaaggcgatccgttctgatgccgaggacttcgccgaagccggactgctcaaggccggcgacaccgtggacacggtgctggcccgcatcaccggttacgccgactatgcgagcggcgtggcggacgtggacttcgtcatcgaatccgtggccgagaaccttgacgtcaagaagtccgtctgggccgaagtggagcacgccgcccccaaggacgcgattctgtccacgaacacctccggcctgagccccaccgcgctgcagtcggtgatggggcaccccgagcgcttcgtggtggcgcacttctggaaccccgcgcagttgatgccgctggtcgaagtggtgccgggtgaaaagaccgatccgaaggtggtggacatcaccttcgacctcatggccaagatcggcaagaagccggcaaagatcaagaaggaatcgctgggctttgtgggcaaccgcctgcagctggccgtgttgcgcgaggcgttctacatcgtccagcagggcatagcggacgcggccaccgtggacgacgtgatgaagtacagcctcggccgccgctggaacctggtcggcccgatcgccagcatcgacctcggcggactcgacgtgttctacaacatcagcacctacctgttcgacgacatggacaacggcaccggcccgagcccgctgctcgccgaaaaggtcaaggaaggcaacctcggtgccaagaccggtcagggcttcttctcttggcagggcgaggacggcaagcgcatcatcgaaacccgcaacaaggccctgctgcgtgcgctgaaggacgatgccgcggaagcgtaaagcgcgagcgacgaattctcgcgtaacgtgtgctacgatggaaggctcccttcggggagccttcgttgtgcttgcgttgttcttcggtccaacttttcgacatgcgtatacgttgttgatagcgacaattgcggaaaacgcttacagtatgatgtgcacacggacaacaagccgatgattgcaaggagcggtgacgacgatgacatccacagaacacaatacgcgagccgacatgttggcccacatgggcagccttcagcaggccgcctacgtgcgcccgatcgagtaccaggagggccgtgcccacggcctcaaggccatcgaggtgaagaacggcccgctacgcttcgtatccatggccgaccgcgccctcgacgtctgccagttcgaataccgcggcgagaacctcaccttcctgtccaagccgggcctgaacggccgcaaccagttcgacaccaacgggctggaggcgcagcgctccatcatgggcggcctgttcttcacctgcggcttcgagaacatctgcgcgccgtacgtcacgcctgagggcggcaagtacccggccggcagattcccgatgcacggccgcatccgcaccacgccggccgagcatgtgggctccgacgcccactggaccgccgaaggcgactacgtgctcgaggtctccggcgaaatgcgcgaggccgaactgttcggcgagaatctggtgatgcgccgcaagatcaccagcgtgtacggccagccgtcgatcacggtcgaggatgaggtgaccaacgaatccttccgcgacgagccgctgatgtggatgtaccactgcaacttcggctggccgttgctcgccgaaggcgccgaagtcgtgatccccagccgcaaggccaccccgcgtgacgagaccaccgcagccgacaccacgccgtggaacgaaatccaagcacccgaggcgaaccgccccgaaagcgtgtacctgcacgagctcgccgctgacgagaacggccgcagcttcgccgccgtggtcaaccgcaagctcggacttggagtcgtcatcgacttcgacgccagcctcttcccatacttcatggaatggaagtcgatgggtgcgggcgactacgtggtcggcctcgaaccctcgaactccagcgtccacggccgcggctggcacgagcagcgcggcgacctgcacaccatcgccccgcagaccagcgaacgtaagtccctgaccttcaccgtcatcgaaggcgaggccgcgattgacgggctcatcgcccgccgcgacgccctgcttggctgaattgtgagataatatcggccgatatgtgaacggctgattagcgtggggagcatggttacccgggattcggaacagtatctgcgattcaaacgggagcacacgctgccctcgcatgaggcgattatggactggtatcgcggcaccggcatgcgtccgtatctgcaggcgcttgacgacgccggccgcaagaagttcgaggccgaagtgttctcccaagtccgcgaggaataccccacacagtcggacggcagcatcatcttccccttcccgcgtttcttcttcctcgcgactcggtagaagctcgccggattcgtgtactgggcggcgcgacctgtttcccgcgccgccagctgtgggttgacctcgctactgggcttgcggtgatgccgctggctgctgcgctgcttccgattgcgatggcatttgcatatgcggtgcgatgctggggagtgtgccgtcatgcatgcactgcttcaatatgaggtctcgctgggcgatgaggtcgtcttcgatctggtcacgcacgtcgcgcacggacgagaaatacaggtagaacgtggcgtgattgtagccggcgagttcggtgatctgacgcaccgagatcttctcgatcggcttggtttcatacagcttccagaacgcctccttaaggcgattgaccgtctgctgcgtaagttgcgggttcttcttgattgcgattcgcggtatggtgatttcgcataagacgcacaaccccatcgattcgtcggtcaaattcgtgaccttctcgatgcgatgctgtcgctggtggtcacgcaggacgtgctgttggaatcccagggaaccgcgcacgcggcgcaatccttgggactgttcggcatcgggctcggcgtggtggccgtgatcatcggcctgtggatgttgctgagacgtaagtggacggcaacggaataggaatagtgacagcggaatagcgcgcgtgatattggtacgcgacgtatcgtaaaagcggctacaatacttacggcaaaagtctttgcaacgagaaggaagacatgactgagcggcgtcgagcacggatgaggattcgtcgtcaacgaatttacgttgtacggcgcattgtggttgcggtatgcgcattgttgtgctgcgttcttgccgtcttctcgacgattgacgcccaacgggtgtggccccgcggtgagtcggtcgcacaggggcaggcagaggttcaggggcaggcgcagaaggtgagtcaatccgcgcaacagtcggcatcgcgagtgtctgcatcggcctcatccttgagccgccagcaggtaccggtctttaaccaggcgattcaggagcagcgtgacaaggaagcgcaacgtgcgcgatggacgaatcccaccggcaagcagcctgatttgtcgcaatactccgatctcagcgtgaaagtcagtatcgccaagcaggaagtgtatgtgcaatccggcggtgagaccatctacacgatgatcgccagcaccgggctcaacgatacgaccccgcgcggcaactatgttatcgggatgagaggcgatcacttctacaatcccgcagaaggcatgggtgctgattattgggtgcgattcaacggcccgttcctcttccactcggtgccgaccggggcgaactccggcgagtatatggaagaggaaggcaacaagctcggtcagccggcctcacatggttgcgtgcgactcactgtggccgatgccgaatggttctacaaccaaattccggaaggcacgccggtcaccatcgcctgaggcttggcctgagatcgatactgaggctatcgtgctttaggcgtctgatattggtcgtcggtagtgaagcaggtgcgatagaccatggccatgatcagaccgtcggccagcaaggtcagcgcggcgatggcaccgaagaccacgaactggtatttggcggcgttcagcggatctccgccggctatcacctggcccgccatcatgcccgggatggtcacgatgccgctggaggccagcgaagcggtggtgggcagcagtcccagccgaatcgacgagatgatggatgggcgggcggactcccatgccgtcgcccccaaggccagcatcatatccacctcgtcgcggcgttcctccatgctttcatagaatcggctcagcccgacagcaagcgcggaaacggtgttgcccagcagcatgccggtcagcggcaccaccagctggggcgc

SEQ ID NO: 2843 - DNA, 6041 bp, Unknown
  R36_18m  MAG No. k141_27519
accagtgaaggggtgtcgcgccttgggtcaagtgtattcgcacctgtcggaagaggaacggcggatcatccggatagagatcggcaacgggacgagcatacggcggatcgccggcctgatcggcagacacacctccacggtcagccgcggaatcaaacgcaacacatggttcccgtccaacgagaacgaatcctaccggccgtaccggccggagcgtctcaagacggggccgtggaccggccggtgccacatcgccggccccgcgcaccggaaggccggacgccgccgcgccgggaccggcgtcacgcacgacaacggcaccgagttcgcccgccacgcggaactgcgcgaacggctcggcatggccacctacttcaccgccccgtacccgtcgtgccggcgcggcggcaacgagaactgcaacggcgcgatccgccgctacctgcccaagcgcacgcgcgtcgacccgtccatggccgacgagatacaggccatcgtggacgagaccgacaaccgtcccatgcgcgtgctcggctaccgcaccccggccgaggcattcgccgacgaaccactatcattaaccgaacaacaaggatgttgcacttctaaatagacaacggggtgactaacgaagagacggcggtgttctacactggtagccatgtctatcgcatcagtagaggcccaaaaacagctcgaccgtatcgtggctctcggctatccggatgtggcggatatttccgccgccgcattccgctcgctggcccgacccctgatcggggcgctcgagcattccgatttgggatcgaacatcctgctggtgcccacgcgcgaactggtttcgcctgagtcactgatcgcacgaacctccatcaatcgcatggccggcttcaccaccatgccgccgcgtgacatcgccagcttcctgcctcaagacggcttcatgccgccggaaggcccgttctatctggtcgtcaatccgcacaccggcacgtgctatgtcaatcgcgagccggatgtggcccgcaaacttattgactccgatgagcgcctgccgctcaccctcgaggaaggcttggccatcgccacccagcacccggagtggctgctggaaaagaacggcttcaatctgctcggctcacgctccgcagacggccgcgtgccgagcatctggatgagccagaacgcaccgcgactgggagctgtctggcccaattcccgccatacctggctgggcaacgcgtattgcacggcccgtcgcggggtgagtctgttccgttgactccgccagtgtgcgttttctctgtacaatgaaaggcatattgcatcatttcatcagagagaagacgcgatgaactgtgataggtgcggtgctgccaatgacgataggtcccgtttctgcacggaatgcggtgctccgctggcaccgaaacttgccgtgggacacaatacggtcactgatgttccgcctgtgccgatgccacccgccggtcccattcccggcccccggtctcagctctagcctcggcccagcgtcgtctgcgcccgccactatcgcggtaccgcagacgccggtaccgggccataagcgtcgccaaggccgctgcggccgttaaagatatgggtgtgccgatttatgccaagcgagtagccgcaacatccaaggccgatacgaagaaagtcgtgtatacctacccggctgggggcagccagtggacgataatggtgcgatttatcttggtatcccggatccctcagtcgagggcatgccggccgacgttatcggtatggataaggatgaggcgaaaaccgcagtagaaaacgcatcgaacaacaagatcgaggttattctcgagccgcgattttccgccaagaaggattttggcaaaatcgtagcttccaattacatttttggtgcgccgtttgaggcgagcaatgaggaaaatgattataaaatattgcaaccgatacgtctgtactacggtgtgggagccgacaacactgaagatgtggtgaccaccggttcaggtagtgattatgatttcgacccgcacgcggattatgccagcactagcaagagtgacaggagtttgccgtatatctcggctgcgggcgaatggcgtgttacgggcacctattgcaaggatggtttcttacctggctcgggtggatgcatctcgctgatttcgaagggtcaagacggaatgaaatacgggtccggttacccgtatttggtgcgcaaaggcgatgagtccaatggcatatgggacgatcggggcacactgtgcacgcccaccggagacattggcgggtgcattctgcactacaaggatggttcgattcccgataatgaaaccaatatgcgcaaccacttgttggccaaacagtggggcatgttcgagatgtaccgtggctacggatggccggtatgcgacggcacggtctaccgaggctatggggagacggaagggtgtgaccatggtcaatatgtgaggactgatgatatccctgatggtcagcaatccggtgccacctacgaaatggatgacttctacgtttacttcccggtggaatcgaagatcagcaaactcgaggattccgactatttctccaacaaggcgctggctgcggcgaacaaggcggggaagccagacaccgaccggccgttcttcatcatgcgcgaccccaagggatacaagaccacaagcgtcgaagcatacaagaacggcgagcaaaccaccaatccgttcgtacccggtataccgatgagcggtggatacaacccgctagtgaagatggatgtggcggccagcgccaccgtaatcgatgattcgtccagctccagttccagcgccgatgcgtcgtctgaagactcggccattgccaatacgtcgcagtcgagtaagaagttcgttgccgcaggcctgtatctgccggtgtatcttgcctctcaaggcaacggcaatgcggaaggattggcaaatacgatgatgaccggcatggataacagtgccggcaatcaggctgtcggggcccttggcggatggagtgctgtcaattcatggctgagttcccatgggtacagcggcaccagcttcaaccgtgatttcggtgatgtacaggccagcaatgctggatatgagaattacagtaccgctcgtgacgcggcccgcatgctggttgccgttgatgcggtcggtggcactggtctgatgaacactgatattgcttcggagggcgtggtgattccgagcggcatgaccgtgcatgcacatcgtggcatgggcatccagaacacgtggaattacttcgccatcgtggaggtgaatggcaacaaggccgcggtctctgtggtcacgcaaaaccaaggtcaggatcgtgccgctcagctgatgagccaagtgcttgcctcggtggatagcacgttgcgcaaatagtacaagcagtatttgcacatgcaactgtgtatacggaccacgccttttggttggcggctgagtggggactattccatcgcgttcattttccagtagaatgaggctatagtgcgtcattcgaccagagagaagagcaatgatgatctgtaagaattgtggtgctgacaatgatgggggaagccggttctgcatgcactgtggtgcgccgctaaccgacgtgagtgctcctgctcctcaggcggcggccggcccgattccagtgccgctgccggacaatactatgacggtgcttgatcacccgccgctgcccggcccaaacgatgggaacgcctatgggcagcccggcgtgccgacatcgagcggtgtggcaggagcgccgaccgcaccgggagcaagtcatactgggtcgatcgcaccgggagcagtgccgcaggccgctccgggtgctcctgtcgctccgggcgcagccacgccgccgagcggcacaacgaccgcaaccgccacattgccgaatctttcgggcaagcgtggcccgaatacgctgattatcgcgctcgtggcggtgctgctggcgttgatcgtagccagtgtggctttattcctgacgtatcgtgccgaggtgtggggtggtaagtcgctgcctgatccggcgtccatcgcctccagcgtcaccgataagaacggcaagaaggcatcggtggtcaaggccaaggatgtgaccgaggcgttgaaggccaagggcctgaacgcgaagacggttccggtgttctccggcgaggatcgcggtgtgttcctcggctacgagggcacgaatcctggcgctcgcgtcaaggccggttccacggtggtggtgcaggagtcggccggtcccggtgtgccgaagggcacggtcggcaaggatgtgaacaaggtgacgaacacgttcgcgaatatgggcgtgccgattcactataagaaggttgtgatttcgccggacagcaagactccggaagggcaggtcagcgtcacgtacccggctcccggtgtagggctcaccgatgacgagaaggacaacggcatttacattggcgtggcctccaagggcgatggtatcccggtggatattcttggtgcggacaagaacaaggccgtcagcgacttggagtcgcaaggctacagtgtggatttggaaccgcattactcgtcagagaaatacgtgggcaagatttccggctcgtacccggctccgggatccacgttgagttccggccagtcggtgaccttgtattacggcatcgataagtccagcaacatggacgtgctgagcaaaaccaactcgtatgacaacatcaagatggccagcatccacgcgtccgcaatgatcggtatgtactgcaagagcgaggtgacggatgccgccaaggactgcatcacactggagcaatcctcgatgaatccctttggctccacttcatccgaggattatcagtacctgcaaatcaaaggccatgagcctgaagacaaggccgatgtgttgggcctgaccaacttctctcaggacatcagcggcgcgatgctggaagcggattcggaatacggcatggccgcggacaaattgccgatgaaaaaccatctgctgttgaaagactggggtatgttcgagctgtacgcgggcatgggtctgccgaactgcggctcaaaggtgatgtccgcttcgataggcgagtactgcgtgaacggcaactatgaacgggcgtcgttcgacgatggcgaaatgacgccaccggccggggctgagaacgggtcgaccggcatgacctacgacatgaaggacttcctggtctacttcccggccggttccgatgccaagtcattggatgattccggttacttcgacgccgccgaactggcgaaggccaagaagcagaaggccgtggataccagccgcccgtacgttctggttcgtgacaagagcctgtacagcgagatcagtgtgagcgccagccgaggcaaggacgtggacccgtttgtgccgaccaacagcagtatcaataactatcagaacgcgctggtgccgatgaggccggctcccagcgattcgaccgtctactatctggtggagcagaacggcgatctcgactgggattccctgccggacgccgaggtcaagggcactggcgataaggccgcttccggtgagacgaccggtgacaagtccaaggacagcggcaaacgagacgccaccttcaaagaggccatgaaacaggcggcaggtaactatagtttcggttccggtgtcggcgcatggggaaccgtaatgaaagtcaataaggatggcaccttctcaggctcctaccatgactcggatatgggggccacgggagacggctatctcataggaaacgacgtcgatacgctgaacggcaaggcattgctcaacgtgacgagcggagcggataagggatacacgttctacgatttctcgtagtgattcagctgccgtgcggagcggcggggaacgtgaaggaccggcgcgtatgctgtgcgaaacagcattacgtccctagactggtgaggcatgacgaacctgcgattccgcgaagacggcagcttccgcgtgctgca

SEQ ID NO: 2844 - DNA, 6990 bp, Unknown
  R36_18m  MAG No. k141_28544
caacgccttctgcttgtcgatctcggcggcctgcgcctccgcgtacttcgaggtgatggactgcgggtagcggacctcctgcaccgacacctgctcgacgcgcagacccatgcccttccatttcgcggtcaacgccttctgaatggcggcggtgtacttgctgcggtcggtcaacaattggatggtgtcgaacctgccggagacctcgcgtggcacgctgcgcacgtcgaccgccgccaccgatttcacgaacgtggtctgcttgccgtagtccttgtacaggtccgtcgcgtacttcgggtcgagcgaatagttgacctggatgtcgatgtccgcctgtgcgccgttcttgtcgttgacggtgacctgcgggcctcgtgcggagcctccgtcgtagtcctccttgcccttggccacgtagctgatgacgttgttgcgggtgtcgtatttcacggtggactgccacgggagcttgccgtgaaatcccgcgtcggcggaatagccggcgatggagccgcccatgttcttcaacacggtcacctcgcccgcatcctgcgaatacaggcacgcgggaaccatcagcagacccgccacgacgaggggaatgaagccgaagcccatgccgtcgccgtcgttggcgagggcgacggcgataaggccgaccccgacgagcaggagaattattgagataatgaaccagagcattggttttcctcttttcgattgggatgggtgttatgggagttgacatcggcgggcttgtcgcaagcggcgtggtatccgcagtggttgcgatggcgttcaaatatttcgaccgtccccattcgaggctcgtggccactggtctcaacgtggttgttcccgtgggccacgaacgggactgggatgagaccggagccccggttagcatcacgaatttcggcaccgggagcgcctataacctgcactttgccggctctgactgcatcgtttcgacggtgcggcccgcagcccatcccatggatttgccacgtgacgagagttatagggagagtctggaaccgggcaagagcttcatcctgcggattcatgggtggaaaggtgaggatgacggcaatccggtcattgttctgacccatgatcggtttccttccgttccatggcttcgctggcttcggaagacctatcgttggccgctcgccacgctgcaagttgagcacggcctttccgctcgtatatatgccccagaatcgatcccggtatggcggcaattattgggagcgataggaaaatatgaactgcgagccaggcaagaagcactccgcggagagcgtcaccttcgccccagttcagagcaatcaaaacaatgaagccaccctcaatgacgcagaatccgaaaccgtatgcgcgcatcacgccaccgccttatcagcgagcgcagatttggcttcggctttggccaaaatcgatgagggaagatctcctgcaagtcgggcgatttgaatgaagtcgctcagtcgcatgtctccattgcggaactttttgctgacggattggcgactgacctgcatttcgcttccgagttcagtgttggtaagttctgcagcaagttttgaccgccgaagttcggcgaccgcttcggccgcttcggcgtttgcctgctgcttgctgtaattacttatttccatgcttcaaactgtaaataagtaattacttattgtcaacttaaaacctacggcgtgtcatcatttatttacgacctatgcttaggggcatggcaaagaaagcaagagaatgggaagtgttcgatatagaggtcgctgaatacttttcccaattaagggaagaagaagatcccatgccatcatttcgcgttatcggctcatcaactggcatgagtcatacgagggtcgccgatatcctcaagcagcatggcggaacgccaacgctgaatgagtttatttcgctctgccgcttcttcgggaaaatcccttcagaaataatgaagcttttggaaaatgggcatcttgttgctatcccatcggatgtgcttgacgaggttaatcgcgaaaacctcattgcggaaaccgtgagcctgaccaagagtgatccaatgtcatttgctgcttatcgtgatggtcataagcatgaccccgacccggatggtggtgcgtgatgagacctgtattgccggtgcgcgcgcatgacagttacggcgggatgcgcatggccctctaccatgttgcgccggaactgaccgtgggaagcgccatactccccggtgatctgaacggcgtatacagaatggacaccgacaccatcgtcatcgaccggagcatgacctacacgaggaaacgctgcaccttggtgcacgagctcgtgcaccgaatgtacggagacgtgggatgcggataccgcgagcgccgatgccgtatgaccaccgctcgactcctcatagacgaggacgattaccgtaaagccgaagccatgtacgacggagacccgtggctcatggccgaagaactgaatgtgacgccgcaagtcgtcagggattatcaggaatggctgcacgacagtgtggccctctaagagaaagaagaaaacattatggcaggattcaatctcggcgcactcggggacatggctaacaatgccatgaaaaacgccgtggacgcggcaagcaccgcagcggccaacaagccatccagcgtcggcaacctcatgaacgccatggccggcaactacacggaaatcagccccgaacagctcgcccaggagtacgggcgtttcctgttcaccggcgagaccatctcgcacggatacaagctcatccgcgacgccgtggtgttcacgaacctgcgcatgatcttcatcgacaagcaaggcgcgaccggcgcgaagatgaggttccgcagcgtgcaccttgacagcatcgtggacgtggaggtggagaccgctggtgccctcgtagacgattcggaaatcaacatcacctatctcaaggacatctaccagcgtaagaacgggtcggagacgttcgaagagatcaaactcgaattcccgaagagcttcgacgtggccaccctgtaccgctggctcggcgacgtgtcaatcagaaaccgtcagcgcatcaacgcctaaaaaaatcccgtctgacgctaccaacgccagacgggaaacaagccggcgagcgctaccaacgctcgaccggtgattttgaaacatcgaccagcttgcttattggaaaggaggacgcttcgcctcttatcctacacggggcgaagcatacctgaaaatgctatttggaattacgaccgaacaggaaacccaacgccgtcgtggcaaccgtggagaacactcccatcgcagtcgccagtccctccgagtcacctgccttggaacggacgtaagcgagtacgcaaaccgcaatcaagctgacgaccacgataaccagggcagcaatgttcttgaagttttccacccaccagttatgttgcttctctggatctatgtctccgacggacagtccggttggttcagaggccgaaccttccacgccacccacgatatcgtccggttcggtttcatcgttccgggccgcatcgtccactggtggaacgtttctgaatgtcatagagccaaccccaaacgctcgaaaacagtgaagtcgtttgccatcgacacatcgtctatgtacgcgttgccgttgacccatgcgtcataccatgccgagccttcgactttgacgaatctggaaaggtcggccgcactgtatctcgacagattgtcccacacgaggttcaacgatctgcggaagtcgtctcccggacgatcctggacaattcgggtgcgaccatcaggccccgacagatacgaggtgatgggtctgccgttcaaccccctcagtcgttggtgcaggctgacgataaccggcccgcttccccacgcctggaacggttcggacaacaatcgcaatcctgactgccgcatgtacgtgcaggcggtgaaatacaggagccgttgcagcttcatcagattcaccggcacgccgtcatcaaacgaacgacgcagcacgttgttcgccacgattgacggattggtgccgacgccttcaacccgagtcatatcgtcgccgctccacgccttgaacgtcatcccgctatccgttgctgtcatatctaacaggatactcgcctcacgggaggtgatctgaatggcgaacgtcaccagatacaagactagcaaaggcgaaaccagataccgcgtgaggtatcgcaagccgggcggcacgcagaccgacaagcgcggattcaagcgcaaaatcgacgcggagacgtgggcggcggagcatgtcaccatcgccaaggccaccaacagctacatagacccgcagggcaggtcgagaagattcggcgaactctacaagcagtggatcgccatcaaaaagcctttttggaagcccagccagcttgagagcacggaagcctcgtaccgtacccatgtgcaggcgaagtgggagaatcggcggatcggcgaaatcagccaggcagaactgcaggaatgggtcagcgacctcacgtcgcgtcgctccgccagcgtcgtgcttcgagccaagggcatcgtcaacggcgtgctcaaacgggctgtgaaggacagactcatcgccgagaacccgtgcgaggggttggagctgccgcgaaagccgaaacgcaaggaacggcgcgtctatctcacgattccgcagctcgtggcattcgccgacgaatgcctcaacgccatctacattggcgacgaacgcagggccctcgtgctgctgcttggcttctgcggcctcagatggggcgaggcgtccgacctgcgcaaggaggatgttgacgtgggggaaaggtctctgcgtatccgcagcagcatcgtctggatcaagggaaagccggtggagggcaccccgaaatcctatgagatgcgcaccctttacatgccgctcatcgtcgccgaagcattggcgccgatactcaagcggaagaagcgcggcgagcgcgtgttctccgatccgtccggccatcctctgcacccgcagtcggcgagcgcggtgaggggtaataggacgtggtggccgagcgcgctgaaacggctgggctgggatacggatgattggccgagcccgcatgatttgaggcatacggcggcgtcgattgccgtgcacgcgggggcgaatgtcaagggtctgcagcgcatgctggggcatgcaagcgcgagcatgacgctggacgtgtacgcggacctgttcgacagcgacctgttggatgtgacgcgcatggtggatgcggcggtacagctcgaaacgagcgaaaaggagtgtgggcaagatgtgggcaaaaacgttcccgaaccggctgtaatggtttgaaaacattggaattccaacgttcttatgttatgggcgctgatggttcgagtccctcattgcccactttcatttttcatcacttcgtgcaatcccctcattccacagacatgggctgtgacgatattccctgacagtcttcggcaaggggttctgaaatctcagtgagatgcgcgcagaaggaaaccggcagtactgctacaaaatcgtgaatttcggtcttcttggtcagatgcgtctcaatagtcacgtaaagttgtggcagagtgtttatatccagcaggaggtcgaatagccgatggcgcaggaacttcgtgaaggggacggcaagtcgggcatcgcacgtgcgggcaagcgcaagtgggggtatgaccccgctcaggtggacgctttcttggagcgcgcccatgctctgtatgacagcgagggcatgaatctcacccagcatgacattcagaacgtgtcctttgatttgcgcaagaacggctatgtgatcgcacaggttgacgccgcgcttggacgtctggaacgtgccgtggtcgataagcagaccacatgggagatcgcacagcatgggcgtgtgacgtggaaggcgaagaccgagaagctgtatcacgaagtccagaaccatgcggagcgtgacgagcgcgaacgcttcaagtccggagcgcccaagcagccttcgtacgataagaagcaggtggatcgtctggtcgaccagattgtggacaaggcggcggccgcattgggcgttgacggcgttaccgaagacgatgtacggtctttggccgatctcaatgcgaatacggtcaacaatgtgatcttcacccagcgcaagggcaagaaaggctatgacgagcgacaggtcgattacttcctgaacgcctgcgtgcagttgctgagtcgcttggaatcctatgcacgtgtggccgatttcgtgtccggcgagcccacggctcctgcccagaccgccacgaacgtgaccgttcaagcgaacggcgtctcaccgttgttcgcttccggaacgcagcgcccggcaactgacgaacgttttgcgccgtctgccgttgctcatgacgaatcattcgatgccctgcatcaggccgagcagagcttgttcactgctccggctccggttgctcccgcggcgccggccgcggcggcaccgatcgcctatgcgccggctcctgcatcgttcgatgcttccacaagcaccaataacaccaatgcggaacagccggtttcctttgctcccgcagcatacccggtgcatacgtccaacgagtctgcggcgaagcccgtctccgagacgccttccgtggctcctaccgcagctgttgcggctgagcctcccgccagtgccccgtccgcgccggtttccggtgtgaccgctggcagcgccccctcgtttgctccggcacagtcgtcatacgaatccgcagctccgtcatcgaccccgtcggtgttcgcggaacagcccgtggatatggtgcaggacggttcctctctggccgctctcgcccacatggctgcggtttctcaggaacttccggcagtggatgcaccgtccttcgctcctaagatgcccagccttgatgcaccgaatg

SEQ ID NO: 2845 - DNA, 2903 bp, Unknown
  R36_18m  MAG No. k141_28959
aattcgatgcgcacggccagttcctcgtagacggggatgatttcgaccgtatcgccgcgcacgcggaaggtgccgcgcgtgaaggcgatgtcgttgcgcttgtactgcatggccacgaaccggcgcagcaggtcgtcgcgattgatctgctggccttccttgagaaacagcatacgcccggcgtattcctcaggagtgcccaggccgtagatgcaggagacggtggccacgaccacgcagtcgcgtctggtcagcaggttggccgtggcctgatggcgcaaacgttccacatcgtcgttgatgttggagtctttctcgatataggtgtcggtctgcggtatgtaggcctccggctgatagtagtcgtagtaggaaacgaaatagctcaccgcgttgtcgggcatgagctcgcggaattcggcgcacagctgcgcggcgagcgtcttgttcggctcgatgatgagcgtgggacgttgcagccgttcgatcagccatgcggtggtggcggttttgccggtgccggtggcgcccatgagcaccacgtcgttctcgccgttctcgatgcgcgtggccagttcctcgatggccttcggctggtctccggatggttggtacggcgatttgaccacaaacggcttgtccacacgttcgatgttgaatcccatgcgctgtttccttccgattcacgctgtatcccgatgatatatcggaatatacgctaggcaactccaatacccgtcttcctcttggacgcgcagccaaccaccgctccgcgtaattgattgacacagatgagacattccaaatcccatgcccaatgttctcggagattccgccaatgctccatccgccatcttggcgggaacgtcagccaccgatacgtacagtccgtcttgccgcacttgtatggcgagcacatacccttgttcgcgatccgcgtgcttggcgatattggcaaacgtctcttccagcaacgaccgcgccaactggatagtcttctcgtcaaaccgactcaggagatcgaagggatcggacacaaccacctcgcctcggaaaccaagcgctgcgagttcccgccggtgccgttcgatctcggcctcgaatcgacctgcaccgatcggaacgatggcttctccggagcgacgcgcatggcatcgcgggattcgcgcagtaccgacattgtgctttgcgagaaccgctatgacatcatgcgtctgatcgagcgcccgttgagccacttcgcgcaacagtggcaagtccatcgactctccttgcgaagggtgttccgacatgatcctgtcgatgctcatgatgagatatgagagatcattggtcgtcgcatcatgcagccttgccgccaaatccaacgattcggccctgccacgcgcttccgactccctctccccctcacgatgatgccaattcagcagcagaccgattccaacgcacgccaacgccggcatgacggtccaaggcacaacggacaccaacgccccggcatcccaacccatcggcaacccatactgccatatcagctgcgccacgcgagatacggtcacagtcaccgccaacaccacgccgcaccatatgcgttgataggagaggacgattaatggctcggctatcaccacgctcaccgacatggacagatccaccggcaaggggaacaccacgcaccatgagatcgccaacgcgatattgccgccgaacgggaatgccacgcagagcaacgacaggatgacgaacaacagacccacccacagggcccacgcatcccaaaccggattgatacacgattcgatgaccgtatcagcggctatgcacaaggcgcaggctagcgccgcgatcttctcgccatgccaagacttcccgaaatcgcggaagcgacgtctaagaaaacggctgccgtcacagaacatggtatcgctcacagtaatcaaggagttcgccgcgcctcgtcaccccgaccttgcgcatggctcgtttcacatagctgtacacagtttcgacaccgattcccaagcggcgcgcaatttcaacggtcggtacatgatgtgcatagagacgcaacaccgccagctctcgatcggagaagagcctggcaccatccgcttccggctgtgcggcatccaccgtatgcaatgtctcttcaaggctatgcaaaccccaaccatgagggtatgttcccccgtcaaacaccgatttgaccgcctcgcgtatggtcgctgcgaaatctcttttcgaaatcaacgcttgggctccgcaacacgcgatatcctcaccataggttgccaggtcatacgaagtgactacgatgacgccaacctgcacgttccgctgtcgaatacgttccgtcagctgcactccgttcagcccgtccatcatgagatcgcaaataaggatgtccggcttccgcggatcgaacagacaacgttccaaggcaagactgggattatccgtaacccatagcatatgcgcctcgggaatcgtcctgccaataagcaaagccatcatctccgcagagcaacgatcgttgtccaccaaggcaagccgaatcaggcgcccgttcttcataagtaccccctccccaaatcgcctccgtcaaacgaaatcgtaacactgtgacgattcccgtcacacagacttcgttcgctcctcattggcatcttaccgtgttgcatgcggcaaaacagccgctcaatgaaggacaacaaggagcactcatgatcgcaaagaaaatcaccggaggcctacgcaaggacttacgcggtatgcggcaaagttgaccaagctttctatggatttgatgcttgaatcatttcgcagcatccacaccatttattgaatgtgcggcgagcgaacttcctatcgtccgccgcacaaacacattgttaccgggaata

SEQ ID NO: 2846 - DNA, 5011 bp, Unknown
  R36_18m  MAG No. k141_29008
actgtcgagcgtggccgtggctatgttcctgcccagatgaacaagcaggacaacgatgagatcggccgtattccggttgattccatctactccccggtactcaaggtgagctacaaggtcgaggccacccgtgtggaacagcgcacggacttcgacaagctcattctggacgtggagaccaagcccgccatctccccgcgtgacgcggtggcttccgccggttccaccttggtggagctcttcggcctgtgccgtgagctcaacgcccaggctgaaggcgtcgaggtcggtccggccccggtggccgaggagaccaaccccgagatggccgttccgatcgaggacctcaacctgacgcagcgttcttacaactgcctcaagcgtgagggcatccacaccatcggtgagcttgtctcccacaccgagcaggacctgctcgacatccgcaatttcggtatgaagtcaatcgatgaggtcaaggagaagctgcagaccctgggcctgagcctcaagtcctcgccgatggccttcgataccaataatctcgaaggtggtacgttcttctcgccggaagacgagtgatctgcctctttgaccaatcgttcgttcactaggcaagcggatgttcgggcatatgcccacctgcttgcctgaagaacggacatataaggagtaaacccaatgcctacacccaagaagggcccgcgtctggcttccagccccgcacacgagcgcctcatgctggcaaacatggcgaccagcctgttccagaacggccgcatcaccaccacgctgccgaaggccaagcgccttcgtccgctggccgagcgcctgatcaccttcgccaagcgcggtgatctgcactcccgtcgtcgcgtgatgcgcgtcatccgcaacaagtccgtggtgcacattctgttcacccagattgccgagcagatggagcagcgtgaaggtggctacacccgtatcgtcaagatcgccccgcgcgttggcgatgccgctccggccgctgtgatcgaactcgtcaccgagccggttgccaagaaggctgttgtgaaggaagctgaagccgccgccaaggttgccgaagaagaggctccggccgttgaggctccggtcgaggagaccgccgccgctgaggctccggtcgaggagaccgccgccgctgaggctgaggctcccgctgaggaagccgctgacgccgagaaggccgagtgagctgaatagcgtttcgccaagctagctgaaagggctggaatccgtttgggttccagcccttttgcgttgtttcatagaaactacaacgtacgtacggctcgaatggcctcggctcttgcggccagctgatcatcgacggggtatgcgatatgctccaaagtcaggccctgcggcgcaatcggcccgcttgagccttcacgcactggctcggccattttgccggcaaaccattccagagatttgcgtcccgaaccaactttgatgcatgagccgaccaaggagcgcaccatattgcgggcaaaggcgtccgccacaatcgtgaacaccgccagtccggactccagcgacggagtccgatatgcttcatgcgatgccatcgcatccggcaccaggggagtgatcggcacccgccgccaataggcggtcttgacttcgcggatcgtagtgcctcccggattcggagtggcgaaggaaccaaaatcgtgcaggccgatggtcaatgaggctgcgtggttcataagctccagatccagcgattcatccacggtaagcacgcatccacgcaggcgcgggtcgatctcggacgaacgatcggcgacccgatacacataagtgcgctccaatgcggagaacctggcatcgaaaccggccggtgccacggcaatgccatgaatgacgatgtccgaaggcagcacagccttgagtctgcgagtcagcgcctcggtgaccggaatggtcatgtgacctacgcagcgattcagtacctcatcggatacatccaaatgcgccacttggtgggaggcgtgcacaccggtgtcggtgcgcccagccaccgtcagacgcaacggttcggccgcatcatcggccggcacccgcagcaccttgtgcagcgcatcttcaatggtgccttgcaccgtacgcagattgggctgtttggcccagccatagaatccgccgccgtcgtaggccaagtcaatgcgcagtcgtgtcatagccattcattgtaacgagtgcggtcggcgagatgcgcgcggtcggcgagacgagtgcggtcggcgaagtgacctgcctgtaacattctcgcgcgtttgctgaaacggggccgccttaggttgtaaccatcaaacccggttacggcttgcggcgtcagcgtgcgctcgaaacgcctaaccgcttgaggccacagaagccgccacagcaaggagcaggcacgatgatcgaatccgcagcacgcagactggcccatgaactggtaaaccgtcgcgaggcgatcaaccgcgagctgtcccgcaacggcgtacgcttcggcatctacaagaacggcgaataccatgaccggctcttcccgtacgatcccgtgccgcgcattatcgaatccgacgaatacgacgaattggagaagggcctgaagcagcgcgtcaacgccctgaacgcctatctgaaggacatctactccgacaaggccatcatccatgacggcgtcgtgccggaggaatacgtatacacctcggccggctacttcccgcaggtcaacggcgtgacccctcccggcggcatcttcgcgcacatcgccggcgaagacctggtccagggtgaagatggccgctggtgggtgctggaagacaacctgcgcatcccctcgggcgccagctacccgctgttcgtgcgcgacatcgagcgccgcatctccccgcgcctgttccgcgacgtgcacatccgcgacaatcgcgaatacccgcgcctactgcgcaaggccatggactttgtgtccactgagggcatcgccgtggtactgacccccggccgctacaattccgcgttcttcgagcacgcctatctggcggagaaaaccggcgccgcactggccttccccgaagacctcgaagtggtggacaacaaggtctacttcctcgactacgccggcaaacgccaccgtgtgggcgtggtctaccgccgtctgtccgacgaattcctcgatccgtttgccttcaatcctgattcggtgatcggtgtgcccggtatcctgtccgcctaccgcgcgggcaacgtggccatcgtcaacgcgccgggcaacggcgcggccgatgacaaggccatctactacttcgtgccgcagatgatcaagtactatctcggcgaggaaccgattctcaacaacgcgcccacgtatatgccgatgttcgaggccgaccgtaaggaagtcctgaatcgtatgggcgagctggtcatcaaggatgtggccgaagccggtggttacggcgtggtgttcggttcgtcgctggatgctgccgcacgtgaggagcttgccaaccggatcaaggaggagcctcgtcgattcatcgcccaagaggtgattcagttccgcgatatcgatgtggtggacccgaagaccggtgagatgtcgccgcgcaaatgcgatttgcgtgcctttgtggtcaccggcaaaaacacgcacgtgtggtattcgggcttgactcgatactcgtcggtgcccggccagatgatcgtcaactcgtcgcagggtggcggattcaaggatacgtgggtgttggcacccgaatccggcgtggagcatgaatacggtgctgaagtgcaggtggcgaacctgctgagccagtcccgccgccactcgttgtctctggtcaccgcctccaaggcagacaacctgtattggctgggtcggtacaccgagcgcgccttcaccacgctgaaccagttcttcccgttctacgatcgtgtgatggacaccgatgtggacgccttccgtccgttcgctcacgcactcgacctgcccgaagatttcgaggacttcgacgggttcgtgaacagcttcctgtacgacgggtccaaccctgattcggtgcggtcggccgtaacctccgcattcaacaacgccgtgattctgcgcccggaattgagctcgcgtctgttgcagtacgtggagttggcgatgaccaatatcaccgatgccgccaaatacgcggccgatgccgaggacatctacaagcagcgcgatattaccgatgacatgctcgccttctggggcggcatcgagaattcgccggtcgaccccacgctgaaggcgttcatcttcatcggcaaatatctggaacgcatcgacctgtacacgcgcttcggcctgacgatggagcagctggaagcgccgctcaagaagctcgccgcctattcgatgaccttggaaggcatgccgctgcccagctgcttcgccgacggactgagctggctggtcggtcagctgccgtctcgcggatatcaggaagtcgccgacctgctgaagaagtaccttgacgactactccggccgtgtcagcgcgctggccatcaaagacatgggctcactgagctccatgaacatggacgccaagcgtccctgatcccgacctgacaccctgacgggttcaaatgctatggtggtatggcgaaaaaaccgtgcgcccgagtgccggcctgtgcatatcagcagattgccggaatatatgcgtgggctgtgagcgcacggaccatacctcagccatggctgtagtgttgttatcccgagaatatgccggttgccggctcgtgtgtaagtgcaggagacgttgtgaaaaaactcgtgttcgactatgagatgaggctgtccttcagcgcaccggtcaccgatcacaggttccagcttcgctgtattccctccactggccctcgccaacaggtgattgacgtggaagtgaagattcagcccgaaaccgaactcgaaaccaccatcgactcctttgactccgtggtgatgaccg

SEQ ID NO: 2847 - DNA, 3373 bp, Unknown
  R36_18m  MAG No. k141_29075
accattcgttcatcatccatgtagcgggttcgcgtggactcactcaccggattcttggtgaacagcataagccacgcattacctgcctgatagccgcggactaagccagcacgctgatggagcttttcaatagcctccgtttcgttgaatgaattacgccatttgcattcaccgaacagaatcgttttatcgagcgaatccgcagcaatcacatcgatatcggtttgctcgtgagcaatcggatcattgccccaccatttgccgaactgagtggcaacaaaggggaggttgcccatagcgttgtttcgaataagccattgcaggcaaatcgtctcaaattgttgaccaacataggtatcaaacgctggtccaaaagcgagtctgctcgtaacctcctcgctgatattaccatccaaaatgctcatgttgcgccccacaaagcggaaccaatatgcaaagaagggatcgctcaccacatacattcccttgcgcgatttactcggatcttcaccaaacggcacttttcgctcaattaagcgcaaatcgaccagcgttttcagatatgctccaatcgaatcagatccgacacccgcatgttcagcgataagctttggcgaggaattaccacccgcaatagattgcaatatcgaataatacgatgccggttcacgaagctcctgacgcaacagcatcataggttcctcacgcagtacgcccaagttgtcgaacatcaagcgcagcacattggattcaaagccatcggcttcctgtatacgggccagataatatggcgtaccgccgaaagtcgcatagtattggaccagttcttgcggagatgtgttcgttaggaattttgccgcatccgcatagtcgaatggcaggagtcgaatctgtgctgtacgacgcccgtatagcgggcttttacgccccaatacgtcgttttccatgaatccctcgttactaccggatagaatcatcgtcacttttgtggcgaggaatccatggtcaattgctatctgcaacatggagggtaatgctggctcggcggcagctgcataagggaactcatcgaatacgaacaccatacgttcgtcagtctgtgcagcacgttcagcaacaaacgataacgcatcagaccacccgccaaacgacggggtggaatccggcataccaaagaacgacaatgccgctcttgagaaatcttcaagattcatcttggcgctttgctgtatggccgtgaagtacagcacgcgtttatctttgacaaattcgtcgatcaacgccgttttccctacacgccgtctaccgtacagcaccaccatttcgaacgaatcactggtaaacagcttttccagcacttgtaactcgtgctctcgtgcgacaaacattgcagccctccgatccgcttaccgcccaataataagagtatcatggttaatgtaatcacgattaccttaattatgatactgataattgttgccctaccgcgaggaggatcttccttccgctgtcaaaacgaaagcccaacagtccagactgacgagcagcaacatcggcagatcaaccgctgacgccagccagcctgacagcacaaatcagcctgattgcaggcatataggcactagttagcgaaaccggctcttcgcattttggtgcgtaggggccgtgcggtttgattcggtgtgtgattgaaaaagtgaatgaaaccgcacggcccctacacgccaaaaccggaagagcccataaagtcccctcagtagcgccaacctgccagtcctttggcggaaccacaccacatagaccttcctcaacggcgccaagctgccacacgctggcagaccaacaccgctgtgtgcattctctgcgtcggcggcagtccaaaacttggcccagcaacgacgcttgctgtgcccagcgtcggcagagggccaagaattggacgcaaacgacacagaacacaccctcagcgtcggcagaactccaagatctgtaccgctgacgacggtaagccctccacagcgtcgtcagagatacaaaacctgtcccaacaccgacgcctgccaccccagcgtcgccggagtcccaagtctcggcccagcaacgacgcctacgaaccccacacataagaaaccgcacctccgatcatcgaatctgaattacttcagtccaacaaccggggtgcggttcactgaggggagttctgccagtatagctatatcagtcgtcgccgagcgtgacgtgcacgccgccgaccagcgagctgaccacgttgtagatcagtgccgcaatggtggccagcagggtgaagatcaccacttcaacaatcgagaagatggtgacgccggagaccacggtggtaagggacaacacgttcttgagatcgaaaccgcctgcatcaagaccggtggaagacacaatctgcgtaatctggctgaatacaccgaccacatcaagcagcacccatacgatcgcggaggcaacgacctgaataatcgccacggcgatggacagcatgaacgtcaccttggccacggaccaagcatccacgcgggtcagcgacaagctcatgcggcgagccctgggggcgctacggcgaggtgccggacgcacggaagtggcggcacctgaagaaggcaacgtggattcttccggatcgctggacacggagcgtgccacgcggggagcgtgctcagtaccgatcagcggctcgacatgatcgttctgcgtattgccgactgccggcggtatgatccggggctcgttgtcttcgagattctcgctcatcgtttctccttaacaggcttggcggtagcctctgctgtatgcgaggctaccagcttttcaggacgctgctcacgcctcgtccgcgttgttcacattctcgccggattgtgcggtctcggcggtgccgttcgccgcggcatcgccactgtcctcgggctcgtccttctcctcgttacgggcgatggagagaatcgtgtcgcccttgtcaggcttggcgaaggtaacaccctgggtgttgcgcccggtgcgcttgacctcgtccacgttggaacgaatcaccttgccggacttcatgatggccatgacctgatcgtcttcggacaccacgagcgcgccgaccagggcaccacggccctcgaccagttgcacggccttgatgcccaagccgttacggccctgcagacggtattcgctgatggcggtgcgcttggcgaagccctcgttggtcaccacgaacaggtccttgtcggagtcgccagggaccacatccatggccagcaggctgtcgtcgttacggaacttcatgccctgcacgccggcggtctggcggcccatcggacgcagctgctcgtcgtcggcctggaacttg

SEQ ID NO: 2848 - DNA, 5158 bp, Unknown
  R36_18m  MAG No. k141_29187
aagccgaccacgaaacaggacgcccagccctctacgacaacgctatcgacaccgactacacccactcaatcggcattcaaaaaggccaaatctaacccccgcgacacgccgagccagacacacattttgacccttaacccgccgaacatgatggagaagatcggcagatcacggccgcgcgacttataggcgctttcgaattcgtcctgatgatcggagttggagcggccgtcggtcatgagcacgatggcggtggtgtattgcgaggcttccgactcgctgggcagctcgtcgagcgcgctcagcaggccttcatagatatcggtgccgccgctggcatcggtggcatcggcctcatgcagcaggtcgctggtgcttgtgccagtggccttgaccgggcggtgggcctcggtttcaaacgggatgagaatgttcacgtcgccgctggcgggctcgatgtacgacttcttggcctggtccgggtcgagcgccgcgttcaggcctttgaccacgccgttcttgccctctccagacatcgaaccggagtaatcgaccacccaaatggtccagctgggtttcctgagcgcggtctggtagacgttgagcgcgctgtcgatcaccgtggcggaggtcatggagaacgtgagtttgccgtcgctgaccgcggcgaggatgtccgcggtggagacgggcttggtggcgccggtgtcgtcagcccagccgagtttgacggccttggatttggcgatgccgaacacgatcggcgtggtggaggtgctggccgcgtctttgacgatgtgcttggtgtctcccatcgaaatccacatcgaggaggcaggccagacggcgtcgtgatcctggccgccggccttgagcgcgttcataatctccagcgaacccatgtagtgcatcgtcacggctacgttggattggtcggccgctttctggatggcgacggcgacttccttgttttcggagccggaggcaatgctcagggtggcagtcggtttgccgccggacggctggaaggtctgcgtggtggcggacgtgccgttgccgtccgctgtgccgtcatcggaattattgaacgccgtgcaaccggtcaacgcgagcacgccggcacataccgcggccgcaaccgcggcggcggagagaagacattatgcccataattccatggctctcccgccatctaaagcgggccgggccacaaggtgaccgcacggtgaacaatgggtgaagagctacatcagtacgcggcgcaggcaatcatggggtcgtcgtagaagccgaggatcttttcgaggtagggcttgtaagtgctgttgggcatggagaagatttcgtggcgcgattcggggaagcgcacgatgttcgcctcgccgccgccgtccttgaccagttggacgaagtgattctgcggcttattgagtacccagatgtcgcgtccggactggaagagcagcaccggcgtctccacttcggcgcaggcggacggattcagtatggcccggttgagcttcaacgcttggcgcacccattcgaacgccgcgcagtaggtctggtattcgcggttctcgcaacgcagcttgaagtaccagcgttcacgcgcttcggaagcgccctcgttgccttccatcgagaattccggcgtgaagtccgactgcccgaacacgcgcttcttgccgaagccgagtccgcacagcgcgccgaccagcacacgggccacgcccagcggcatgccggtggcgggggcgatcatcggggcggagagcaccgctttgtcgaacagggtggggtatcgctccaacacggccgcgccgatgccgccgcccatcgaatggcagaacaggttcagcggcatgccggccgcgtactgctggccgatggtttcggcgaagccggccagatcggccacgtagcgctgccagtcatcaatccacaccatgcagcggttgtccacgtcgcgcgcggacttgccgtggccgcgatgctcgagtacacacaccgagtagccggcaagcaggaagtaccagacgagctcgtcgtacttttcggcgaactcggtgaagccgtggctgatgacgatggccccgcggaagatggcggtggcgccttgctcgcgaatcgcgtcgaatttggcggagtcgtagcacaggtagtgcagctggcccgagcggccgccggtgtccataatgccggacagcggctcgatcccggccgaacgttcggcggcggacggatcgaaccagccctcctcgcagcattgttcgagcgcgggcagcaccacgtcggtcatcgtttcggcgtacttgttttcgtcgatcatcgtcacctgcatggctcccatcttaggacaagcctcacgccgctgaccgcacaggcgcgtaggttgtgaggtatgagcgaaaccaatgatgtcaatgacgcaatcaagcatttcccacgcctcagggcgcgcacgctgcggttcggctgcggcgcaccgcgctccgcacagaccgtgggcgacggctcgcgggccctgttcctgcgctccgacggccccgaggatctggtgaccgcactgtggctaagctggttcgacgagtccggcgaacaccatgagaccaagctggccgatccgcgcgaactgcttggcgcaaccgccgacagcgaggacgtgccggccgaggagaaggcccgccgcgagcgtgcgcgcgaaggcggcaccggcatcgtcggctactccgcagacgatgacggcaatcgcatcgtgttcaccatcaacggccgcctgttcctgaccgacatcgattggaatgacgagaccggcgcacccgagccgcacacccgcgaactggccggcgaatggctcgatgaggacccggagatgtacacgccggtgctgaacccgcgcatcgccccggatggcgagcatgtgctgtacaccacgggcagctacctgatgctggtcgatatcggcggcgagctgggtgaccgcatcaccgcggtctacggcgtgagcgtggaggatgaggacgacaatccggccgaaaacacgtggaaaatcggtctggccgagttcgtggccggcgaggagatggaccgttacgacggtttctggtgggccccggattcgcagcatgtgctgttcgaatccttcgacaccgccgacgagccgacctggtacatcagcgatccggccgaccccgagaagccggccgccggccgccgctacccgcgcgcgctgacccgcaacgccgacgtgtacctgaccgtgatcacgctggcgttcgatgagaacgaccggtacgcgggcatcaccggcaacgccgatgtggattgggatcgtgaggcgtatgagtatgtggccgccgtgagctggcgtcgcggccacgatccgctggtgctggtgcagaaccgccgccagacccgcgaccaggtgctcgaggtggcggtcgcggcggatggggccgcgctgggcgccacgcgtgtgcttgaggagcacgcgaacgagcagtggatcgacttggttcacggcacgcccgcctacacgccggatgatcgtctggtgtgctcgctcaacgatatggccacggataccaaccgtctgacggtggacggccgaccgttcacgccggctggctggaacgtgcgcacggtgctcgccgtgaccgacgaggatgtgctggccgtggtgcagcgtgcgcccgaaatcgcgaccgaggtgccgcgagcctgggccggctcgggtgccgcttcggatgccgagtctctgttcggcggccatgacgcccgcagcttcgatgtggtgagcatgggatatgacggctcggtcgcgccgatcacgaccgagcccggtcagtggacggcctcacgcggcgcacgcggcatggtggtgtctgggcgcgatatgcgttccgcccgcgcccggatgcggcacatcgtcacgcgacgcgccgtcggcggcgtcaccgatgccgtcatcgccgccaacaccagcgatgccgccaacaccaccgacatcaccgccgccgacatcaccagcaccgccgcggaacccgggttcacgccgaacgtcacgttcacgcggctgggcgagcaccggttgtacacggcgatcatcgcgccgagcccgtccagcccgtacgcccatgccgacaaactgccggtgctgatgaagccgtacggcgggcccggcttccagcaggtcgtcgcctcccagtccttctactgggagggccagtggtgggccgaccagggcttcctggtggtcacggcggacggccgtggcaccacaggccgcggcccggcctgggatcgcgcaatcttcgagaacatgaagggcgtgacgctggccgatcagatcgaagccgtcaacgcccttcccgaggccgtctccaggctcaacgccgatgggcgcaggcccggcgttcccgcaccggacctcgacaaggtgtgtatgatcggctggtcgtacggcggcttcctgtccgcactggccgtgctggacgcgccgaacgtgttcaaggccgcgtgcgccggcgccccgcccaccgactggacgctgtacgacacgcattacaccgagcgctatctgggcctcgacccggatgtctactaccgcaacggcatcgtgcaggacgcaccgaaactcgagcgcccgcttatgctgatccacggtttcgccgacgacaacgtcaccatcgcccatagcctgcgcctctcgcaagccctgatggcggcgggtcgcccgcacaccttcctgccgttgacgggcatcacccatatgaccaacgacgagaccgtagccgaaaacctgctcaccctccagcgcgacttcctgcgcgacgccctggcctgaccggccccgggcgcgccgtgggccgtgacgtccgcggcacgcccggggcccgcgcccacacggcatgcggaaaaacggcgcaggtggtgcgccgcacccatttccgccctgaatttttggatatttttggatattttgcacccatcgtcatgtgaaagaccggttttttgcctcatattcccatcaccgcgtaggatgggtgaagattagaaagggaggactatgagcgttctcgaccgttttgaaaaaagcgtggagggtgcagtcaacggagtattcgccaagtttggctccaaagacctgcagcctgtc

SEQ ID NO: 2849 - DNA, 9227 bp, Unknown
  R36_18m  MAG No. k141_29412
atggcgatgcccagcgcgagctgggttggcgtgttcaccgcgaacatcgtgagcctggcggccaggaagccctccatcttcacgcgcgggtcaggtcggtgtctcactgagtgcgcagggcggtgggaggatacggccggctcggtgacggtggccgtgacggggccgccggatgcgggggcggcaatcggcatacggaccacgcggtcggcgatttgctcggcctcctcccggtcatgggtgatgatgagcacggtcacgccacgcgatttgagcgtgcgcaacagctcatggatacgcttcttggcttgggcgtccagactcgcggtcggctcgtccatgatgagcacgtcaggattgcaagccagcacgccggcaatggctgccaatcgttgttgcccgccggacaggtcgaagggggagcggtcggcaagatgcccgatatgcagcagttccagtgattcgcgcacgcggtcggctacctcggtctcgccaagcccttggttgcgtgggccgtacgccacgtcctcggctaccgtgtcagcgaacagctgatgctctggatgctgcatcacgtaacccacatgccggcgcaattgcgctaattgcttgcgattcgccgacttcgggcgcacgttgcgaccgcgcttgccggtcgaggccaccggaacaccggccacttcgatgctgccggcggtcggcgcagtcagtgcgcacaacatgcgcaccagcgtcgacttgcccgaaccattcacgcccatcagtgccacggtttcaccgcgcgcgatggtgaacgacaggtcatcgataaccgcccgtttggccgaaggatagcgataggtcagatgcgagacgcgaataatggggttcgtcgtatcaccgatgccgtcggagagcagcggcagttcggagccgtcttcgcgcttccgctggcgggggctgtcgttcgtaggacgactgggggcggcttctgtgccgataccaccctcagtctcgctttgcgagacagcctccgctagcgggggtcgattatcggcggctgcagtgacaccaacgattcgcccggcctccatgtgcacgatgcgatcggcatgaacggtctcatccggatgatgcgtgacatgcacaatagtggtgccgcgcgcctgcaaatcatccaaaatgcgcataacttcggcgcgtgcggattcgtccagcatggcggtcggttcgtccaataccagcatcgccgggttcatggccagcatgccggcgatggcggcgcgctgctgctgtccgccgctcatacgggtcgggtcggactgacgcaagttcgccaaccccacggcctgcaatgaatcaacgatgcgctcgccgatgagcccgcgctccagcccgagattctccgggccaaaagccacgtcatcctccaacacggtggtgaccagctgatcctcgggattctgaaacaccataccgatgccgcggcgggcagcgcgataggcgtcggcattcgggccggctgcgtacacgcgctgttccagtagcgtcacttcgccatcgtccggcgcggtcaatcccgcaatcagacgggccaacgtggacttgcccgacccgttcggaccgaccaagcataggcgctcgccggcatggaccgtgagcgaaacgccatccaaagcccatgaagtgccgcggtcatagctgaaacgaatgtccttgagtacggcggcggggggagcgggctcggcggaatcgtggaactcgtcggcgtcgaaggaatggggtgcaacggtcatgaaacagcaatccgtaactgataggcgaaaacgcagaatcccggcaagggccggagttctgcgttcttgttctttgagtggtcgttgagtggtcgttgagtggtcgttagtcgtggcgggcagcggcccatctcaggccggtcactgctgcttggacagcaggttggagaccggcttgtagatcaggaaggtgatcacggcgtgaatcgccatcttagccacgttgaacggcagcagaatcggcagaatcatcgcggccacagcctggtagggcatgtgcgcgtaaatcggcgtgatgatgaggttgcccaccagcgccaccacgatggccagcaccgcacccaccagaatgccgatggcggcacccttgcgcgtacggatcttacggtagatgaacgcggccggcacagacaggaacagcgccaccagcacagccatcagcgaaccccacggattggcgaacatgtgcggcacaaagccgagcacagacacgattgcggcggcggccgggccatacgcaaagccggcaatcaggcagacgatgccggacgggtcgtacttcagccaagtgaccggcgtaatcgggaattcaatgaagctggtgaccatcgccagcgccacgaacagtgcatacatggcgatacggcgcgtggaccagcggccggaatcggccacaccagtggtgtgcgagccgagtttggcgctggtgctggcggtggacgcgctggccgaaccctcggcctcgggcgccacagaacgaacaacttgcatgcggatacgcgaagatacgctcataatgagccctcgtttcttccatccggactataccgttggctccggaatctcaccggatcagccgcttgcgcgggtcgcgggcttcccgccatccccgttatgaaacccggggtacaggttaccgccagtaaggaattgcaccttccctgaaactgacaggcttattcatacgccatgcgccggacgtacgcaacccgcgtttcactgtgcagaaattcgtcttgtgccggtcaagtgcaacaatgggagccatggctgaagtgaagaaacccaacaacaccattgacaagcttgccctgatcgtcaccacctacaaacgtcagcagttgcttgagacactgttcgattcgattctggcgcttgaacaggcaccgtggcgcattgtcatcgtggacaatgagcagtccgatcagacggcggacatggtcgctgcgtttgccggcaaggtgaccggccagtggggcaccaccgtggccgaccagtccggcaacgaagagcgcgtggtctatgcgccgcagaccgagaacctgggtggtgcgggcggtttctccgccggcgtggccaaggcgtatgatctgggcgccgcatggttctgggtgatggatgacgatgtggccgtgctgccggacgccattgccaagctgtccaagtggaccgacaagcacgaggtgattcagggatcccgattcgattacgatggcggcccgttctactggcagtacgacttcattgtgccgctgggcattccgaacccgatcgcgcccgccgcattcggcccggccgggtatcgagtgatggacacgctgtgcttcgaaggcggcctgttcaaccgccgtgtggtcacggaaatcggtctgccggacccgcgcttcttcatctactgggatgacacgatgtatggctaccgcgccagcaaggtcaccaacccgattgtggtgcccgacgtgattttgcgccgtacgcgcgaaatcggcaactgggatatcgccggcgtgcgccagctcaactccacgtccgacatgaaccggtaccacatcatgcgcaaccgcggatacatggcccggtacttcatgacctacggcgacttccgtccgctggtgtttggactgggcaccgtgctcaccgcggccaaggaagtcattcgcctggtgatggtggatcgcgaacacctcaagaccggtttggtgcagattgccaagggctggtgggactcgcgcaagctgatgcacgaccccacctggaagcccatgccgtcgctgaagtagccgtagtagtggctccctcatcagagggagcttatttacggtcacttatgaatgaacaggccaccgtcgccccaggcccactggccttggccggcaccgatctggaagtgcagcttggcgatgcccatgtcattgaacgcgtggtgcgcgtctcccgcactctggtcgatatgcgcggcggcggtatcgtcggccggattatacgagaaggtgatcggctgacggttcatcgcgcgcgacacagagtcaggccgccacagacgccgaattttcctagtatcgaaatcgcgcgcattgcccattggggggcttgaaaaacgatacggatagggtacgtagtgaccggcggcgatgcacacgtttgcacaattggtgtgtaatggtttcgtgttgagcacaattcgcgttagactgggcgcaaccctacgaactgatgaaaacgtatggaaaggaaggtcaacgatgattgaaactgcacaggctttcggtgttgacattggcggttccggcatcaaggccgcacctgtcgatctgaccaagggcgatttcgccgagccgcgattgaagattctcactcccgaggtctccacgcctcaggccgtggccaaaatcgtcaagcagcagctcgaccacttcgaagtgcctgaatccgcacccgttggcatcgccttccccgcgccgatcaagcccggccagaagctcgacttcatggccaacctcgaccagtcttggattggcgtggacgttactgaagtgttctccgaagcctgcggccgcccggtcgtcgtggtgaacgacgccgacgccgccggcctggccgaagtccagttcggtgccgccaagggccaggatggtctggtcatcgccaccacactgggcaccggcatcggcaccgccttgatctacaacggcgtgctcatcccgaacaccgaactcggacacatcatcctgagcgccaagcatctggacgccgagaagtatgcctcctccgcgattcgcgagaacgaggaactgggctacaagaagtgggccaagcgtctgaccaagtactacggccttatggaaaagtacttcaacccggacctgttcaccgtcggcggcggcgtgagccgtcagagcgaaaagttcctgccgtacgtggatatcaagaccccgattgtgcccgccaagctgcgtaaccaggctggcatcgtcggtgccgcctactacgccagtaccaagcagcagtgagctgagttatttctgctggcgcaggagccgtattgaccatatgtaaggccgtccaagtatttcgggcggcctttttttaatgagtaattcgttcattaggtcgattatgtgttcattaggtcactcccattccaaacctgaattgcaatgggctcggaatggcggcgtttcaagcatcaacaattgtgaggctcgactagcagtgacctaatgagcgcgaaaatgacctaatgaatgtagctaggccgttattcgatgtggattgaagtcatagtatgtctgacgactccgctgccgtgccgcacgattgtcgtagtgctggatgctggtggatatgaggcctcgatatacctggctcggcaggggtggttttatcgtggagggtatgagcgtgcatttctcttctcgtgtggatatttctgcgccgaatcccattgcggcggccgaggcggcagccaaggcaaacggcatcgcactcagcaaactcaacgattccaatccgacccgccacgggttggcacccgaattggtgccgagcgtgtatacggccgacccgcgtggaccgcgtgcggcacgagaatcattggccgcattcctcaatacggcaaacgtggtagacgcaagcagccctcagttggcttcgcccgccgccggcgagggcaggaacgagcgccatgccgctttcaccaatgtgaataccgccatcgagggcgccgacccggacgccctgtacctgctgagctccacgtccgaggcgtattcgtggctgattaagttactttgcgatgccggcgacgcggtgctggcacccaaacccggctatccgctgattgagtcgattgcacggcttgaatgcgtcgatacggtcgaataccagttgcaattcgacggctcctggttcatcgacatcgccgaactcgagcggctactcagcgagcccggtggcgaacgcgtcagagcattggtactcatcaacccgaacaatccgaccggttcgtacgtaaaaccaaccgagcgtgcacgtatcgtgacattgtgccgtgagcacggcatcgcccttatcgccgatgaagtgttcttcgattactctctcgaacctttccccggcgacgcacggctcgcgggggagcgcggcgtgctcaccttcgccctagacggattctccaaaatgctggccgcgccgcacgccaaagtcgggtggattcaggtgtccggacctgccgaggacgttgccgaggcccagcgtcgactggacgtcatcgccgacgattatctgccgatgggcgacatcatcgccgaacggattcccgcattattgaacgccgcgcccgcacagaccagacgggtgggggagcgcgtgcgcaataacctggccaagttgcacgagttgcttgacgccgatcccaacgggctggtcagcgtgctacgggccgaaggcggctggaacgtgctgttacgagtgccttccgtcatcgatgagaacgaactggtgttgcggctgattgacgagcaccaactcaccggacagcccggctacttcttcgacatgacctccaatggatacctggccgtttccctgctgcccgaaccggacgaattcgagcgtggcatccgcgccgtgctcaataccgtcgccgctttgctgcgataggccggtgtttgccggcaccacacctgtactccacgtacaatggcggcatgggattcttgtttagaccgaaagaactgccacacccggcatcgctgacgttcactttggaacaggccgggcatacgtatgatgatgggcacgtgggacttgctcccacggacatcaccatcagcgagcggcgggtggccgtgatcggactgaacggcgcaggcaaatccacattgctgggtctgctggacggttcgttgaaggccaacgccggcacggtgaccattgcgggcggtgaggaacgtcttgacccggctgtgaagaaggacgcgaagcgcatcgataatctggtcggcaaagttcgccgcgaggagattccgaacagcttttaccaagcggcgaatatttccgaggctgtttccgaagcgttgaaaaagcacaaggtgcccgagtcagaacgtcatgcgcgcatcggcaatctgttcgcgtattttgatttggcgcaggtctccaaggccaaggccggcgaattggactccgagaaacggcacctgctggctattgcggccgcgctgagctttgagccgagtgcgattgtggcggatgagccgagcaagggattggatgagattggcgccgcgcatgtggccaaggcgttgttcagctacaacaagcaggtgattttcgccacgcatgacacggatatgatccgccggcccgaatacgccatcgaccgcatactggtgctggacgagcacgcggtcgtgtttgacggagcgccggctgaggctgtggcgttttatgaggatctgattcgccgccgatacgagactagagcatcgtgaaccaagactgaacctgatgccagagcgtcggattgttgtcgatcatcgcatcgctgcgcgactgcacgaagcagctcagtatggctatgcccagcgcccacaatacggccagcaccacgacccagcgcatcagccaacgccacggagtgacgcgggcgatgccatcgcctgaagcggcgtcgttggcccccgccaatgaccggctcggttcgcgcccattgaccagccacagtagccccggtatggacgccagcgagatcagccagccgaaatcggcggaataccgccatcccaaaccgccgacgcggctgtcgaatacgaccagcaccgccgctacggccaagcaagacatcagccatggccgcatgccgtgtgtttccaatctgcgcagcaggggcagcgccaaagccatcaaggtcagtggcgtggccgtgaaaatcgcgccgaccatcacctcgtaataaccccattgcggcatcggggcgggagagcccgccagccacgggaaacgatccatgaagcgcagcggcaggaacaggtaataccagatgttggcgggcatatccgcggacggggtggtataccgggtcatatcggatatggagaactgatacgcattgccgaaattgaacggggaatcgaaccgaaccatgttccacgtcatcagaggcgtcacgacgagaatggcgggaatgattaccgccagcggcgcgcgcaacgcctgcaacggcttgatacggcgtgtgcgcagaccggtgcccagcgcgcgaatctgcggccagaacagggggaacgcaagcaatgcggtcaaggtgaacgtcggtcggcatccgaaattcgccgcaatgcacaaggcgcccaaggccagtcgtggcagggagagaggcttggcatcgcccgcctgccatcggtccgatggtctcagcggacggcgggacgtgtccgcgccgagccatagccatagtcccagcgacgtcaacgtcagcgatgcggcgaacggtatctgatagaagttcgtgcgatacagcaaataccccacttgcgcgctcaccaacgatgagaccactactaacgacgcggccgccaccgaagtcttcggcatcacacgatggatgacgcgcagcaccagcaaggagaagaagatgatgaacagcagcacgagaatatactcggcggcggatgtcggcagattatgaccggccagcagacgataggggacgaacagcagcactgcgggcaacacgccaaaataggaataccagtgaccgtcataatacgcgtaatcccagtagagcggactggctccattggcgagtagctgggcacgtgtggctacgtcataggggtgctcggtggcggccagttgttcgggaaccggcaagtcgagccagggccggccggcgaccagcgcatcggccacatgcccatactggtcgaaatcataggtgtaatcgccggaaacgtggaagacgagcgaagacgcgtaccacagttcgtggatgatggatacgccgataagcagggtaggaatcgccagaagccccacgaaagcaagtcgttgccgagtgctggacgggtcaagcgtgatacgccacaggcgcgatcccggcctccagacggcaatcatcagcaacaccaaggccatggcgagcacgcgcatccaattgatgacgaacgg

SEQ ID NO: 2850 - DNA, 17668 bp, Unknown
  R36_18m  MAG No. k141_29480
atccgtcatatcccgagtatgagcggcatcaccccaacgtcattccgccattttcatgctgcttctacttgggcatcagtccctcgaaacggaagtagatctctggaaaccacgacatcagcccctcgaaacggagatagcatcaatttaggcccagattgcccgttacagcatcgggtaatacttaccgtgatcgattttggcggcgatatcacgtaattcggcagcatctcggcggtcttcttcattaccttgcgacaacttgttcgctttgctgtccagatgatgctcgatgccgaagtaactgcatatccccacgagcgcaaacagccctataccaactaaccagttcatagcacgctccttgccaaagcttctgccttaatatggtactgctgttcatggatcgtaataaaaaaagcgggctcgcaagcccgcttttggttttaggttgaagacgatcaggcgccgtattcctcaaggtaggcggcggcgcgctgctggatatcgtggctgagcaacggggtgccgtcggagttcttcatcttggcggcggcgtcgaagatctcgcgcacgttggcgatggagagcaccgggaagccgaattcggcttccacggccttcacggcggacaggtcggagtccttggtcttctccatgcggtccacggagagcacgagacccacgacctcgacgttcgcctcggccttgagcttggggatgacttcgcgcacggcggtgccggcggtcatcacgtcgtccacgagcagcaccttcatgccgtcggtcagcggggtgccgaccatccagccgccgtcgccgtggtccttcttctccttgcggtcgaaggtgtatccgacggtcatgttgtggccggcggtcagcgcgatcgcggtggacacggccagcggaatgcccttgtaggcggggccgaacacggtgtcgatgttgcggggaatcgtgttgtgcacgatggcctggctaatcttttcggcgtagaacgtgccgagcgcggcgatcttcttgccgtcgtcgaaggcgccggcgttgatgaagtacgggctcttgcggccggacttcagcgtgaagtcgccgaacttcagcgcgttggattccaacaggaattcagtgaagcgatgtgcgagtgtttctgccatgatgttccttacctccaagtctgtcctgcggccagtttagcagcgagttcgggacggctgtccagcaggtcgtcaagttcgcgggcgacgcgcagcggggccaccgggtcgaagagcgcggccgcacccacttcgacggcgttcgcgccggcgtacaggtattcgagcgccttctcaccactgtcgatgccgccgagtccgatgatcggaatctccggcagtgcggtgcgcacccgatagacggctgccaggccgaccggcagcacggccgggccggatacgccgccggtgacgttggcgatgatcggctggccggtgcgaatgttgatgcgcatgcctttgagcgtgttgatcatgctcaacgcgtcggcgccgtgttccacggccgcgcgcgccggcacggtgatgtcggtgacgttcggcgtgagtttgacgatcatcggcttgtcggtcatcgggcgcagccggtccataagattggcgagggccaccgggtcggtgcccacgctcatgccgccggcggaaacgttcgggcagctgacgttgatttccagcatgtccgcgtcggagtcggcgagcttttccacgaccgccgcgtaatcgtcatcgcaatgtccggcgacattggagatgacgaacgcgcccgcggccttgagctggggcaggtcctcggccaagtaatggtcgatgccgggattctgcaggcccacggcgttgatgttcgcggccggcgattcggcggtgcgcggcgagggattgccttcccacggtacgggcgaggcgcccttggtgcatacggcgccgagctggctgacgtcgtagaaccagcggacggcggcgtactggaaggtgccggaggcggtgccgaccggattcttccattccagaccggccaccttggtgtggtgcttccacacgtggggctcgtacaggttgatgtggttgtcgctgccctgcgcggactggttgtttgcgctcatcgtcactccccccatccgagctgttcgcgagtgaacacgggtccgtcggagcagaccttgagccggccgtccacggtgtcgatggtgcacagcacgcaggtgccgtagccgcagcccatgcgctgttccatgctcagctgcgcggggatgccgcgttcggcggcccaagcggccacggccttcatcataggcagcggtccgcaggacaagatgatcggcttgcgatcgtaggccttcaggtcgtcgccttgttcgagtttgttgagcaggtcgaccacgttgccttcggcgtcgtcgatgctccacgaccagtccgcgtaccgggagacgtattcctcagcgaagtggtcgttgcggtagccgaatacggcggtggcaaaggaggcgtcgtgttcggcgagcttttgcgcggcgtagattagcgggggcacgccgagtccgccgccgacgagaatgtagttggcgtcttccttgaggttgaagccgcggccgagcgggccgagcacgtcgacggtgtcgccggcctgcagccttgccaactgttcggtgccgtggcccacgacggcgaagatcacgctgacttcatcgccgtcgacttcgctgacgccgaacggacgcggcatgagcatgaagtcgtcgtgcgtgaacaggttgacgaactgggcgggcttggcatgggaggcgatgaacgggtcgcggaacgtcagtcgcatcacgcggtcggtcagttccgtaacctgcgtgatttcgacgttgtggcgcggcgggaagaatccggccgcagtcgcttccgtaaccacatcatgggtgggggtgaaagttgtcatttcattcctattcagcacatcaagctccccctatcaggggagcggtcaaccgcaggttgactgagaggtagttaaacacactcggctccggtttccagcccacactcacgtatagcccacagccggacaatctacctacctatatacggcaacccgcagattatcgcgcatgtcgagcgccgcctggcgcgcgctgctcgccacaaggtccagcgcctcgtcggcggtcatggattcggagtacttgccgctcttcttccatgcgccgataatgccgcgcgacgagttgacgatggcgccgctgccctgcttgtcgaacatgcctgccacgtccgcggccgtgccgccctgcgcaccgtagcccggcacgaggaagaacgtgtgcggcatacgttcacgcaacgccttgccttcctcggggtgggtggcaccgaccaccgcgcccacgcgggagtagccgtggctgccgatggtctcggcgccccagccttccacgagatcggccacatgctcgtagaccttcgtgccgtcggccaggtcgagcatctgcagttcgctggaggacgggttggaggtgcgcacgagcacgaagatgtccttgtcggcttcggcggcggcctcgacgaacggggtgatgccgtcggtgccgagatacgggttgacggtcaccgcatcctcatgccacgggtcgaagtcgcccacgccgttcaggtggtgggcgtaggcggctgcagtggagccgatgtcgccgcgtttgatgtcgccgagcacgtagaggccctgctgggccgcgtattcgcaggtcatcgtgtagatgtccacgccggcggggccgagcgcctcgtacatggcgatctgcggtttgacggcgggcacgatgtcggcgatggcgtcgatgatcgtgcggttgtattcgaagtaggcgacggccagctgcgcggattcgatttcctccggggattcgaccgagtcacgcacctcgtcggcaaagctcgccacgacctgcggcggtaccaacgcctcggtggggtcgaggcccacgacgctggggttctgagtgttgtcaatcgcttcgatcaggcgatccatgctgctccttatgttatctacagacggctgaacatcagctgggagccgatgatcgtggcgagggggcgtccggtgacctgccagccgccgaacggggtgttacgagccctggagtggaactgttcagggtccacggtccattcctcagcggtgttgagcaccacgaggtcgacattgtcggcgtcatccacgcggctcaagtcgagcagtcggttgacgccttcacgctgcggctgagcgtcgctctcccccgcaatcacgccatccggatcatccccagtgggcgcgggttcggcgtagtcctcgaccagcgcggccacgtcggttggcacatgccccatgagttcggcgggtcccacggacatgagctcgatcagacgctcatcggaaatgaagccgccgtcgacgagcaccttgtggcacacgccgtacgcgcattccagtccgatgatgccgttgggcgcctcaaggaagccgagttccttctctgccaacgtgtgcggcgcatggtcggtggccagcagatccacggtgccgtcggcgatggccgcgatggtggctttgcggtccgcttcggagcgcagcggcggattcatcttggcgagcgtgccgtacttgagcagcgcctcgtcgctcaacgccagatagtgcggcgcggtctcgcaggtgattggcaatccttcggccttggccttgcgaatcgcctcgaacgagatggcagtgctcacatgctggaagtgcacgtggacaccggtgcggcgggccgcttcgatatcgcgggccacgatcttgagctcggtgtcttccggaatgccgggcacgccaaactcgcgggaaacggggccttcgttcacggcacctgtatcgtgatgctcgcaatgctcgatcaggtacaggtcggaggccttgacgttctccagcacctggtccaggatctccggcgtcacagcggaaccgtcgtcgctaattgcggtgatggggtgcgtgagcatggccggcgtcttggcgtcgtcctcgaatccgggcacgtacttgagccaatcggcaacgtcgcttgcctcatgaccggcgcgatccttggacgcgcacacgcacagatcgtaacgaaccggcaattgaacatcgtgcgcagtatcgtactgctgcaggaagtcgatgacgttgtcgaagccggcatccagaacctctttcgcaccggccgcttccaggtcagacacggtctgcccatccagtgccggcaacgtgttcggcatgatgagcacgttcgtgtatccgccggatgcggacgcgcggcagccggagaccatagattccttgtaggtctggccgggatcgcggaagtggacgtgcgggtcttcgaaaccgggggccacggtcagtccggtggcgtcgatatcggcaccgtcagccacggcggaggtgtcggcgaagtaggcggcagcggtcccgggcaccacgaggtcgatgacttcgccggtgttccagaccttgatgttgcgtagggtgatgctcacagtttggcttcctcgtcgcagtagtcgcagcggtattcgagccgctcggagtgcacgaggtggaacatctgcttgatgccgggctcggtggtggtcacgcagcgcgggttcacgcaggaaatcacgccgacgatgtgctcgggcaggttcggctgcttcttttcgacgatcttgccgccgcgcaccacgtctacggtggcctggcaggccacgaagccgagcacgtcgaggtcgatgtccttgtcatcctcgattttgatgatgtccttggagccgtaacgcttggagttggcgttcatgatgagcgcaagcttggttttggccggttcgattttcaggtattcgagaaccttcagcgaggttccggccggcacatggtcgatgatgatgccgttctgaatgctggtgacttccatcaggcctgaacctccttggggttgagcggttcgtatccgggtagttcgtcgcccaccacggtgctttcgagggccatgcgcacgagcatgccgttcttgacctgttcgaagtaggcggcacgcgggtcgtcgtccacgtccacggcgatttcgttgacgcgcggcagcgggtgaagcacggccatggacggcttggcgagctgcagcttttcttcgtcgagaatgtaggtgtcgcgcaggcgcaggtagtcgtcttcgttgaagaagcgttccttctgcacgcgggtcatgtacagcacgtcgaggtcgccgatcacggaggccaggtcgcgcacttccacgtaggagcagttgtcggtggcgttgatgcggtcgatcacgtactgcggggtcttgagctcgtccgggctgatgagcacgaagcgcacgttgccgaagcggcacagggtctcgatcagggagtgcacggtgcggccgaaggtcaaatcgccgcacagtcccacggtcaggtcggtgatgcggccgaagcgcgactgcagcgtggccaggtcggccagcgtctgcgtggggtgcatgtggccgccgtcgccggcgttgattaccggcacggatgcggcgcgggaggccaccagcgcggcaccctccttcgggtgacggatggcgaccacgtccacgtagttggacacggtcttcaacgtgtcggcgatggattcgcccttggtcacggaggccagctgcgcgccggcgaatccgatgaccttgccgccgagacgcagcattgccgtctcaaagctcaggcgcgtacgggtggagggctcgtagaacagcgtggccagcactcgcccatcgcaggtatgggcaacctctttgcggtgggaatcgatgtattcggccttatgcagcaggtcgagaatctggtttgtagacaggccgtccagcgttacgacgcttttgccgaccattggcgtttcttcagacaaggctcaccttttcgctcgtggttttcaggtggccacccttgtgtgacctaatataacttacgccatttttcggacagccgcattcaccgagtgttcacctgaaaatccaacgaatatgctgtgtctgtatagctgatatctgctttggaacgccagagctcattcattaggtcgatttgacgttcattaggtcactgcaccctcgtatctgttgttggaatgccgccattccaacaaggtatgcggcggcggaccgacctaatgaacgatgaatcgacctaatgaacgtagtgaacgcaatacaagaaaggtctatcgctgcgcgcggcgtcggttccgctccagtcgcggtgcgatcacgtgcatacgcgggcgaagcgcggtttgcggctgctgcgttgcggcggaggccgtggcggtggttgccgcagtcgcctcgtcttcggcctgcccgtagaacaggcgctggcatacgtcacggcatttgcgcatcacggccagcaggtcgttctcgaaatgctggccgcggtgggcgccgtagccgaggtagacggcgatgccgcccagcgaatagatgtcatcaggcagaatatcggcctggttggcgcgcccgctccacagatagttgccgttgcgggccgcggtgcacaacgtccatgccttgcgcagctgaatcgcatcgatagcgctgatgagcttcttggcctccagcacgtccaatgcctccaatgtgccgttgacgcgcagatctttgatatcgccggcgtgctggagctgcatgagttgcacggtccattccacgtcagacagaccgcccttgccgagcttcagatgacgttctcgacgcacgccgcgcggcagacgctcggcctccatacgggccttgagcttgcggatgttctgcaattcggcctcggtcagctccgtggtcgggtagcgcaacgggtcggcgatgttgatcaggaagtcccgcgccagttcggcgtcgccggccgcgtaccgggcgcgcagcagcgcctggcgctcccaggtcgaggcccaggattcgtagtattcctcgcaggaggcgtaggagcgcacgagcgggccgttcttgccttccgggcgcaggtccaggtcgagttcgatcttgggttccagcgtcgtcgggccttgcaggatgttgcgcaggtcttccacgaccttcttggcgaaggcgttggcttggccgtcgtcggcatcgtcggccggacggtagatgagaatggcatccgcatcggagctgaagttcacttcgcgcccgccgtaacggcccatggcgatgacggtgatgccggccggcgcggtttcgacgccgaacgcggcgatctggtggcgcacggcccaggtcagtgaggcgtcgatgatcgcgtcatacacgtcggtcatggccttgagactgtcggagtcgctgatcacaccgctcatccaagacaggccgatgcgttcgatttcgtggcggcgcatggcgcgcatggaggtggcgaactcgttgatgttcgagccgaaacgttccagcgccgagccggtctgcacatccaatgcctcgcgcgtgcgggcctgcagattgccgtcatcaccgagccaactgatcgattcgaccgacttgttgagcgcgtcgcccaggaatcgcgagttggacaggatgtggcacagacgctgggcagcggaggtggagtcgcgcaggaagccgaggtagccggattcggtgccgaagttctcctccagcttgcgccagttgagcaggcccatgtccgggttctggccctcgcccagccactgcaagacggcgggcaggatgatgcggttgattttggccgcgcgtcccacgccggcagtgagcgcctgcacgtggcggatggcggcgtccgggtcgccgaaaccgatggattcgaatcgttcctgtgctgcctcgacgctcaggacgatctggtcgttctccatctgggcgttgaccggcagcatcgggcgatagtagatgtcgaggtgcaggtggcgtacttcgcggcgggtgtcgtcgtacttgtcgacgagttcttccgggtgcaggccgaatgcgcgggcgagtcggcgcagctcctggttctggttgagctcgtccacgtcgatgtcgcgcttcttttcgaggcctccgaccgaggcccggccgaggtccgggaacaggtgcgtgcgcttcagggaccagatctgctggcgatgttccatcacgcgctcgaagcggtagtcctgggacatgcgcacggcctgtttgcgcgagacgtagccgccttcggacaggcgctgcagcgagtcgagcgtgttgctggtgcgcagcgattcatcggtacggccgtgcacaagctgaagcatctgcacggtgaattccacatcgcgcagaccaccgcggccgagcttgatttcgcgatccttcagaggtgcgggaatcagatcttccacgcgcttgcgcattttctggcagtcgtagacgaagttcttacgcttggacgcgctccacacgaacggccgagtcatatccatgtaggcccggccgaggtcggggtcgccagccaccgggcgggccttgagcaacgcctggaactcccagttctcggcccactgctcgtagtagttcttgtgcgaggagagcacgcgcaccagcgcgccgtccttgccttccgggcgcaggccgccgtcgatctgccacagcggctgctcggccacgcccatgatggcggactggcagacacgctgcagcatggtgcccatcttggtgcccacgcggatcagcgtctgatggtccacgtccttgtcggccggttcgaccacgtagatgaggtccacgtcggagacgtagttcagttcctgtgcgccgagtttgcccatgccgatgatggtgaagcgcacgtgctcgctgccctcggtttcgtggcgggcgatggccagcgcgccttcgagcgccgcgtccgcgaggtcggacagttcgcggctgatggtcggttggatggaggccgggtcgtccgccacggcatcctgggcgatgatggcggccagttggttccggtagctggaacgcaaggccgtggccgcttcggccagatccttggaggcgacgggcatggccggttcgtccgggtccgcgccgaccgccttgagcagacgtgcacggcgttgcgcgtgattgaacagatggctgttgcagttgtcgactgctgcggcctccacaagctgcggcttgaagcgcatgaacttgcccatcgcgtcggagacgccgagcaccgtgaccagacgcttcagggcgtcgttgtcggggatgacgtgtttcagatcgcgctggctggattgcatcgcgttgacgatatccacgaaattgctcaatgccatatcggggtcgcaggcgtgggccagcatgctcagcagttcggcgcatcgctcatcgggaatgtcgtccgtcttgagctggtcgaacaaggtgcgggccttgtcgaggtcttgcagacctgccctgatgagatccatggagctgggtttgaacatcgacgattccataagattccactatatacgctcatgccctccgaatggggcatgagccgggaaggagtcatcgggcgacgctgatgagctccgaggaatccatatcgtaatcggccatggcgtaggaacggatggcggggtcatcataggtgttcatgtaataggtgttggtcttggacgaatatccgctggtgaacagcgtgcgttcgaactggccgtcgcccatcttcgccatgccgtccaccatctgcacggagccgagggtgtggaacaggcgagacacattggcggcttcatcgttctgctgcgggtaatgcgcgttggtgtaggccacacgaacgaagcgcgacggggaactcacgtcgcccgggatgccatgcatgcccacacccgcaccccaggcggtcaaggaggccttgccccatgaagtcggttcggccatctcgttgctgacgcacatgtagttgcgcagattttccatatggaagtcgaacgtcggctgattggtcagcacatcaacgtcatcatgatgcacgtgcatgccatcggccatctgctcgacgacgatgctgcgcttgccgtcgccgatgaaccagtgcagcagagactcctgctgtcccggcacgatctgggagacgagcgtcacgttcctgagcgccttctcgacctcgtcgacggagtcgaaattacgcgccacccacagcggaaattcgaacgtggcgacgttttccgtgccttcgaccggttcgtggacgaacgaggcgtagccggggaaattcaagccggcgatggccagaccatgttcattggcgcagtcgaaatacatcggcctatcggccatgaccacgcccacgccgatcaccgcgttcggcttcgctttgccgcccgcaccgaacaccgtgtcatagcggtagccgcgcggagtgaccaggatggtctccccatatgagaaactccagtcgagattacggccgaaataggtgttgccctcatcatcggagaaacggacaccagtgcacataacggacttccttccatcgctttggttggcttgtacgttcatgatatccatcggccgctgggggaactctgggtttcgccagcagattaacgtgcggcgcgacgcattgagatgcgccgcgccgcgatatgcgtcaaccttgcgtaccgaggaacaacggttccgcattgcgccagatacggcgcgtggtggcggggtggttcatcgaatacaggtggacgccgtccacgccgtgggccacgaggtcggcgatctgctcggaagcgtagaggatgccggcggcacgcagggactggatgtcgtcctcccacttgttcagcagggtgttgagcttgtccgggatacgcgaggcgttgcgttcggccatgcgacgcacggacttggcaccacgcaccggcatgatgcccgcctcgatcggcacggtgatgccggcggcgcgcgccttgtcgaggaagcgatagaagtcctcgttgtcgtagaacagttgggagatcaggtgagtgacgccggcatcgaccttgatcttaaggttttcgatgtcctggtccagcgagtcagcctggtagtggccttccgggtagcaggcgccgaacactttgaggcccggcttcacggagcggatgtatgacacgaggtcgctggcgtggttgaactcgcctaccagctgctcgccgtcgatgtagtcgccgcgcaatgcgagtacggcgctcacgccggcctgctcgaacatgtcgagggcctcgtcgattttcgccttgtcggaatacaacgcggtcagatgcgcgactgcgggaatgccgtactccttgcttatcgtatgagcaatgcgcgcggtggcggtgcgatccgaatgggtgccgtggccgtaggtcacggaaatgaagtcggggttcagcccctccaggccgtcaagggtgtcatagatggtgtccacgggagcgttgcgcttcgggggaaagacctcaagggtgaacatcggggaatgcatgctgatttccttacataaacccgagctccctcatacagagggagctcggtgatttccgctacttgtcgagcttggcgcgcacggccttggcggcggcgaccaggttctccaggctcggccaggtctcggcgttaccacgggtcttcagaccgcagtcggggttgatccacaccttcttgacgtccatcttgtcaaggatctcgtagatacgatcctcgatttccttctcggaaggaatacgcggggagtggatgtcgtagacgcccgggccggcctcggtctcgaagtgcgcgtcatgaatggcgtcgagcaccaccagatcgccacgggaggcttcgaaggagatcacgtcagcatccatcgcgtcgatgtcgcggatgatgtcgttgaactcggagtagcacatgtgggtgtggatctgggtggtcggcttgacggcggagtgcaccagacggaaggccggaacggcccagtcgaggtacttgacgtgccagtcggacttgcgcagcggcagcttctcacgcagggcggcctcatcgatctggatgaccttgatgccgacggcctcgagatcgagcacttcgtcgcggatggcgagggcgagctgcttggtctgctcctcgtgggtgatgtcctcgcgcggccaggaccagttgaggatggtcaccgggccggtgagcatgcccttcatcacgtggtcggtcttggactgggcgtacgcagaccattccacggtgatcgggttggcgcgggacacgtcaccccagacgatcggaggcttgacgcaacgggtgccgtaggactgaacccaagcgttcttggtgaacaggaagccgttgaggttctggccgaagtattcgaccatgtcgttacgctcgaactcgccgtggaccagcacgtcgaggccgatctcctcctgcttcttgatgacggcgtcgatctgggccttgatgaactcgtcgtaggcttccttggtgacctcgcccttgcgcagcttggcgcgctcggcgcgaatctccttggtctgggggaaggagccgatggtggtggtcggcagcagcggcaggccgagggcctcgcgctgcagggcctgacgctcctcgcgggcaggctggcgcacgtagtcggcgtcggacagcttgccgatgcgctcggcgacggccgggtcggcggccacgcgggtgccgtcgaacagggcctggttggcggcgagggcggcggatgccttcttctcgtcctcggtggcgtcggccagagcggcgacttccttgagctcggtcagcttttccacggcgaacgcgaagtgcttgaggtcttcggacgagatgccggtctcgccttcagtgctgaacggcacgtgcagcagggaggatgcggtggagacggccacgttggcggtgacctgcttcagggcgtcgaccaggccgagggaggtggcgtagttgttgcgccagatgttgcggccgttgatcacgccggcgaagatggcggtgttggaggccacgccatacttggcgacggcttcgaggttctcttcacggccttcgttgaggtccagtccgatgccgtcgaagccgagcaggttgacggtctcgtacacgtcggcgatgtggccgaagtaggtgttgagcagcaccttgacgttgcccttggcggacaggatcttggtgtacagggtcttgaagagctccacatcgcccggctccttgtcgagcacgaggtacggctcatcgagctggacccatgcggcgccgagttcgttgaacttgtcgagcacttcggcgtagacggcggccacggcgttgaccaggcccttgtcgagctcgagttcggtggcttccggggtgcgggcgagcttcaggaacgtgtacgggccgatgaacacgggcttggtgtcgatgcccagcgccttggcctcgttgaactcgtcgaacggcttggtggagttgagcttgatctccgcggccgactcgacttcgggcaccagatagtggtagttggtggtgaaccacttcttcatcggcagggcggtcacgtcgcccttgtcgccctggtagccgcgggccatggcgaagagcgtgtcctcctggttatcgaaggcgagacgctcgtaacgcttcggaatcacgttgaggaggatggcggtgtccagcatctgatcgtagtagctgaagtcgttgctggggatgaggccgatgccggcggcctgctgcagcttccagtgcttggcgcgcagttcggcggcggtggccttaacggcggcgaggtcgttggcacccttccagtagccttcgatgatcttcttcagttcgcggttctgcccgatgcgggggaagccggagacggaagtcagagtggacatgaatcctccaatgtatgcgttcgtaacccgacttagggtagcaaaacatccggattccaccccttataaatggccgcagagtgtcgttatagatggaatttatatccgctttagtcgaagtctttcacattgatgaccgcgagcagttcgccgctgtgcacctgccattcgtcgaacgatttgttcgatcccatgatcacgatggatgcgggcgaaagtcccaagttgagcaggtcgagtcgttcgccgtcggagtcggcggaggcgagccattgggcgctgatcgacacagtcggctcgtggcccactatcatgaacacgcggttcttggccttgacgtgggcgagctcgtcgaacaccgcctgcactcccccgtcatacaggctgatgcggtagtcgacgatcggcttgtcgccaaaggtcttgagcatgcggtccagtgtctggcgcgtgcgggtggcggacgagcaggagatctggtcgggcaccagtcccagcgactcgatgcccttgcccacggccttcgcctgtttcagacctttgtcggtgagctcgcgctccgagtcacccttgtcgccgaacggctcagccttggcatgcctcatgatgatgagaatatggtcgtatttcttcgccgctttggcgactttactcagcttgatgcccatccgtggctcccttcacgaaccgtctgcccggtgtggcggtgtggtgttgcttccagtatagaggtgtgtgagcgttcacaaactcatcgtcgggcggttattcatgcgtgttgccgagttctcccacctgacggtcgaggtcgcgcaacaccttacgtagtttgtggtcggagatgtcgcgcagttccagttcctcgatctgcgcctcacgctgttcgtcggtgagcgagtcgatgtcggtctgcgtgtccttggtcacgcgatcgcgctttctgagcgcctcgaatccggaggccatggcgcgcgagataacaaggaaaccggtatggccgatcatctggtggtcggggcgtacggcgaggccctgggccttccatgtgcgttcgaacgattcctggatctgcggctcggtccagcagccggccgcgcgcagggcttcggccagtcggctcatctgcgtggtggtagttacgtaactgaccaacacgccgccgggggcaatcacgcggtatgcctgctcgagtctgttccacgggtcgagcatgtcgagcatgatacggtcgaaccagtgttcgggcagttcggcggccacggagtcgaagtcgccggttttgagatcccaccagctgggggcttcaccgtaatacagcgtggcgttggcctgagccactttggcgaattcggggcgcagctcgatcgtggtcagatggccgcgctcgcccacggcgtccagcagattcacgctcatcgcgcccgagccggcaccggactcaagcacgcgcatgccggaacggatgtcgccgagctggacaacctgggcgatgtccttcggatacatgatctgcgcgccgcgcggcatcgacagcacgtaatcggccagtcgcgggcgcatcaccgcatattcccagccgccgatggcgcgcgacgacttccacggcttgttcttgtctttctcgggataaacctggttgacctgcgcctcacgcttggcgtgcacggtgaggatcacggtgccttcggtcttgccgatcacatcgtcatgcagaatcaggccatgctcggtctgcgtggagccgccagccacaagctgatcggtgatcttcttgcccttgcggtcggtgaactgcaccttctcgcctgcggtgagaggcccgcgcctcggctccataacttgctccttgcgtgctcggtgggtcaatcgctacaagtctaatgcatgtaagctcgttggtgaggtgatgacgatgcgaatgcagatgacaagccagatcgatgccggcggcaatgaccccattttcctgatgttccacggttacggcaacgacgaaagcgagatggtgcggattctcgacgccgtatatgcgccgacgcgagccgatgcggccccgtccgcaattgccgccgtacccagctatatctcgttccgtgccacctacgcgaggccctatatgggcggcaattactggtatcccgacggctgcggcgtggacgagcgccaacgcgaatgcgcggcggtcggggatgcggtggcttcactgctggatgcctcggcattcgcccatcgcaggaagatattgatcggtttctcccaaggcggttatctgtcgtatcgtctggtcaaggtgcatccgacgttgttcgatgccgcgatcctgctcagtccttcgttcatgggcgaggaacaggcggcgcttgactcccctacccgattcttcctggcgtatggcgcgcaggaccgcacgattccgatgcccgaccagcaaacggcccatcaggtccttgaacgggccgggcatctgacctatcgcgagtattccggcatggcccatgccatctgtgatgaggaaatcgccgatatccgggatttcctacgtaccatatgatgccggaatagcttcaatatggaatatctccgttcaaagaggtacattcgaccttttgcggaatgatatctccgttcaaagaggtaccggtccaagtagaagcggctcaacaatggcggaatggcgttggccgcgcccattcatcgcgcgatggttctgcgatcagctcaattcccctgccggctgatgccgcccttatgaccggtggccttgaatggcgtggcgcgtgccgtcaccttcggccccggcaga

SEQ ID NO: 2851 - DNA, 9083 bp, Unknown
  R36_18m  MAG No. k141_30613
attgtggccgatatgccactgaccgaacccgaacatcacgcgttcagcgcttttaaactggacgagggcgaggacattggcgccattgaagacgcaacattgcaaacactacggaccatacgttcggcataaccgagcgagcataaggaggtaatcccaaggttgattatgatgctgcggtcgctgccgtacaggatccgaacgcggacccgattctgttggcaaaaatcgcctacgagaatccggaattcggcgcaaacgtcgccgtaaatccgcgttgctaccccggcttgaagcgttggatcgccgaattcggcgatgagcgcgcccgcgagaccctggcgcaatacgggttcaccgccgaggcattcggcggcccggtccaggatcaggaagccccgtcacaggcggccctgcaggctgccgagcagcagcctgcagacgcgtacgccgccgaccagtacgccgctgctcagcccgctgccgaccagtacgcagcccagcagcccgcggctcaggcggcattcgaggagcctgtggccaccaatccttatggcttcaccgccgaacaggccctgaccaccaccgaccagatgcaaatcgcccagattgcccaatacgcgcctgaactacgcgcctgcatcgcccgtaatcccaacacctatccggcactgatcgaatggctgggccagctcggcgacccggcgatcaacgccgctttggcttcccgtcagtgaaaggacggcatcatcatggccaaacttccctaccctccagcacctgaactgggttggtattctgacgatccggtggaaggcaccccggattccgcagttggcacagccgaaccgcagaacgactacgggcagcccagcaccgcggaagcggcaaccaatgccgcttttaccgcagagcccgccgccactgccgccgctgagcccactgccgctccggtagacaccacaccgcacgccgccgaaaacgacatcgaggattgggacagcaccgtgctctcctcgtcgttcacttccaaggcaccgaagaaaacgtatctgctgcataacgatgtcaccggccagaccatcgtgatcgacaagagcacgttgctgggccgcaagccatccatggatgtgccgcagggtgccaaggccgagcgtatcgaagatccgacccgcaccacgtcccgtaatcacgccgccatcagcatcgataccgatggcgcgttgtggatcgaggactacggctcgttgaacggcacctacatcatcaccaatggccaggagacacaagtcaccaagggcacaccgctcaagctcagcgcgcctgccacggtgcgtatcggagaccagttcttccagttctccgaacagcagtgaccgctggactgtacaggccagcgataccccccccagatatcaataaaccgcaggtaacgtaccaagcaagctgtgagaacaacttgtacccgtacggtacctgcggtttattgttgccgttggcgggcggtcagtgacggttgctcggctatgcctataccgggctgggcggtcactgaccgctgagcgcagtagttacttgttcgagtccgacttgttatcgctggatgagctcgacgaacttgacgagtccgatgagtccgtagagtccgactccgagtccgacgaatccgaatcactctcgctttgcgacgaactgttgctcagatccggcgcgggatcgcccggggcctgaccgatggtcacaatcacgtctccgctggattccggactccacgccatccattccataacggaatggtcgcataccatggaatcatcatccaatggcaattgcgtgtacttgcccacggacttgccttgcgcatcaacgataatctgctcatccgtggtcttcacgtatatggtcttggtcagatagttgatgcccttgaaactgccgtcggtcagcaacagacgaccccactgcggcccatccaacacttccgtgggcttcagatcggacgacagcaggaacacgcgtttgctttcgttgccgttaccatccgtctgcacgtagagggtgccgtcggagaattggtcaatggccttgacgtcctcatccttgctcagtcccagcacgtcttccaacgattgccgtttgccggtcgtgctatcgatgacaaacttgccgctatacgaatcatcggtcacatacatgttcttgccgagataccgcattcggctcaaatcacaacttgagtagtccgtatcgcagtaattcaacgggaaactcatgatttccttgttgtcttcgaccgaatacaggtggtacgaattgtctcgcaccatatatgcgtcgtacaagctcacgccgctcgcggaggcattgacctgtttcgcatactggtacccgccagaatcagtggtaagcacgattttgtcttggaaggtctgcaataccttggcggtatcactgtcatgagttacgcccatcacctgcgtgtggttgatggtcgctgagcgctcgtccttgttagcggtgtatttttcatcgctatgccacgttttcttgatggccaccatgttgcgggactcggcgagcaacgagtattcgtaaccctgctcatagtcgataaggttgtcttcctcggttcgcaggtcgatgcggtcagacagttcgccggtatcgagatcgacctcgtgagcgaacagatgcacgctttccggcgtggtgcccactgccttggttttcaccgcatagaacacgaataccgccggattatcgccgtacgtggcggcgacctggggctcggaatactccttctcccccgattcgagcatggatacgtggatttccttcgattcatccagcgccggcgtccagacgccgaaggcatactcgccgctgccgtccagggaatcacttgaggatttggacgacgaatccgaatcgaccgaggaatccccatcccagcagtggatgacgttcgagaccatcgcgccgccagtccacttccagtcactggcggagttgccgtcgcatgagaaatcggtcatcgtcacttcggtggctgccggcttggcgggctcggacttggtcttctgctggtctttggttgttgtcttagtctttgtcttaggtttcgatttggtggtgctggaggtagttgttggcttggcctcggccttctgatgcgcgttacgccagaatataaagcccgtgatgccgccggctatcagcgccactaccacaataatcgctatgatgattggcacgattttacggggctttttgccgttgttgccggcaccattgccgttgttgggcacgcctgcaccagttggcatgccattgttcgaggtcgggattcctgccggaggaacggcaccggcggcaccggcatacgctccgggtaccgggctgcccggcacctggccgccgggcattggaccgttcggactggaaatgcccggttgcggaatattcgtttgaggcgcattcggccgaggtacgctcggctgcggctgcggcacacccggctgcggaatcccgcgcgatgccactaccgtagcgtccgccggtaccggggctccgcaccgcgtgcagaacatcatattgtcaggaaccgcattgccgcattgtgcacatcgtttcatagttcttctcccccgctatcagcgtcatcgcttcggttcttctctgccttctattgtaggagagagatcacgaatgtgtcgtcggccagcgtgaaatcgccgccagatgccgcatattcgcaaccgccgcttgccagttcgcggccacctaccgcagtgccgttggccgaatgattgtcggtgatgcaaaaacgtccgtcatccagcatgtcaatcaccgcatggatacggctgacgttggtattgccgcccatgtgaatgtccgcggttttcgatcgcccgatggtggctcgtgtggcgtgcactgttattgctttaccgtcgcgcaatcgtgtgacggtaaagcctctggacttgtccgtgtagaggcgcagcatcgtctcgccttcgctgtcgttctcatcggcgcgcagtgctgtgctgacggcgctgacagggaggatagggcgaacgacgttgctagtggcgggaacgcgagcagcatcaacgttgttgacggtgtgagcaacgtgagcggcggcagcagcgttacccgtgttagtctcggccacggcagcagtagcggtatcacccgcggcagcggcagccgccacattggatgccacaccgcgggcggaatcttcacggatatattgttcgcgaacgagattctcacgagcgggctgcgtttcctgcttgcggggaagatttacggcaatcggcattgcaggagccggctgtgtcacgggcgaggccgacgttacaggagtcggctgtgccggtgccgcgtgtgctgccggcattgcaggagccgccggcgttgcatgcgttgacggtgccgcggaagtcgtcggcattgcggcctgttgcggcgtcgtctgaagtttaggcttggagctcaatactgtggcgccaaatcgcgtggcaccgaccatggtgccgtcagacactacggtcgcgccgaattgcgtctccgaaccattatcttcatgagtcgactgcgctgactgcgcttgacgcggctgaacagtgccgggcagcaaatacgccataaaatcatgcagagcatctgcattaaccagtgaattgcgccccaggaactcggcgagcgcacgctgatagccttgcacaacggcatcctcaagccgggtccggcgtgcatcggccaatgtctgcagcaaagtggtggcggtgttgcgatcgggttccagtcccagcgccggcaccaccacgaacagcggatatccctgtgcggagatatacacgcttttggggtcccactgcacgtacgacagcggcacgcgatgctcctcgcattgctccataacggacaataccgccacgagtatgcccacatattggccgccaggcactaccgacctcaacacgccatgcatggtctcgcaatgagtcacgtcgtaatagaagaggatttccgcgccattactttcaaaccggaacggcagcatataccaatggccttcagcaagccattgtgcctgcccaagatccaacgactcgcctcgcgtggtatgtatggtcagcgtctgagcccccgtacgccgatccttaacagtcttcgctctcatagcacttaagtctagtcctgtaccaaggccaacgctttgcggagacgcaaaactcgtcaacacagtaacacaactccggctaagtaactttaccaaaaaactaaaaattggtaagataaggttaccagttttcctcaatattggtaaggtagcattaccgttttcttgaaaggcacattatggcaaatccgatcatcgccgaaaagctgcgcgattttagaatcgaagatttccacccgattgtgccgcgcgacttggatctaggtaagccactgaccccgagagtaggcaatctggtgaaggtcatcgtaggcatgcgccgcagcgggaaaagctaccgcctattccaagagatagaggccctacatacatccggtgtcagctggaaccaaatctgctatatcaattttgaagatgacaggctcggcgacatcactccaagtgtgggcgatgaagtaatcgaaaccttttgctccatgcatcccgaaagcctagacaccggcttgtacctgttttttgacgaattacaggaaatgcagaactggggcgcttggctacgtcgcatcgtagacaccacaaaagcaacgatctatgtcaccggctcttcctcgaaaatgctctcaaaagaaatttccaccgaatttcgaggccgagcattggacttcgagcttttgcctttctcattccgtgagtttgtccgcgcgcgcggtatcgccgaatcagaattgctcagccggaacgaagcagctggatattccaccaaagaacgattaatgctgtcggccgcattgatctcctacctggaagagggcggattcccagcaatcgagggactgccaacgcctcaacgtgtgaccctgctccagtcatatgtgcagcgtgtcgtatcccgcgatgtagtggaacgttatgacatcgcgcgtccaagagttgcctccgcattggcacgacgcttgcttggcagcaacggcaagccattgtctattcgcaagatagaaaacgaattgcgttcagccggactagccaccagccgtgtgctactgggagatttattggaatattttgaagacgcctatctggtgtttcgaatgaaagacttctctatgtcgctcaaagagagcaccacttccacatcaaaaatatacgccatagatcccgggctggccgcagcctcaagcatggcaagcgccagagatgatggccaacgattggaaaacgccgtttatctcgaactacgccgccgaaccgcaggttatcgtcgcgacggcatatcgtcatgccataccaaggaacatggctatgaagttgattttgtgatgggcgatgcactcgaacatgaacaatatgagctatatcaggtcacggcacgcatggatgataatcggaccatcgagagagaaacccgcgcgctctgggaactcatggccgaacaaaagctccatgaaggaaccatcatcgtcggcgatggaatcgagcgcgaataccgcaacagcaattatgtcatcaaacaagtgcccgcttggaaatggttcgttgcgcatgagccccggtaagcttcaccggccatgtcagattcctgagatggcaaccatgatggcaaggaatatgaacagagtctcgacccagatgagttcggcggaataccacatccagaacggttcgacccgcttgctggcgcattgacgggcaatcgccacttcgcttggcagcaccgcccaagccataaacagggcgaccaacaacagcacaaaagaaatgggcacccaaccgcattccaccagcactatgccgaacaagccgatgcttgccgcgattccaatgccaatcatgggctttgccgcaccctgcctttgtctgcgaggaatcacggcgaacacgaaagcaatcacggcaaacacaatgccccctaccactgcgggccacatcccaactaccgtgtccgattccttcaacgggccaggcacgccgcttcccgcgaaatgatcgatcacgccgtcacgtacgccacgcatatagaggatcgttcggcccaaaccggcacccagcatgcgcgaagtgccttcccagaagcacagcatcatgatgtgaaacaacgtgcgttcacgtggccagatgaacgcgggcaagaccaacagtatgccaaccaccggcaatacggcacacacgccggccatgaatcccaggaaatcgaacgagctaccatcgatgcccagcacgcccagccaccacggatcaaacccgatgctcaggctcatgttcacccaccatgcctgtgccaacatatccgccacagacaaagcggcaagcacgccgatccgccaatacacgccgcccatcgcatacactggaccggcaccgtccggcaccacacgcatgtcgtcatcgacataccgcagcacaccaagataacgccccctgcccgaacacgtcatagccacgcgccacaaccccatgagccgcacgactcgacggcaacaagccaaccacaacaggcaaaccagccaacgcatccctcaaaccacggacacacccgacaaaaccctcaccgtcaacaaccacagcaacaccctccataccaacatccgaacagcaaacacgccgcacccacatcacacacccgtggcggccgcgtaggcaagcagcatcaacatgacgaaatcaagcaccaggaaaccagcagccacaggctgccacgaggcatcacgcccctccaagacacaacgccggatcgcacgaagctcaccgggaatccagaacaacaccatgccgaccgccatcacggaattcacccagaacaactgattcgcatcggccgggccgacccacaacatgcccattaatcccaaaccggcaaccacattgccacccacacgcacacgcggggaaacacccaccccacgcaacaccacaagcaccacggcaaccaccacggcaaccccagccacaaccaaaccaggcaccaccacagcaggagaactgtcgtaatacagtctgtccggacgtccagtcgtggagtcaatcaaactttcgacatggggaccatacatcgcatacataacggtctttccaatctccgcgcccacggcaccggcgacacactgaacaatcagaacgtccccggcaacagcaatccacggcttgcgcataacatgagcagccagccacagcaatagtcccggaacaacacccacgtcgaaaaagaccgccacaggccaccaatcgctcgacaacgagataccggccatctgcaggaaccacacaccacctctagcggaatcacgttcgaagaacgcataccgggcttgcaaacctacctgcgcaaggaacagcacaaaccacacgatagtccacaaggcaacccccaaacgagtgaacacacgcctgccacccacaggaatgcacatgtcgatgaactcgcccaacgcgccattcgccagaacacgattctcaccgccgacatcagaaccgccagcctcggcatcaccgcccacaccagcggctccacgctcccacggtggccgaccaccacttctcaccatatcaatcacctctccaccatcaaggaacgaatcgcggaacccgcataaacaaatccttcaccggcattgttcaccgcatccgccgcatcattcaactgggcaagccccggaatgaacattttcgccacatcccatggacccgatgtctgccgcccgtacttgacctgatcaagtacgaaatcatgcgcatggccagccagatcgtcctcgaagccatccggcaacggaaccagcggattcttccacatccggaaatccgcaaccagccacttcaactcctcgacataccgtcgctcatccaaccgaatggacatccccactcaccctcctttgcactacca

SEQ ID NO: 2852 - DNA, 20626 bp, Unknown
  R36_18m  MAG No. k141_30695
acgcacgctcgcgtggctggtcgcagaactgaaacgtcgtggtgccgcttccgtggaggtcttcgctttgctgagcaagccttcccgccgagaagtggacgttgatgtgaagtacgccggctatgagattccggacgagtttgtcgtcggcttcggcctcgactttgacgaacgctaccgcaacctcgattcgatcgcggtcctcaagccgtccgtctaccaaggagtgcaagcatgagcttcccgcaagggccgggtaacggcaataatccgaacccgaacaacaaccgtaacaacggcaacccgttcactaacccgttcaaccgtggcaataacgggaccaatggcaaaggcaacaacaacgagaaccgcccgatatggcagtccccttggctatggggtgccgtgctcgtggtcatggtcgtgctgatgttccagatgttcgccggcggtggcacgaagaccattgacaccaaagatggtttcgcgctgatcaatcagggcaaggccacctacgccgagatcacggacaacaagcaggtcgtccgccttaagctgaagaacgactacaccaagaaaaacgccgacaccggcaaggtgaccaactacggcaagaacgtgcagttctactacaccttcgcgcagggcgcacaggtggccaaggccgtggagaacggtgatctcgaaaagggctggacctcgaatatcgagcagaccagcatgctgagctacctcgtcacctcgatcctgccgttcatcatcttcttcgccctgttctggttcctgatgagccgcatgggtggtgccggcggcatgctcggcatgggtggcaagaagaacagcggcaagctactcgatggccagacccccaccaccaagttcgccgatgtggccggtgaagacgaggccgtggccgaagtcgaggagatcaaggacttcctcaaggatccgtccaagtacaaggcgctgggcgctcgtattccgcgtggcgtgctgctgtacggtcctcccggcaccggtaagacgttgctggcccgagccatcgcaggcgaggccggcgtgccgttctactcgatggccggctccgacttcgtcgaaatgttcgtgggtctcggtgcctcccgtgtgcgtgacctgttcgatgaggccaagaagaacgcccccgccatcatcttcatcgatgaaatcgatgctgtgggccgcaagcgtggctccggcatgggcggtggccacgacgagcgcgagcagacgctgaaccagctgctcgtcgagatggatggtttcgacaacgacaccaacctcatcatcatcgccgccaccaaccgccctgacgtgcttgaccccgcactgctgcgtccgggtcgattcgaccgtcaggtgggcgtggccgcccctgatctggaaggccgtgaggctattctgagggtgcatgccaagggcaagccgttcgtaccggacgtcgacctgcacatggtcgccgtgcgcacgccgggcttcaccggtgccgatctggccaacgtgctcaacgaagccgcgttgctgtgcgcccgtgccggtgcccagttgatcgacaaccgcgccatcgacgaggccatcgaccgcgttcaggccggaccgaagcgcaagtccaagggcatggctctggaagagctgcgcaacaccgcataccacgagggtggccatgcgctggtagccgccgccctgaacaacaccgacccggtgaccaaggtgacgattctgccgcgaggccgcgccctcggctacaccgccgtcatgccgacctccgaccgctactcgcagtcgcgcaaccaactgctcgaccagatggcctacgcgatgggcggtcgcaccgccgaggaaatcgtcttccacgacccgactaccggtgcttcgaacgatatcgagaaggctacgagcatcgcccgtacgatggtgatcgaatacggcttctccgacaagctcggtgccatcaagtggggttccgacgatgaccagaccactgtgatggacggtctgcagccgcgcaagtactccgatcgcaccgccgaagtgattgatgacgaggtgctcaagctggtggagaccgcgcacaccgaggcgtggaccatcatcaacgacaaccgcgagatccttgacgagctggtccgccagctgttggtcaaggagaccctgaacgagaaggaacttgcggcgatcttcgcgccgatcaagaaggctccggtccgcccggtgtggttgtccaacgaccgccgccccgactcggacaagccgccggtggagattcccgaaagccttaagcgctcggtcggcatgaagccggaagagtagacacgatgacgattcggcccgacctgttcatgtggtttctcacgtacgcaggccgggccgacgtcgttgtggacaatgacaagggagagatgagatgaacgaatatatagagtcttgccatcgggagaaacacacatacgacgaggaaggcgtgcgcgaggccgtacgtctgttcctgaagtcgattggcgaggatcccgagcgcgaggggctggtggaaacacctgaccgtatcgcccgcgcgtgccgcgagctgttcgccggtctgcaggcttccccggccgatgtgctggagaagcacttcgacgtggataccgacgaactggtgctggtcaaggacatcgaactgtattcggtgtgcgagcatcacctgctgccgttccacggcgtggcccatgtgggctatattcccgccaaggacggggtgatggggctgagcaagctcgcccgactggtcgaggtgtatgctcgccggccgcaggtgcaggagcgtttgacccagcagatcgccgacgcgctggtcgagtatgcgggcgcacgtggtgtgattgtggtgaccgaatgcgagcacctgtgcatgtctatgcgcggcatcaagaagtcttccgcccgcacggtgacctctgcggtgcgcggcatgctgcgcaatccggccacccgagccgaagccatgagcctcattttggataaatagtgtctactaagctccctcatcatagggagctcacttgggacctacatagaaggggaaacataatgactgatttgcaggcgttgcatgacactacgcacaccatggtgatgggtgtgctcaacatcaccgaggattcgtcctcggacggcggcctgtggctggacccggccaaggcggcacagcacgggcgcgacatgatggccgccggcgcggacatcatcgacatcggcgccgaatccacgcgccccggcgccaagcgcgtgtccgaggccgacgaattggtccgcatcaccggtgccgtcaagacattgattccggccggtgccatattgtccatcgacaccacgcgcgcatccgtggccgccgctgcgctgagcgagggcgcccagatcatcaacgacgtctccggtggcacgctggatgccgaactgccgcacgtggtcgccgaccacgactgcctgtacatcgtgcagcattggcgcggttggctcgccggctccaagggcgcgaaccccgatcaagacacctccgtctacgagcacggtgtattgaccgacgtacacgacgaactcatgcgccaagtcgacggtgtgctggccgccggcgtaaagcctgagcgcattatcatcgacccgggcctgggcttctccaagcccggcatcgagcacaacctgccgctgctgaccggactcgagaccttccgagccaccggatatccggtgctgatcggccagtcccgcaaacgcttcatttcggcgatgcttaccgaggcgggcgctgccggtgctgatgggccgatcatggcccagcgcgatgacgtgaccgcagccttgtccgccctgtccgccgaacatggcgcatgggccgtgcgcgtacacgacgtggccaaaagccgcgccgccgtcatcgccggcaacacctggcgcgaatacgcatgattcccctggctccctgttttggttgcttctaggtcttggctcccctcggacgaggggagctggcgccgaaggcgactgaggggagcatttgagcagaaagccttaccaatggacaccatcactcttaccggcgtacatgccaacggcacccacggtgtgctcgcctttgaacacgaacggccacaaaccttcgtcgtggacgtcaccctgcaccttgatctggccgccgccggtcaatccgacgatctcaacgacaccatcgattacggccgtgtggccaaggatatcgcggctgtcatcgaaggccctcatgtggacctgatcgagcgtctggcccaacgtatcgcggataagatccttgccgatgcgccggccgtcgcctccatcgacgtcaccgtgcacaagcctcatgcgcccatcgtcgtggcttttgcagatgtatcggtctccatctcgcgcgtgcgtgccaccgataatggacgcactgctgaagagcatgccatccataacgcggtggtggccttgggcggcaatgtgggcgaggtggaatccaccttgcgagccgccgttcgggagattgacgcgttgcctggcacacaggtgactggtatctcaccgctttaccgcacggccgcgtggggcatggctgacggtacgccggatttcctgaacgccgtggtggagcttgaaaccacaatgggcagccacgaattgctcgccgcgttgcaaaacatcgaagcgaaccatgggcgaattcgtgagaatcattgggattccaggccgttggacttggacattatcgactttgatggcatcaccagcgcggatccggatctggcattgccccatccgcgtgcttggcagcgcgcgtttgtgctggctccctgggcggcgctgaatccgaacgccaaacttgccggagcccatgaggggcctgtagccgatttgctggccgccgcaccggaccgtaacgccgtgcagctcgagagcgaagactggatgctcggcgggcatgcagtcaagcaagaatcagcgtcggagtcggcacccgtctcacgcaaggcgattatttcgctggattccacctcgcaggatgtcgaacggctgttccgcgaaaccatcgtttccatcgacagtgttcctggcaatcaggtacagggcatctcgccgctctaccatgtcagccatttcgacggcccggacgcgatgagcgcggtcatccaaatcgaaaccaagttgccgcccgccgacctgattgccgtattgggcagcatcgaaagtgttcatgatctggcagtcgatcttgaccttgtcgacatggaaggcgtgacttccgacgagcccaactgcagcattccttggccgtcggcccgtaaccatgcgtcggtattggcaccttggctggatatggacccgaatgctactctgggcggcgacccggtggccttccttttggccatggcaccggatgccggacaggtcggattgctatcggacaactggatactgtcgaacagttgagctgatggcagaaccagttacgaacggtaggctagaaaccagacggtgacggaccagtctccggcctcgaacagccgggcacggcagtgacgaaaaccaaatcaagatgaacagcccaggcgcgagggccgttcgcaaacagcaaacagcaacgcaacgataaggaggccggacatgaaaacacggcgaacaccatggtggcagtatgtgatcggtgccgtgctgggcctgttggcgggtatcggtctggcctcctacggcgaaagctcgggactgtcgctgattggtgcgccttggattgtgaccggattgctggccgtgctgggcgttatcgtgctgatcttggccctgcaagtgcataaatacgcgaataccgaccccaagaagcgtctgcatagcttcatcaatcccactatcgcggtgtatacgctggtgctgtctaaggcactgggattggcgggcgcaacgctcgccggctggtatggcggtcagattgtgatgagcctgagccatatcgaggcggatttctatgcacacgccgtcaccgagtgcgcaatcgtggccgtggtgtgcatcgccgacatgatcatcggcattatcggcgaatggttgtgccagttaccgccgaacgaaggccccgaaaacccgaaaatcaaggaagccaagcgccgtagcgacatagcccaggcctacaagcgataatccgtgataagccccctctgacgagggggccgtaggcgtagccgactggggggagagaagaagaaaaaccacaccatcggccaagccgattcccactattcctgcggcacgcgaaccatagcttcctgagcgatggccgccaccaagtcgccattctgcgcatacactttggcgatgccgagtccgcgcccgtgcgcggcgataggcgtatcctgcacatacaaatgccattcgttgatatcgatatcctgataccaccacatcgaatggtcgatggacgcataggaaatgcccggtgtggaaatcgacagtccggcgcggcgcagcaccggctccatcatcacctgatcgcagccgagtgccagcatcgcacgatgcatgacctgcggcacatcgacgtggccatcggccttcatccacaccatctgcttgccggaatcatgctcggcggaatccttgtctgcgcgcagcatcacggtcggcgtcacgtggcggatatcgaatggcgatttctcgacatagaaattggcgaacggcgacttttcggcgaacggctgcatgagttccttggcggaagtcaacgtttcgggatcgggcaggttttccggcatcggatcggcaaattccacaccctcctgaccggtctcctggaaggaggcgatggccgtgagaatcgacccctcggcttgggtgacgttgacccgacgagcggagaacgagcggccgtcgcgaaggttctcgacgtcaaacagcaggtcttgacgaatatcgccggcggcaatgaaatagccatgcaccgaatgcggcaggcgtgaagggcccacggttttggacgcggcgatcaccgactgggcgatgacctggccaccgtagacgcggccggtggggaagtacatactctcgccattgatgtatgtgtgattgcggtaagcggaaggctcgcccaacttcagcaccttcaccagatggtccaatggagttacggtggttgcctgagccatggcgttcctcgattcctgttctactgtgttcgatattcggttatcgtattccaacctatggttggcagtctatccggtgggggttaagagttccgggagcgaaatgtaacgagactgtttggaaggtaaacggttggttatgcggtgcgttgccgctacgttgctgctgcactgccggtgtgttgccggtgcgttgccgtaggtgactgtgggattttatgggatgcggggcggtcatgggggcaattatgggaaagccgcccctgagggacggctttcgacgtataaagcgcgttgtggcactaatgccggcgtatctcagccgcgcacaagcttcttgtgcaggcggtgcgggcgggccgcatcctcaccgagtcgggccaccttgttctcctgataggcctggaagttgccttcgaaccagtaccacttggccggattgtcgtcgtcgccttcccacgcgaggatatgcgtggcgacgcggtcgaggaaccaacggtcgtgggagatcaccacagcgcagcccgggaactcgagcagcgcgttttcgagggattccagggtctcgacgtccagatcgttggtgggctcgtcgagcagcagcaggttgccgccctgcttcagggtcagggccaggttcagacggttgcgttcaccaccggacagcacgccggtcagcttctgctggtcggcgcccttgaagccgaagctggccacgtaggcgcgggtcggcacttccacgccggccacctcgatgaagtcgaggccgccggacacggcttcccacaggttcttgttcgggtccaggccttcacggttctggtccacgtagctgattttgacggtgtcgccgatcttcagctcgccgctggtcagcggctccaggcccacgatggtcttgaacagcgtggacttacccacgccgttcgggccgattacgccgacgatgccgttgcgcggcagcgtgaaggacaggtcgtcgatgagcacacgctcgccgaaggccttgtggatgtggttggcttccagcacggtggaacccaggcgcgggccggccggaatctgaatctcggagaagtcgagcttcttgttgttgcgtgcctcgttctccatctggtcgtaacgttccaggcgggccttgttcttggcctgacgggccttgggggaggagcgcacccagtcgagctcgctcttcagtcgcttggcgagcttggcgtccttggctccctggatctccagacgcttggccttggtctccaagtaggtggagtagttgcccttgtacgggtacaggtggccgcggtcgacctcgcagatccattcggccacattgtccatgaagtaacgatcgtgggtgacggcgatgacggcacccttgtactggtgcaggaactgttccagccacaggatggactcggcgtccaggtggttggtgggctcgtcgagcagcagcaggtccggggcctcaagcagcagcttgcacagggccacacggcggcgctcgccaccggagcacacgttgaccggggtgtccggatcggggcactgcagggcgtccatcgcctgctcaagctgggagtcgaggtcccagccgtcggcggcgtcgatctcggtctgcagcttgcccatttcttccatcagcgcgtcgaagtcggcgtccgggttggccatttcttcaccgatctcgttgaatcgggcgaccttctcggcaatcgggccgaacgccatcttgatgttctcgcccacggtcttggtgtcatccagcggcggctcctgctgcaggatgccgaccgtgaagcccggggtcagactggcctcgccgttgctcacggtctccaggccggccataatcttcagcagggtggacttacccatgccgttcgggcccacgacgccgatcttcgcgccgggcaggaagctcagggtcacgtcatcgagaatcacgcggtcgccgtaagacttgcgggccttgatcatctgaaacacaaattctgccatataagtgtcttatcctgtcttatcgttgcaatttcaacgttttgccgggcttggattccgtgatgacacactgtggaacgatgcgtccggtttcgggggttccgaacgacccgtttgatgccgcccgtccctggattttccgtgtcatcgcggcgccttggtcctacgcaaaagcaccttgtggattattccatatcccgtctacacgatgcaatggggttctggcgggcgggaattagcgattcggtcatcgggaggagacgtggaaggcggcggcgatgccgtcaatgccgacgccggtaaatgggcgctgggcatgccctgtttcctgagcgagagcccggccctgtatcgtctggcgatttgtcgatcgttgcgattccggcgttctgccgggctttcatttcgaaatgacgcatctggaatagcgcggccgtctttggtgctcctctcttcagtgatccgccgaggttacgcccatggctgaacgcccggaatgtcccgcgaaatccggtgagacggtctaggccgcggatgtaccgtgaatggcgcataggcgtgtcggtcgccgcaatcatggcaatgagaggaaaccccgttatggatcatgcatcccgatctcagcatcagactcaggccgatgcgtcttcgatctcttcaacgaatccgacggcctcgtcgccgctgcccacccaggcgccgccgtggggcgcgctgtgggtgatggccctgggattggccatgatcgtgctcgacagctcgatcgtcaatgtctccatccccaccatcatcgacgacatcggcattaacctgaccgacgcccagtgggtcacctcgctctacaacatcgtgcttgccgcgttgttgctgcctttcggcaagttgggcgacgccagagggcgcaaactggtgtttcaagccggtaccgtgatcttcgtggcgagttcggcgctcgccgccgcctcgcagggtgcggggatgctgcttgccgcccgtgtgctgcagggcatcggaggcgcgatgatcatgccgaacaccctgtccacggtgtccgccctgttccgtggcaagtaccgtgccgcggcgttcggcgtctggggcgcggtgatgagttcggccgccgcgcttggtccgctgctcggtggcgtgttcaccgagaccttgggatggcgttggatcttcctggtgaacctgccgttgggcatcgcggtctttgtgtcggccatcttcctggtgccgaagaccggtgggaacgcctcggtcgccggtgccgcggatgccgcgcaggatgcccgatcccgtcgcgtcggtgtggatatcccgggcgtggtgttgtctgccctgacctcggccctgttggtgttcggtcttatcgaaggcgagacctacggttggtggaagcagacctcaacgcagttgaagctgggcgggttgagctggaatcgtgactggttgtcgccggtgccgatctgcctgatcgccggcgcgcttctgatggccgtcttcatcgtcttcgaatccgcgcggggcaaagccggttggccggtcatgctggacatgaccctgttccgcatcaagacgttctcgtggggtaatctggcggccgcggccatcgccgccggcgagttcgcgctggtgttcatgctgccgttgtatctcatcaacgcccgcgggctcaacacgctgcaggccggtgcgatgctggctgtgatgggcttggggtccatcgtcgcaggtgcgcaggcccatgtcatggccgccaggctcaccccggccggcgtgatccaactcggtcttgtgatcgagatcatcgccgtcgccctggtcgcggtccttatgcctgtggggttctctgtgtggtggcagcttgttcccatggccgcgtacggtctgggtctgggcttcgcctccgcgcagctgaccagcgtggtgctctccgaagtgccgatcatgcagtccggcgaagggtcggccacccagtccacggttcgacagctcggcaccgccgtcggttcggccatctccggagcgtcgttggccatggccgtcaacggaacattgccggcgcggctcgaatccctcgggctgcccgccaaggtcggcgacggtctggcccaagcggtcagtggttcggcgggtggagtgatcggcgtgttccgcagcggtgatggaccggcggcccgattcggcgacgaggcgccgaagattgccgatgcgatgacttcagggttcgtcgaaggcggtcagtggacgcttctggtcgccggcatcatgctgttcatcggtttgctggcctcggtggccgtgcgtcgtgccgcgtcgtcgcacaacgtgcgttgacgcatgacggctacggtcttatggggagtgcggccgtgcgcggtcgaacgatatggtccgcataccgtccaccacacctgcggtcggttcgccggtggaaggaacgatgtatcagacggcgtgtcgtaatccgatgatgctgtaacatatcctcttgtgcctcagcgaggcacgcacggccccgtagctcagttggttagagcgccgccctgtcacggcggaggtcaccggttcaagtccggccggggtcgccaccaaactcccgatgcatgtcgggagtttttttgtttcctgccgttcttcgatgccatccgcaaggacggtgaaagtgattgcatccgattcgacacgccgtccgcaccgatgccggcgttaagggggcgcccgtttgcaacgggtgaaatgcatgaggaagcgcatcggtggaatgttcgcgacgcatgacaaaccacggaaaaaccgcggtgggaggtcatggcggctcgctactattttcgctatctcgcatgttacgaaagtcttcaaggagtaagccatgaccacgctcgccattgatatcggaggaaccaagatcgccgccgccgtctgcgatgaaaatgacagcatcatccagcgctggcgcgtccccacgccgatggacgccgacgccatcaaccagcacatcgccgaggtgtaccgcgaggctgtggccgccgggcacaccgatatcgaggccgtcggcatctccgccgccggcaatgtgagcgcggatcgcaagacgctcaccttctccgccaacattccggcatggatcaactacgatctgtccgagcacgtcggcgcgctgatcgaccatgccgtgccggtcatcgtcgaaaacgacgccaactgcgccggatggggcgaattcgtgcacggcgccggccagggtagctccaacatggtcgcgctgaccgtgggcaccggcctcggcggtgccatcgtgatcaacggccagctctaccgcggctccttcggcatggccgccgagctcggccacctgccgatggtcccggacggcgaccactgcggctgcggcctgcgcggctgcgccgaacgttacacttcgggaacctcgctggagaacttcgccaagtccgccgtgcgccgtcgtcctcaggacgccaagcgtcttctggaactgtgcggcggcgacatcaccaaactggaggggccgatggtgtcccaagcggctcaggaaggtgacgtacttggcctgtatgcgttcggcaagatcggcgaatggctgggccgcaccatggccgccgtttccgccgtgcttgacccggacctgttcgtgatcggcggcggcgtggtggccgtgggcgacatcctgctggagccggcccgttacaactaccagcgtttcctagaaggcagcgcctaccgcggccatgccaagatcgtcgcggccactgcgggccaggatgccggtctgatcggcgcggccaacctggctctgcgctgacgatgtcgctccggcaacgggacgttagtctaatggtgagtcatggccggtgccatggctcactgccgcgctgatagtgcggtcgatgagtttccgctgcctgaccatggaatcgaattccgggttctcagcgatttcctcgtactcgtgttcggtggtcacgccggcgatttcggcgataatctcctcataggacgtttcgacggttcgatgcacgccggtgacgtgcccctgacgtatcacgacaatgcggtcggataccgcgaacacatccggcagatcgtggcagaccatcaccacggaccggccttcggagcgcagtctcttgatatatgcgagcacttccgccgactgcatcaccgacagtgcggtggtcggttcgtccagcagaataagctgcgggtcattgagcagcgtgcgtgctatggccacggtctggcgctggccgacggataaggatgcgataggggagccgacccgaatcgccgagctcagggtcttcagcacggaacgggcacgcgagttcatcgaatcgtcatcgcgtatgccaatctgattgatctccttgccgaggaacaggttcgaggccacgtccaggttgtcgcagaactcctgcccctggaacaccgatgcgatgcccatgcggtccgcctccctgatcgagggaatggtcacctgttcgccgttgagatagatatggccgaatcccggctgcagaaatcccgcgatgaccttgatcagagtggactttcctgcgccgttatcgcccacgatggcgacgacctcctggcgttggatggacagattcaccgatttcaacgcctcgacgaagccgaacttcacacagatgtcctccagccgcagcagaggaggtgtgctcgaattcctcatggtgtgttccttcttctcactcttctcctggtaccggtcactggctgacgtcattgcgaaccgagaactcgatggcgcataatgcgccgcctagcgcgcaattgtcgtccgggtgggatgacacgagtacatcgatgggtgccacggcatcagggaacagcatgcgctgcaacgcttcattgaacggttggatgaatacgtcgccggtcatggccagcttgccgccgagcacaatgacctccggatccacgctgatgcacagatcagccgccacctgaccgatacgcacggccgtgtcggcgatgatgcgacggcaaccggggtcgccttcgttggcaaaggacaccagatcatccagcgtcatattgccgtgtgtgacgctgagcaactgcaccagcctgttttccgccacgacggtgtcaaggcagccgcggttaccgcacgaacagatggcgcccagcgggtcgacctggatatggccgatttcaccggccaggccggtcacgccatgcatgatttcgccgttgatgacgatgcctgcgccaaccccgtcgttggctgagatatatacgaaattgcgtttgcctgccgccacgcccatacgggattcgccgtatgccgcgaaattcgcgtcattatcgacgtatacgggaacgttgaacgccgtgcgcaacggggccgtgatatcgacgccgtcccatccgggcagaatgccgggaatcgctatggtgtggtcgttggtggccaccggtgcggccacggccacgccgatgccgaccagctcgctggtttcggcgtcgatgctgctcagggtctcattgatgagcagcatggcgcgttccagcgttgtgtccgccttgtggcccaacggcagggggagcgtgtgctcagcgatgattgacttcgagaagtcaacgatagaaagcgtaagatgacgtcgcgcgatccaaagcccgacgccgaggccctgatgccgtgcaagggtcaccagagtggctctgcgaccgttgcgaacggtgtttttggtctccagctggtcttcgtcgacaagctgatggacgagcgtggacacggtcgcagtggacagtcctgtcacctctgccagttcgacctgtgtcatggcgccgaacttgtggatgctggccagcaagttggcgcggtttgcctcgcgaagcgaggtctgcgaaccgaaaagccttgttgccataagagttcagtgtagtcgttaccggcatgaggcacagcgaggcgcagagcgtggatttttcggcgtgtcgccttgtgatgcgcgaaaaatcgccattgcgttcattggttgaacataaacgacgggaaattcgctttcttgagtttgacaacttaactcaatacggtattctatgagatgaacctgaggttattctcaggttcgggcgaccaaggagggttcgccatcccctcgaagatgaaggagaacaaatgaagttcactaagaagatcgtcgccgtggtggcaggcgttgccatgtgcgcgggcctcgcggcctgcggtggcagccgtagcggccaggcaactggcggtgatgccaagatcgaaaagggcgccactatcggcatttcgatgccgaccaagtccgaagagcgttggaacaaggacggcaacaacctgaaggccaagctggagaaggccggatacaaggtcatcctgtccttcgccgacgataagccggcccagcagaacgctgacatcgagaacatggtcaacaacgacgccaagatcgtcgtggtcgcttccaaggacggcaccgcagtgggccccgccgttgagaaggcccgcgatgcaggcgccaaggtcatcgcctacgatcgactgatcatgaacaccgacgccgtcgactactacgccaccttccagctggagcaggtcggcgtgctcgaggccacgtggctcattgaccagctcaagcttaaggatggcgccaccggcccgttcaatatcgagctgttcaccggttccccggatgacaacaacgccaagtacttcttcaagggcgcttgggatctgctgcagccgtacttcgagaagggcgtgctcgtctccccgtcccagcacggtcagggtggcgtgaccaaggacttcaccgttgaggattggcagaagatctccgtgatgagctggaagaccgagcaggcgcagaaggacatggaatccatccttgactccacctacgcccacggcgagaagctcgacgcggtcctcactccgtacgacggcatcgcccagggtgtgatcaacgccatcgaatccaagcgtcccgacatgaagccgggcaccgactcctggccgtacatcaccggtcaggacgccatggagatcgcagttgccaacatcgccaaggataagcagggcgagaccgtgttcaaggacgtgaacaagctggctgacgccgtgtacgacatggtcgtcgagatcgccgagggcaaggaagtctccggcctgaacggcaagttcaacaacaacaacatcgacgtcccgtccaagctgcttgacccccagaacatcaccaaggacaacctccaggatctggtcacggccaactacatcacccaggatcgattcgacgagctgactaagtagtcctcatcaggcaatccgtaaacaaacacaatgacatgcggcgcatagccgatatgcgccgcatgtccatgaacacagaactgtgacgaggagtgatgacatgtcatcaaatgacaccatcttgacgatggaaaacatcacgaagacgttcggtccggtcaaagccctcaccgatgtgaatctttccgtcgatcgcggcgagatccacgccatctgcggcgagaacggtgcaggcaaatcgaccctgatgaacgtgctttcgggtgtgtacccatacggtagctattccggcaaaatcacctttgatggcaaggaatgcaaataccatactattaatgattccgaggccgacggcatcgtaatcattcatcaggaactggcgttgagcccgttcctgtccattgcggagaacatcttcatcggcaacgagcaggccaagggtggcgtgatcgactgggacaagacccgcgccgaggcgaagaagctgctcgatcgtgtgggacttcccgaagacccggataccagggttatggacatcggcgtcggcaagcagcagctcgtcgaaatcgccaaggcattgtccaaggacgtgaagctgctcatcctcgatgagccgaccgctgcactgaacgatgaggattccgcccacctgcttgacctggttcgtcagctacgtgacgagcagggcgtgaccagcatcatcatcactcataaactcaacgaggtcgccgccattgccgacaatgtcaccatcattcgagacggttcgaccgtcggtgtgatgtacgtgacgccggagacgccgctcgaccaggaagaactcatccgcaagatggtgggtcgtccgctgcacaacctgtacccgaaccacccctccaataccccgggcgaggaatacctgcgcgtcgaggattggaccgtgcatcatccgctcgacgcggagcgcgtgatcgtagaccatgcgaacatcaacgtgcacgccggcgagatcgtcggtctggcgggtctgatgggtgcgggtcgtaccgaaatggccatgtccatcttcggccactcttacggttccaacatctccggcaaggtgttcgtcaagggcaaggaagtcaagatgcccaacgtgcagtccgcgattgacgcaggtctcgcctacgccaccgaggatcgtaagggcaacggtctgaacctgctgcagaacatccgagagaacgcatccctggcctccctgaccaagatcagcaagggcggggttgtggacgacaaccttgagcgcaaggaagtcgaacagtaccgcaaggacttcaacatcaagtgtcatgacatcgatgtgaatgtctccaccctctccggtggtaaccagcagaaagtgctgctcgccaagtgggttatctcgcagccggacatcctcatcctcgatgagccgacccgaggcatcgacgtcggcgccaagtatgagatctacgaaatcatcgataagcttgccgatgcaggcaaggccgtcatcgtgatttcctccgagctgcctgagctcatcggtatctgcgaccgcatttacacggtgtcctacggtgtcgtcaccgacaatgtcgagaagaatggatttacccaggaatacctgatgaagggtatgaccaaggaaagggaggtggcagcctgatgagcgccgcaactgcaacacctgcaaagaaagaagaaaagaccggcctgctggccacggtcgccaacaatgcccgtcaatacggtattgtcggcgcactgctgatcatcgtcgtggccttcgagatcctgaccggaggtgtgctgctgaagccgaactccttcgtgtccctgatccagcagaacgcctacgtgatcatcctggccattggtatggtgatggtcatcatcgccacccacatcgacctttcggttggttccttggtagccttcatcggtggtgtgtgtgcactgctgatggaacgcgccggagtcaactggatgctcgccatcgtcatcgctctggtcgtcggcctgatcgtcggcgtctggcagggcttctgggtcgccgtcatcggcatcccgggcttcattaccactctggccggcatgttgatcttccgtggtctcgccaccgtgatcgtcggcgaatccgtgccgattacctccctcgaattccgtggcattgcccgtaactacctgcccaacatccttggctggtggggtccgttcgacggtctgaccattgtgctcggcatcctgtgcattgtcggctttgcctggagccagctgcgcaagcgcgcccgtgtggccaaggtcggcctggtgcccgagccgatgagcctgaccgtcctcaagattgtgcttgtcgcggtcgtcatcgccttcgtcacctacctgctggcttcctccggtaacgctgatcagggtggtaccccgatcatgctggtgatcgtcggtgtgctggtcttcatctacaacttcatcctgaccaagaccgtgttcggtcgccacgtgtacgccgttggtggcaaccgcaaggccgccatcctctccggtatcaacacccgccgcgtggacttcctgctgttcgtccacatgggcttcctgtccgcagtggccgctgtctgcatgctttcccgtctggcttccgcaactgctcaggccggtatggagttcgagatggacgccatcgctgcctgcttcatcggtggcacggccgtcaccggtggtattggtaccatcccgggcgctgtgattggtgcattcgtgatgggtgttatcaaccagggtctgtcgattatgggtgttgacaccgccgtggtgaagaccatcaagggcctcgtgctcctgctggccgtcgccgtggacatcatatccaagcgcaagaagagctgaccttcccctttctcctcctcgatgtgggattcgtgccggtgccgctggtgcggatcccacactgttatctgccgtcattcttgtaatcaaaggactttttccgccatgaaactcaccgcgcgctccacctcccgtatgtatgcattgacctgcttggcctgcgttatctggctctggcagtcactggtcgaggccaataacgatggctcgctgttcaattgggccactattgtcttctcgctgtgcttgctagtggtcatcggatggagtggttggaatgccgtcaccgggtggaacgccaaggaggctgaggccgccacggcgggtgccaaggatgatgagggcagcactgatcggtaacgtatatacggctgttgttgccgggaacatataggtcccggcaaacctgcagcgatatgtgcattgcaagccagggatcccctggcttttttatgccgaaacggaactcgacgcgggcgcgcaggtcgttgggtttgtctagagcctgcatatagttacttatggtaatgactattggtaactaattggaggttaggccagcgatgtgcgattcccgaaccgataccaagaccggcttgcttccggtgaatgaggtgcggagcctcctggatgtctgctggaaggccaagaccatcaccgaactgatgccggcattgccgaaaggtatgaaaccgcgctatgtccacgtgatcgacgccgtctggcatatcaacgaaccgaatgggcaagataccggcaccgcgcgcgtgggcgacgtcagcgcattcctcggcgtcactacgccgagcatcaccaagctcgtcggcgaaatggccgacctcggactcgtcgtcaaacacgccgatgccgccgatcggcgtgcagtgacgctcacgctcaccgaacgcggcttggatatccgccgcatctatgtggaggaatatcacgcgcatttgagccaactgctgggcggattgacctcggaccagtgcgaaaccacggtacgcaccttgaccgaggctctgcgactcatgcaggaagacttccaacgtcgtagtcagaatatctgaatgaatggaggagagaacaagatcgtgactcattccgcaacacagctgcctaacggcggcaagcaaccggtctccaacaaactcgtcatcgcggtcgtctcgctcgcgatcctgaccttcctcggcatcctatcggaaacgtcactgaacatcgcctactccacgccgat

SEQ ID NO: 2853 - DNA, 9793 bp, Unknown
  R36_18m  MAG No. k141_30824
agcctctcaaccgtgttccgtggcgtgcaagtgctgcaaaccgccatcaccggtttgcccatcaatgaaatcaggggaggcgtgaagctcgacacggtttcgtccatcgtgcttcagccggacgtgaaccgtagccgccgtgacttcctcgcggacatggtggcaagcatggtgctggacggcaacgctttcgtgcgtcttgtgtggttcggcggcgaggtggtgtcgtgcgaggtgctgccaccgtcgcttgtgaccgtgagcgacgatggaaccgaccccgcctctccgaaactccgctattcctatcttgggcatgattacacgtctgaccagatcgtgcattgcaagtttttgaacgtgcctggccggttgcgtgggcttggcccaatctcggcggcgcgtgaggaggtggaggccgcgcagatggcccgaacctacaaggccaagttctacagcgacggcagcaacctcaagggctatttgcagaccgaggacaaggtgaccccccagattgccaaggacgccaaggaggcgtggaaggccaccggtgaggccggcgacgtgaaggtgctcggctcgaaactcaaatacgtgccgctggacatgaaaccggccgacttgcagtttctcgaaacgcagaaattcgataccacgcagatcgcccggttgctcggcatcccggccagcatcatgcttgcggccgttgacggtagcaatctcacctacagcaacatagaacagtcgtggattgagtttgccgattacacgttggcggcttatgcgggcgagatcgaggagttgttcaaccgtttgttgccgaggggccgcacggccgcgttcgactgggacagcagccggcgcgcggacatggccgatcggttcaacgcctacaagacggcgatagaggccgggtggatggacgtcaacgaggtgcgcgcaagggaggcgctgccgccgcttatcccggcaccgcaaccggaaccacagacacaggaggctcagaatgaagcatgaaatcggattgaggggcgtgtgcctgagagccgccgaggagggcgatggccgcacgttggagggcgtggccgtgccctacgacagcattatcagcacatgggacggtgccgagacgttcgaccccgattgcgtcttcgaggaatcggaatcggccaagctctgctaccagcacggggagcttatcggccgcatcacaaacgcggaaccgcagacagacggcctgcacatcacggcgcatatcagcgacacgcagcgcggccgggacgtggtggccctgttgcgcgacggcgctttggactcgctcagcgtcggcttcgtgcccatcgaggacgagaccgacaagcagggcgtcacccaccgcaggcgcgtgcgccttttggaggtgtccgtggtgtcgtggcccgcctacgaggccgcgaagatcacctcgcagcgcgccgccgacggaacccacggaaaagtgtccgaaaccggaaaccagaaaggaaccagcatggacaatgacgaaatcaccgagaagctgaacggcatcatggacgagcagcgcagtctcaaggccgcaatcgccaagacgggcaaccatgagccggccaagatcatgggaagcgagtaccggacggcgggcgactatctccaggcgctctaccgtggcgaccaggaggccgtgcagctgatgcacgagtgccgcgacctgatctccaccggcgacaccgggaacaaggtcgcatggattagggatgatctgcggctgatcgagcagcgccgcaaggtcacgaacatcctgacccacgacaccctacccgacaagggcatgacgatggaatacaacgtggttgcggacgacactacagcggtggcccagcaggcggcggagggcggcgatctccagttcggcaaggtcaagttcggaacgaagagcgcggccatcagcacctatggcggctacacgaccctgagccgccagaccatcgagcgcagcaccacgcccatgctcaacaccgcgctcgcggctttgcgaaacgcatacgccaaggccaccgaaaacgccgtgcgcaagtatctttacgacaccatcgccgcgcagcgcgacgcgacgcagaacgcgaacaaaatcgacgcgcccgccgcgctcacggccatgaacatcgaccagtgggccgggctgatcatggacgccgccgaactggccgacgaccgcaacgtgagcctgacccgcctgggcgtatccaaggacgtcatggccgcactgatcaagctcaaggacaccggcagccgtttcttcgacctctccggcgacggctcggacacgctgggcgacttcgacctaacgggcatcgcgggaaagttcctgcgtgtgccggtgcagatgctgcccaaggccccggccggcaccgcttgcttcatcgacccggaggccgtgaccgtgtgggagtcgggcggcccgacacaactctcagacggcgacccgaccaaactcaccgaaaactattcggtctacggctacatggccgtggcggccacgcacccgctcggactcatccccgtcaagttcgccgcaacgtcggaaagcgtgtgacatggccgacgactggacggcctacgagcagccggtgagggacgaaatcaacgtgccatccggcgacgacgagcgcgtgcgccgcgccattcaagcggccatcggctacgtcaacggcgcgctgggaggccaaacagtggggcaggaggtcatgacggattgcgtgacctcctgcgccgccgacctctacaacagccgcgacgccagacttggcgtcatgagcgtaggcgacggcactttggagccgttcagggtcagcaccgacccgttgcgcagcgtatggccgaagctcaacgccgccggcgtgctcacagggagcgtggtgatcgcatgagcgaccggatagccacggaacgccaggagcttgccggcatggtggaggccgcgctgggcgagatcgggtcgttcgtcaccggcgacgtggccaaggcccggccgctgcctggcatggtggccgtgttcatcgagccccctgacatcgattaccccgtgtggggcgacagacccgaatgcacatggcgtctcgacctcttggccggcacgcccgcgacgcaggccggcgcgttcgaccccatcaccaaggccatcggccttttggccgaagccggcctgaacatcgccaccgcgcgccccgtcacgttttcccttgcgggtgcgggcacgctggcgagctaccagatcacactcaacccattggacatacaggaggaataaatcatggcaaccaagatccgcactctcggcgcgggcaagctgaacatcaccgacacgacaaacgcgcgtgacttcagcggcgacgtcatcaaggcgcagctggtcgcgtcgaacagcagcgaggatccggtgaacttcctcgacggttcgcaggagaccagcacgacgaccacttggacgctcgaaggcaccatcggcgacgacttcggctcgaactcgctgagcctgtggtgcttcgaccacgcgagcgagacgctgccgttcgagttcgtcccgaacatcaagggcggaatcaagtggaccggaaacgtggaaatcagccccgtgagcatgggcggtgacgtgaagagcaagaacacgaacgatttcagcttccccgtcaccaacctccagcacgagccttacacccattcggtctcccagtgacggacaaggcggcctatgtggtcgggcagaaacggttcgtgcagaccatgcgcaaggccggcgcggacatgcaggcgttgaagggcgtcaaccgtgaggccgccgacatcgctttgcgtagcgtgatgcagctcgtgcccgtcggcaataccggacacctcaagcagagcgtgcgcgtcggggcgaccatgaaggccggcgtgatacgcgccggccgaaagacggtgccctacgctggcgtcatcaactacggttggcccgcgcgcggcatcagaccacgcctgttcgtcaacaatggcgtcgcctcaagcgagagcatgtggcaacgcccctacaagcggttcatcgaacaaacattgaagcagatcaagggagcataaccatgaacgatatgaaaatcacctacaccgacgggcatgtggacgaggtgcgcacccagtcaccggccgtgctgacgcgcatggaggagcacgcgcagctggccggctggaagccgggcgaggcgagccagattcgcatgacgttctacgcggcctacatcgccgtgcgattgaagcagctcaccgaactgaagtacgacgagtggctggacaccgtggacaacgtgacccctctcaagcacgaagaggcggaaaccggaaaccctaccgtctagccgcatggcctgacgactcgctcggccgcctctcgtgcgtgctcgcccgcaacttcggcggcacgccatggcagtggcgagaggaggccagcgagcttgattggggcacgtgcgtggaaatcctgatgcaggaagccgaggaactggaggaagctgaaaatggctcatagcgcgataatgtccgtgagaatcacgggcaacagcgacgacgcggtgaaggcgttccagaaagccaccagcaaggcggcggcgttcggctcgttcatgggcggcgcggcactcaagggagtcaccgccctatgggacaaggtgagttcgttcggcagcgccgtgatggacatgagcgacagcaccgacaaatttgtttccacgatgaacttcgccggcatcgacacaagcaacgtcgaaaaagcatccaaggcggcgcgcgattacgccgaccgcaccgtatacgatctgtccaccatccagaacacgacggcgcagctggccgccaacggcatcggcgattacaccggcctgaccgaagcggccggcaacctgaacgccgtggccggcggcaacgccgacacgttcagatcggtggccatggtgctcacccagaccgccggcgcgggcaagctcaccaccgagaactggaaccagatggccgacgccatcccaggcgcgtccggcaagctccagaaggccatgaaggccaacggcgcgtacaccggcaatttccgcgacgcgatggaaaagggtgaaatcagcgccgccgagttcaaccaagcgattatgcagctcggtatgagcgacgtggccaaggaagccgccagcagcaccaagaccatggagggagctctaggcaacttggaggccgctatcaccggcgggcttacggacgctttcgacctcataaagccggccgtcactggcgcgttgaccgaagcgggcaatcagatcagccagttcagccagaacgccaccaacggcttgcaacagttcatccagggaataagcgacacgggagcgctccaagcgttttccgacatggtatcgagcattggcaacgcgctatccgcgttgggcggcgcgttcgccagcatcgccacgacgatagcgccgggcttgcaaggcttatccgacgctggcggcatcggcaccacggtgggcgaggcgttcaacgacgcggccggaatcatccaagcgctagcggacaagctcacacagttcggcgattgggtaagcgccaacgcggaacccatcagcggcgcgcttatcgccatcggcggaggtttcgccgcgttcaaggtggccggcgtcatcagcgccgtggtatccgcgttgcagggcttcaatctggcggctgaggccgcgtcaatcggccagtgggcgttgaacgccgcaatgaacgccaaccccatcatgatcgtggtcaccgcgataggcgctcttgtgtcggcgttggcgtggttcttcacccagaccgagacgggccggcagatatggagccggttcaccgcgttcctgggcaattgcgtgaacaatataatcgcgttcttccagtcgttgccgggccgtatcggcgcgttcttccagagcgcggctgacggtgcgaggaacacgtggaacagcgtcgtggattggttcaagggcttgcccggccgcatcctagacgccatcggaaacgtggggaatctgctggccgacgcggggaaaagcatcattgacggtttctttaaaggacttaagagcgcttggaacaaagtgaccggctggatcggcggcatcggcgactggatcaaggcccacaagggcccgatcagctacgaccggcggctgctggtgccggccggcaatgccatcatgacgggcttcgcgcaggggctgcaatccggcttcgactcgaccgtgcgcggcacgataggcaccgtcaaccggcgtctggcgtcaaccagcctcgccatcggcatggccggcgtctccggctccaccgtcgtcaacaagtacgagataaccatctccggcatcgtcaccgacccggacgcgaccgccaaacagatcatcaggctcatagagcgcagggaaaagagcagacgatgaggaaaccacacatctacctcgactgggacggcaacgaattcggcccgaaggaaatcaccaccaaccaacaagcgaaccagctggacgccctcatggcgatcaacggtttccgtatcgaatggggcggatcagaaccactcgaagcgccggaacccgacgttatgaaactcgaaatactcgaccggcacggctggtatctgaaggacatcacgagacttgccggaaccatcgtgaccgtaacgctcggcggcgagccgacatggggcgacctttcccgcgtcggaaagacatggggcaccatgccgggcacatggggcgatttcggcgaatgggtgctggacggcaaaaaagactacgattacagcagccccgtgctgttcaaaggccgcatgaacgcgggcggcaccgtcacgcgcaccgaaaacggttgggtgatcggcgcgaccgtcacgagcgacatggtcaacctcaaacgcgcccgcctcggcaacaaccggacgaccggcgacggatacaactggggcatgaactcgctctcacgcatcaacgccataacggactacctcgccaattcggccgccatgcccatattccaggcatacacgaaaaactacctgatcgccaacggcgcggactaccaccagcacgtcaaactcggctcatacccatcaatggccacgctgctggcaaaaagctacacgctgatgaaggacgggacgctgctccgattcacgaaccgcatacgcaactcatactcaaacggcaatgagcttgtcccagttcgattgaacgccaccgcgaccctgaccgccacgggcttcaccgtggcagacccctactgcggctacccgctgctcgacgccgaagactaccaggcgttgaccgtcaccggccgcgagatcgtatcagaccagaccgccgacatcccggaaccattcgaccggtacaccatcaccggcgcgatcctcgacaagcacgaattgaacgacgacggaatctatgaaccggaatacgtgcaatcggaacacactataaccgcaggcgacctcttgccagccaccctcgtggccggcgagaaaagcgaaaccatagaaaccgacttcatcttcgcactctccaaggaaaccgccgaagccttcggatacctgaaagtgttcgacccggaacccacacgaagaaagctcaaccaaagcaccgtcgaacaatgccgaaggctcatgccggacggcatcatcttcgacacacgccacatgagccattccagccactcgcagctttttgacacatgggccaaacccatccgcatccacaacaccatttactccgccctgaccgacgacaccggcataaaccccgtcgaggggtgctggtggatgatcggcggcacactcgcgtacaaggtcgccgacggccgcggaatctggacgcagacaccaaacctcataccgatcaccacaaaggagcagcaatgaaaaagacgcaaccctggggcatcacctacccggactcaggcgacagcatcaaccaagcgcccgcgcagatgcaggccatggccgaaagcatcgacacggccgtggggaaaatcgccaacaagccgccgatcacctacgccgtggccaaacaactcgaccccaaccaacagcccacggcggcctacaccgcctccgaaacgttcaacgggccgagaaccctgaatctcggaatcccccgcgccccgcgaatcaagggcgtcaccagcgaacagctcgacccggcacagtcccctaccgccgcaaccggcaccgacgaacacggcgattacagccttcgtctgggccttccccgtcaacgccgcctcactctcggcaagctcaccagcgtggacagcacccaaccggcggcgggcagcctcaccaccgacgcacacggcgaccagacactgaacctcacactgccgcgcggccgcgacggcgcgcccgccacgttcgccaccgggcagggcatcaaaggcaccggggccgccgacaaccctctaaccctctcaccgttccccctgaccagaatcaccatcacgcacggcaaaaccggaaccctcgccaaccagcaaagcatctacctcggctcagccgaaatcaaagcaagccagatcgtcgcgcgaatcagtttcgactacgggcttacctacagcgccgacgaattcatgttcacgacccaaacagtcggcaataccctctatttgtggctgacctccaccaggaccgcttcaatgccgatagacctcacctatctgtcacccgtggccataaccctcatcgacctgctggcagtgcaggaacaatagaaaggaaaaccaaatggacaaaacacaggcaatcgcaatgatcgtcaccctcacactcatcgtgggcgactacatcacaggcgtggccaaagccatcgccgcgcacgacatcaacagcgagaaaatgagaaccggcctatggcacaaagccacctacatcttcgcggtaagcctcggcgtcctgatcgacttcgcgcaacagcacatcgatctcggcttcagcgtgcccatcgccaccgccgcgtgcatctggatatccctcaccgaaataaccagcatcctcgaaaacctcgtggaaatcaaccccgaactggccgacagccctgtactagaccttttccacaccaacaaaaccaaccccaacaagtaaaggaacctaccatgtccttcgagtacatcaccaaatacaacagccccaactacacgccaggccgcccatacggcatcgcttgcatcgtcatccactggtgggacgaccccgccaagcatcccaccttcaacggtgttatctccaccctgtgcagtaagtcacgcggcgcatccgcgaactatgtcgccgaagccggccgcgtcgcctgcatcgtagaccccgacaaccgcagctgggccaccggcgacggagtgggctgcaacagcatgggcaacgacaagggcatcagcatcgaatgcaacccccgccagtcagacggcgactaccagaccatcggcgaactcatccgcaacatccgcaagacctacggcgacctaccgttgaaacgccaccgcgacctctccccaaggccaacgtcatgccccggcacctatgatcttgacaggctcgaccgcatcgcacgccatggcgcggcgtcgaacacgcccacgccaagccagccgtcaacggccggcgtggacctcaacgccctcgccgacgccgtgattcgcggcgagtacggcgtcggcgcggaacgccgcgcgaaactaggagcgaactacgacaaggtgcagcagatcgtaaaccagc

SEQ ID NO: 2854 - DNA, 3471 bp, Unknown
  R36_18m  MAG No. k141_31309
accaggtgcttgccggcgaatggttcgcctatggtttcatggacaccctgaagaacggcgaacaacgcaccagcacacgcggcggtcagtattcctcatgcacgtttgaccagaccaccggccagtgcgaggaagaccaggacgaggatccgttcttcgatccgctcgccacgcaaatcagtctgaccaccggcaccaattatcagggcgaccagtacaccatgaacatgtacggcggcggtggcggcacaggcggtgcgggtggcaacaccgcgggtcagtcggaaaacgtcacctttgatgtgcgggcttccggcattgtggcgggcgactacaacaagggctatgccacctccgacggtctggtcatggatttgcaggcgttgaaggaactggccgccaaagtcgatccagccgccgccaaaaaagccaccgcctatgatcaagtgctggtcaaggccgccgacctcaagtccgtgcccgaagtcgaatcacagatcaaagcgttgggctacgagacctcctcctatgaagacatgcgtaagtcgttggaagaacagtcgcgcgcgattcagctgattctgggcggtatcggtgcggtttcgctgttggttgcggccatcggcatcgccaacacaatggttatgtccgtaaccgagcgcacgcgcgagatcggcattatgaaggcgcttggctgctacgttcgtgacattcgcgtcatgtttcttgcggaggccggcgcgatcggattcttcggcggattgatcggctgcgtgctgagcggactgatatcgctgggcatcaacgttgtcggcgcgttgtatgcgggcggcatgagcggcggcatgtctggcggtatggtcagcggtgcaggcgggggctccggcgacggtgccggtggcggaacatctatctggaccatactctggcaggcgatagttggtggcgagaatgtgacccgttattcggtgattccgtggtggctgttcctgttcgtcgtactgttttccacgctgatcggcttgctattcggcttcggcccggccaataaagccgttaaaatcccggccctagacgccatcaaaaacaacgagtgatcgcctctgtcacctgctccaccgttagtccataacgttcgttcagttcgcccagcgacacgcggtcggtaaattccttggctgcgccgaagttcagcacacgaggattacggctgccgtccgagacatgatgattcgcatagtatgcggtcactttctcgccccagccgccttcaagctgcccgtcttcaagggtgatgacctgctggtggccatcacgcaacgactccagtacgtctgaatccagcgacgtgcactggcgcgggtcgataaccgttgccgtgatgccataatcgtcagacaatgcggcggccgtctgctccgccaacggatacgcattgcccagtccgatgatcgcgacttgcgagcccgtctgattgacccgccaatccagcatgtgacgcgcaccggcatgctgagccgttacgctaacggtcccgcggactgttgcggcagatatgcccccgctggcggagctggcggaggctggcagcgaagctgactgggggcggtcagcaatctgcccacccgtcaccggcagcagcgtcgcatcccgttccgccgccagaatcgcctcgcccggcacccgaatcaccgccggaccagcaggggcgtccgccgaaccggccggcgcggtagcccatgccaaatcagccagatagtcgcgagccgaagtcggcaccagcatcgtaacccctggaatattggagaacatcgtcacgtcatatgcgccggaatgcgtattgtccgaaccggacaagccgcccagaaaatcaagtaccgtgactcgcgaacggttcaggctcatctcctggaagaactggtcgtacgcgcgctggaagaaggacgccgtggtggccaccaccggcgtgccacccgcccgtgcgatgccggcagcgtacgccacggcatgcgattcggtgatgcccgtgtctacataatgtgcgcccgcgcgctctcgaaactcatgggtgatgccgttcgagcccggcgtggcgggggagatgaccacgagtcctggctcggcggcgaaacgcggttcgagcgcggccatcgccattttgccgtaatgcttgcgcggatcgtccggcttgccgattgcggcatccggattctgccaatgcgaggcctcgcactggccttcatgcggttcgtgatcggacaggttgcagtgatccgaatgccacggctcgctgtggttcacgttatcggtggggtgcacgccggtgggggagtcgagtgagaccggtaaggtcgaggcgttttgttgattggcgtgagtctcctcactgtcatatcccgcgcccttcagcgtgtggatatggaccaccaccggatggtcgatatcgcgcacttcctcgaaagccgcgaccagagcggaaacatcgttgccggccgccacataccgataatccaagccaaacgcgttgaacagattcggctgggcggtgccgccggacgcgcgcaggcgggcgagcggaccgtacatgccaccgaaatcgccggcaatcgacatctcattgtcgttgaacacaatgatgagattgccgccttgctcggccgcgttgttcagcccctcgaacgccacgccagaactgagcgaaccgtcgccgatcacggcgaccacattgccgatgccgctgcccggcccctccatgtcgcgggttttcgccagaccgcaggccaaggagatcgaagtgccggtgtgcccgagcacgaactggtcgtgttcgctttcgtcggggttggtgaagccggtcacctcgccgaaacggttcggatccatatacgcgccggcccgtcctgtaagcatcttatgcacgtagctttggtgggacacgtcgaacacgatacggtcacgcggcgaatcgaatacgcgatgcagggccaccgtggcctccaccatgcccagattggagccgatatgaccgccgtgttggtggccatacgccaacagcgtggtgcgaatctcacggcagagttcggcgagctcgttgggagcaagggccttgacatcggccgggctggcaatgcggctcagcagatgggagtcgtcgccatgggaaggggtaatgctcggggggatgtcgtgaaggcgcgcggtcccctcggcggcaccggagacggcgaaggaatcgcttgaatcaaatccgtttcctgacgcgttgcgcataccctcgaatctcccttcgctagtctttccgaagttgaatgctaacgcccggcattgtccgaggtccacatgacgaatcaatgcccccaacatctccgtaaatgggtgattcgttcgctgcgcgatgtgggacaatgaatgcggtaattccttttgataccaaggagcgcgcaatgaaggccgtatacgcatccaccgtca

SEQ ID NO: 2855 - DNA, 2514 bp, Unknown
  R36_18m  MAG No. k141_31545
atcaatgtagtccaccgggatggacgcttcgatgggcaggtcgatggtgaccgcgaccggctcggtccgctccggctccttgtactgttcgacggcttccgagaccatgcgcacgtacaggtcgaagccgacgccctcgatgtgcccggactgttcgtcgcccagcaggttgccggtgccgcgcagttcgaggtccttcatggcgacgtcgaagccgcttccgagcgccgtgttctgcgcgatggtggcgaggcggtcgtgcgactgctgggtcatcggcttggacgggtcgtacaggaagtaggcgtacgcgcgctcgcggccgcgaccgacgcggccacgcagctgatggagctggctcaagccgaaacggtcggcatggtcgacgatcagcgtgttcgcattggagatatcgagaccggtctcgatgatcgtggtgcacacgagcacgtcgatgtcgcgatgccagaagtcgcggatgatctggtcgagctgcttctcccccatcttgccgtgggcgatgccgacgtgcgcctcgggcaccagcgtgtggatcttgtcggcgatggacgagatatcctgcacacgattgtggacatagaacacctggccgcctcgcagcagttcgcggcgtacggctgcggtggcctgcgcatcctcgtaggcgcccacataggtcagcaccggcaaccggtcttcgggcggggtggcaagcgtggacatctcgcgaatgccggtcacggccatctccagcgtacgcgggataggcgtggcagacagggacagcacgtccacgttggtgcgcagggctttcagcgtctccttgtgttccacgccgaaacgctgctcctcatcgatgatgacgagtcccagatccttgaacttgattttcgggttcagcagcttgtgcgtgccgatgaccacgtccaccgtgccggtttccagaccctcgatggtctcgttgatctctttggtggtctggaatcggctcatggccgccacattgaccgggaaaccctcgaatcgttcgctgaacgtctcgtaatgctgctggacaagcagcgtggtgggcacgagcacggccacctgcttgccgtcctgcacggccttgaaggcggcacgcagtgcgatttcggttttgccgaagcccacgtcgccgcagatgaggcggtccatcggcacgggcttctccatgtcggatttgacctcgtcgatggtggtgagctggtcggcggtttcctgataggggaaggcatcttccagttccttctgccatggggtgtccgggctgaacgcgaagcccctggcgcgctggcgggcggagtacagcttgatcaggtcgtcggcgatctcgtggacgtgtttgcgggccttggccttggtggccgcccagtcggagccgccgagcttgttgagcttgggggcttcggcaccgatgtatttgctgacctggtcgagctggtcggtggggatgaacagtttgtccgccggggcgccgcgcttggaaggcgcatattcgatgaccaggtattcgcgagtggttttgttggcgccggtgccgatggtgcgctggcgcatttcgatgaaccggccaatgccgtgctgctcgtgcaccacgtaatcgccttttttgagttccaccaagtcgatggccttgcgccggcgtttcggcgttttggccacggccacggctgaagtgcggccggtcaggtcgcgttcggtgagcagggcgattttggcggctttgtccacgaagccgtcgatggcctgagagcggatgacgtcgaaattggcgatgccggtagtgttgatcgcgcgcctgagcctggccaaggtgccggccgcagcggcggtgatggtgacgtggaagccggcgtcgagcaggccttcgatgccttgggaggccttggcctcatcccctcggaattcggccgggttctgggcgtcgagctgcacatggccggtcagcgtggtgtccacgccgaaactggtgaggcgaatcaccggatgttcggagtattcgagggagctgatggtttccgcatagtcgaggaagctggcttcgtcgaagctgatgggcgcgccggcgccgtggccggaagcggccacatgccagctggcggccaggaactcgttcgcggtttttgccaagtcttcggcggaacggcgcagtttctccgggtcgctcaggaggatcacggcgtgcttgggcagcatggagcccaccggttccagatggtccacgagcgcgggcatcagggattccatgccttcgaccggaatggcgttggcgatggattcgagcatgtcctcagcattgggaatcgaaccgaccaaggctttggcgcgggcgcgcacggcgtcggtcagctgcagttcacggcatgcggtggcccagatggtcttgaggccgtcgccgtaggtacgctggtcggaggcgtggaattccttgatggtgtcaatttcgtcgccgaagaattcgatacgcaccgggtgcggtgcggtgggcgggaa

SEQ ID NO: 2856 - DNA, 2591 bp, Unknown
  R36_18m  MAG No. k141_32107
gctgggtcgacatacgtgattgacatcacacggccggtttcgttgtcgtacgtcaccgaggtcacggaggcgagcgccgtgtgccgcaggaacatccagtgctcggggtggccggtctccagataatggcgataactgaaaatcggcgattcgtggctgaccaccacaatctgctcgccggggtgctgggccaccttctcgcgggcgaagtcgtccatacgcgccgcgatgtgctgataggactcaccccagctcggcttgtacaggttggtgacgagcttccagttgccgttcttccacagcgcgccctcgccatggccgatgcgcttgccacggaactcgttgccggcctcaatcacccgttcatcagtggtgagcgtgagcgaagcctcgccacgagcctcgcgcacggggttcagcgcatcgagaatcgcgccggcggtctcgcgcgtacggtcgagcggcgaggagtagacggctgcaatcgtattggtttggggattcttggccaagtacgtggcggtggcttgagccatgcgatggccaaggtcggaaagatggaagtcgggcagtcgctcatagagcagatggtcggggttatataccttgccatgccggacgaaatggatggtggtagcgctcatgagccgcctttctgcttcccgccctgaagggcatgagaacgttgtcttaatatctccaatctaccgcgtgtcgcggagtggacacccgtagagtatccgtgacgcaaatatgcggatgggaaaatccgacgcaaactttgcgcgaccatggacaacacatcattcgatgagggcttcgccggcaacgccacgccagcgggggacatccaatcgggagcggaaaggagcgtagtgctgttatgtccaataactcgtccaactcgaactcgagcaccattctggccggcatcaaggaagtaggccacaaagtctttggtgggtatgcggaactactgcgcattccgcataccgcccgttattccatcggctcggtcatcgcctgcatgccattcccgatggtcggcatgaccatcaccatttccgtacagcattattacggcaactattcgctggccggcatgctcaccgccattcaggcgattgcgctggccgtggccacgccgctgctgggcaagctgaccgacaagttcggccagaggcaggtctcgattccgacgattatcgtttggattgtggccgccatcgcgctggtgacggcgattaccaaccgcgcgccggaatgggtgctgtactgtctgacgccgttcctggccgccattccgccgtggggcgcgatgagccgcgcgcgctggaccaagattcttaagggtgaccgggagcgcacgaaccgcgcgctgtcgctgtgcggcgtgctcgacgaatgcatgtgggtgatcggtaatccgctggcctccacgctggccgtgatctccggtttgctggcgttctcgttcaccggcatgtgcgtggtggtcggtgcgctgatgttcctgaccgagctgaccactgagccaccgtcgcagaccgcgctggcgcgtgccgagggcatctcccgcaaggaataccgtgagcgcgaggccgccaaggctgaggcgctgaaggtggaaaccgccgccgaggagacccgccgccgtcttgagcgtgaaggcgtgaccgatgaggccacgattaacgcagccattaagcaggcggtcgccgatgcgcgttcgggcaagaaggcgtccatttggggtccgggtctgattgcggtgtgcgtcacctggttcggtttgggcgcgttccagtcggctacgggcatctccatcatcgcgtttgccaccgaagcgaatatgaagcagtacacgggctttgtgtttgcctgcttctccttcagctcgctgatgggcgcattggtgtatggcgcgaagaactggtcgattgccctgtggaagcgcttctacttctgcctggccgtggtgaacatcggcatcagtacgttcctgttcgccaagcatctgtgggtgatcatgatcatctacttgattattggcgtatgccaggccccgacgtggatcaacggcaaccagctcatgttgcatctggtgccgccctctcgcttgaccgagggcatggcgtggatgggtgcgatgaattctatcggctcctccgccggttcggcgattgccggccagttcatcgaccgcatgggctcgcacggaggcttcatggtggtgaccaccttggcactggcctcgctggtgattgcactgatcggcttcaagcagatcaagggctccaccgagcagccgaccctgactgaagtgagtgtgtgagacgtatgctaagccccctctgacgagggggcttagcatacgtcaaaacgctacttcggccagcctttgggcgtgtgctccaaggaccagatgccgagcttgtgggagaagctgttctgccacttggcttcaagctcctcggcattcagtcgattttcagcggacttcagacggttcatcgcattggtgtgcgtatcgtcgagcagccacttgcgaatcaagaagttccagatcattaccacggcagtggccacca

SEQ ID NO: 2857 - DNA, 8137 bp, Unknown
  R36_18m  MAG No. k141_32166
ccatacctgtcaagtctagcccgcagatggaatcccctacgaattcggcagtctcaggccgacaattccacccgacgacttaagctgaaccgcatggcacattcttcacgtatgacgtcgctgcagcgccgcgagcagctgattgaagtcggacgctcgctattcgccgccaaaggcttcgaagcggtaagcgtggaggaaatcgccgcgcacgccaaagtctccaagccgattgtgtatgagcatttcggcggcaaagagggcctgtatgccgtcattgtggatcgtgagatgcgcgcgctgaccggtacgctgaccgccgcgctcgacgatccgaccgtgcacccgcgccagattgtggaacgcacggcgcttgcgctcctcacctatatcgaagagaatgccgaggggttccaggtactggtacgcgactcgccgagcaccgacccgtccggctcattcagctcgctgatgggagacatcgccgtacgcgttgaagacattctttccgaaacattcaaacggcagaagctgtctgccaagggcgtgccgtactacgcgcagatgctggtgggcatgaccgtattcaccgggcagtactgggccgaccggccaaaggtgagcaaggagcagctggccgcatacattgtggatttggcctggcatggcctgagccggcttgactccaagccccagttgttctttgagggcgccaaggcgcggaaggaggccgagcgccgagccaagcgcgagtccgattccggcagcccggattcagaccagacgagttctgcccaatcggatcccgagcacgccaccggggaagattcagggttgcagaacatgagttcaggggcacaggttacgcaacactctgccgagtcgggagacgaagtgctacggtttgaacaggaaactgaacataacgactaaatatgtgaggacgtaagactttcatggccagcacggcaaagacgctcacctttgtgatccccgcatacaatatggagtcctacctcgaccgttgcgtgaactcgttgctttcggcaagcgacatcagcgacctcgaggtgctgattgtggacgacggttcgaaagacggcacgctggagtacgcgcgcaagctggaacgcaccaatccgggcgccgtacgcgcgattcatcaggagaacaagggccacggcggcgcggtgaacaccggtatcgcggcggcgaccggcatgtacgtcaaagtggtggatgcggatgattgggtcgacccgcaggccatcgacacggttctggccacgttgcgtgcacagcatgacaccgacgaaccgattgacatgctggtgaccaattacgtgtatgacaaggtggccaagcgtcacaagaccgtagtgaacttccgccgtgtaatggaggccggccgcgtgctcggctgggatgacctgggcaagttcggtctggcgcagtacatcatcatgcatgcgctcaccttccgcacgcaggtggtgcgcgattccgggctgaagctgccggagcacacgttctacgtcgatttctattactcgtaccagccgttcccgtgggtgaagcgcatccagtacctcgatgtgccgttctaccactacttcatcgggcgcgagggtcagagcgtgcagaccgacgtgatgattaagcgtgtggaccagttgcggctcgtcaatcggctgatgaccgaggccacgcccgaacgcggtacggtgccggaggggctgtaccggtacatgattcacttcctggcgatcgaatcgtgcgttacctcgacgttcctgattctctcgcgcgatccggccaactacgttaagaaaaccgagctgtgggatgcgattgacgcctattcgccggccatcggcaaggatgtgcgctcgcagctgatgtcccgcgcgctcaatctgcccggcaaaaccggccgctggatcgtgcgcaacggctatctcatcgccaaacgcatcgtcggctttaactgattcggattgtggttttgccctgctgacgcgttatcagcagggcatccctattacctccccagccgaggttttgctactcggcccaacggtcggacattgcgaagctgttgtgcatcaggttgctggaggtgtatagcacgtcgttcagcagcttggttgtatgctcgcgcaggtagtcggccatctcgtcgttggccgcttcgagcacatccgccacgccctgcacatccttctcatcgccgtggccgccatcgagcggccatgcattcgtacccgtcgattcggcatcgcttcgagcaagcaactgctcatccgtgcgctcgatgagccgatgcccgaacgcgcgcacgccttccgcatagccctcgatgaaccggttcgtctcataccaatgcgcgtcggccacgacggcgatcaggcggttcgtccaatacaggttgccggtggagacttcgggcgtggtgtcgcgcaggtaggcaggcgtgtcgttgacgttcgcgtagaacggcgcggcggcggtgaacggaccggagccgaacgatacccacatcaccgtgcgattggccgccggcacatacgggcggacctgaatcgccaccatatggccggtgcggttcacgccgatcggacggtaacggtggcgcgattccgccgtgccggtcgtgccgtacgggtcgtacggcgtgccttcgaagtgcgaggacagcaggaaatcaacgtcttcgaggctcaccttgtcttccggcacgcggcaccacgggatgtcgtcggattcgggcgtgtagcgggcggccggcgaatcccagtcctcgctggggttgaggcggcgttgcatgtaccaggcacgcggcgtgttgtagatatggtccttcggcgtcgcggtgccgaaggccttgcgcgggttgaagcgggtgggaagggcaacggttgttccgaatccggcgctatgcacgtgacggccgttggaagagaccgacgttcccattgtgcggtcaaggtgatgcgtggccatgaactcgcgcaggtcggcgctgcataggtattcgcgctgctcgccgaacgcatcggcgaggtcgaagtcgtcgatgccgagctggttggggatcgtggcatagcagtcgtcgggcactcggcgggcgatccaatgatggccgccgatggtctcgacgtaccagatctcgtccgcatccgaaataatcacgccgttcgattcgtaggtgccgtaggtttcgagcagttcgcccaaccgcgcgacgccctcgcgcgcggtggtgacgtacggcagcacaagggtgatgatgtcttcctcaccgataccgccgggctgctcggcctgataatcggtgctgtccggcccgccgacagccggccgcaactcgaccatcgggtccgcaccgagcacgcgctcgttgacagcgatggtttcggtggcgctcatcgccacgttgtgttcgttggcaccggcttcggccagaatgccacgattattcagcacgttcggtgcgatggtgtaccggcaaggattgtccggtagttcgatttcgacatggctcagcacgctgcggtagtggcgcggctggtcgtcgggggcgacggcgacgaagcgcttgggatcgtaacggcccgagcccgaatcgtcatcgcgggcgatgatggtggaaccgtcgtaactggcatttttgccgacaagaatcgtggtgcatgacatggggcaccactctaggagccaggctggtcgaaacaaaaaatccttggaaccattgcgattccaaggatttgttgtgccccctgtgggattcgaacccacaacccacgacttaaaaggacgctgctctaaccgttgagctaaaggggcaactcttctaaaatacacaccgttttgggatatttcaactacggcgttgcgtacacgtttgcgtacgcgattggcccaacgcacggcacagcacacgcaatgtggcccaaatcgcagcccaaatcgcatatcgcctctagcgatagatagccgccggcggctacccttgtacattatgagtgaatcccccaattggagcaatcccctgcgcgattcgcgcgacctcagactgccccgtatcgccggcccgtgcagcctcgtcattttcggtgtcacgggcgatctggcacaaaagaaactgctgccggccgtctacgacctggcgaaccgtggcctactgccgccgagcttcggcctgaccggcttcgcccgccgagactggacacaggagcggttcatcgaattcgtcaaggccgccgtccgggcgcattgccgtacgccgttcaaggagtcgacttggcgcaatctggccgccggcatccgcttcgtgcagggtacgttcgacgatccggaggccttcgagcgtctgagcgccaccgtgcaggagcttgaccgcgaccgcggcacgcagggtaaccatgccttctacatgtcggtgccgccgcgcgccttcccgcaggttgccaagcagttggccgcctccggcctgtcgcgctcgtccgagggcgcatggcgccgcgtgatcatcgagaagccgttcggccatgatctggccagcgccaaggaactcgacagcgtggtatccgaagtgttcgacccgagctccgtgttccgcatcgaccactacctcggcaaggaaaccgtgcagaacctgctggccctgcgtttcgccaacgccatgtacgagccgatctggaacgccaactatgtggaccacgtgcagatcacgatggccgaggacatcggcatcggcggccgcgccggctattacgacggcatcggcgccgcacgcgacgtcatccagaaccacctgcttcagctcatggctctgaccgccatggaggagccggtgagcttcaccgccaaggacctgaccgccgaaaagaccaaggtgctttccgccgtgcgcctgcccaaggacctcgccgccaacaccgcgcgcggtcagtacgccaagggctggcagggctcgcacgaagtggtcggctacttggaagaaaaaggcatcgaccccaagagcaccactgaaacgtacgccgccatccgcctcgatatcgacacccgccgctgggctggcgtgccgttctacctgcgttgcggcaagcgcctcggcaagcgtgtaaccgaaatcgccgtggcgttcaagcgcgccccgcatctgccgttcgagcagaccgccgtgcgcgaactcggcaagaacgccatcgtgattcgcgtgcagcccgacgagggcgttaccatgcgcttcggagccaaggtgccgggcggctccaccatggaggtccgtgacgtgaacatggacttcagctacggccgctccttcaccgagaactcgccggaagcctatgagcgactgattctggacgtgctgctcggtgatccgccgttgttcccgaccaccgaagaggtgaacctcagctgggagatcctcgatccgattgaacaattctggtccacgcttggccagccgcaggcctaccgcgccggtacgtggggtccggcacaggccgacgaaatgctggcgcgcgacggccgccactggaggatgccatgatcatcgatatgccgaacacccgcacccgcgagattgcgcacaaaatcgaacagctgcacgaggagcgcggcgaatcggcgaccggccgcgtgctgacgctactcatcgccaccgaggacgcggacctagagcatgcgctggaaatcgcgaactcggccagccgtgagcacccgtgccgcgtgattgccgtagtaccggataccaatcctgccgatcagtccggcgaaggcgaaccgaacgagaccgaagtggccgccgaggtgagcgcgaatcgcgataatccggccgtcgatttgaccgacggcccgaacgatccgaacgattccaacctgaacgcccaagtgcgattcggcgcggacgccggtgccggtgagattatcatcttgcgtccgcgcggtggccttatcaaccacccggatacgctggttatcccgctgcttgtgccggatgcgcctgtagtggcgtggtggccgaccacaccgccgtcgaacccggccaaggatctgatgggtgcgatggcccgcagtcgcatcaccgacgcgctgcactccaataatccggaggccacgatcgagcgtttgcgccgcaattggacaccggaagacatcgacttgtcctggacacgactgaccgtctggcgcgcaatgctcgcctcgatgctcgaccagccgccgcacctgcccatcaccgccgtgaaggtgaccggcaaggccgacttcctgcctctggaaatgctgtgcgcatggctgcgtctgaaactcggcgtaccagtcgaaactgagttcgtgcccgacgcgcaggccgtgaccggcgtgtacctgacccgtgaggacggtgtgatctcactggaacgcccgtatgaggaccaagcgctgatctcgctgcccggccagactccgcaggaagtgtccgtgccgatgcgcaccatcgaggactgtctgaccgaggaactgcgccgcatcgatcccgatgagatctatgccgaggtcatcaacgaaggctgggatctgattcgtcactgaagtcggtagaaccgttgccacagcggcgttggcatgagttcggcaattgtggtcgagccatgccaacgccgttgctcatcgtttcctacctcatgcgatgacgaagctcatgaccgcggagtaataaagtgacatatgcgatgtcgcacaatgtacattgtgttgtcaactgacaacacatttcattgctgcaaatggctggattcccggcatgccacccgtattatgcgttgtcaactgacaacacaatccacattgcaaagtacgacacataccccatataaggaccatacatggcaactcgaaaactcattgtgtatccgaataaagatctgatgattcaggctggcgcgcaacgttttgtcttggcgctactcgatttgctcgccgaacgattgcctgatggcacgcatcgcacacgtgtggatgtggcgctgtctggcggttcggccgcacagccgttgggtttggcgctgaacgatccactggctgatgcggttgattggtcgcgcgtgcatttctggtggagcgacgaacgttttgtgccggcttacgacaccgatcgcaatgctctggaggcccgtcgcctgctgcttgaccagctggtggcggatggcaagctgcctgaatcgaatattcatgagatggcggccgatacccgttcagccgatgacatcgccgatgtgatggatcaggccgatagtgatgacgcttccgttcgcgccgccgccgatgccgcgaatgatgcgctgctggacgatgccgcgagcgactatgagcgcgagttggtgaatgaattggggccggaaccggtcatcgatctgatgattctcggcatgggaccggacggtcactatgcatcgctgttcccgggtcatgatgaggtcaaggttaccgataggctcaccgtgggtgtgaaccactcccccaagatgccgccgttgcgcgtctcgttgaccgcgccgctgattgcccgctcgcgccgtacatggttcttcgccgccggtgccggcaaagccgaatcgctggcccatgtcttcgagcggcccaacaacccggattacccgtcctcctacgccaacggagtggacgagttcacctggttctccaccgaagaaaccgtcaccgagttgtgatggcgcctcctgtgggccggaccctgaatgaggggcccggcccacagattgtcgcagacgctcaagcctgctgttcctcgggctggccttcctgcgcccagagggtgtggaacacgccgggcttgtcgacgcggccgtaggtgtgggcaccgaagaagtcacgctgggactgggtcagagcggtgggcaggcgcttggagcgcagaccatcgtagtatgccagggagctggagaacaccggggtcgggatgccggcctccaccgcgcgaacgatcacgcgacgccatgcatcctgcgattcgccgatgatcttctcgaagtacggatcaaacaacagggaagccggcaaattatcgcccttgaaggcctcggtgatgcggtcgagcaggaactgggcgcgaataatgcagccgccacgc

SEQ ID NO: 2858 - DNA, 4298 bp, Unknown
  R36_18m  MAG No. k141_32378
aagccccacgaaagcaagtcgttgccgagtgctggacgggtcaagcgtgatacgccacaggcgcgatcccggcctccagacggcaatcatcagcaacaccaaggccatggcgagcacgcgcatccaattgatgacgaacggtacgcgcacgttggcgcgggcgtcggtgaccggtacgatcgcgccgcgctcttcctgaatccaaatacgcacgatgccggcacccggcgccttgacataatggctgcgaatagcgtcgggattcatcgactgggccttgccggtgatgccatcgacatccgcgcgcacatgaatggtcgccagcggtttgaagacttccttatcgtcgttcgctttggattcggcctcggcctgctcgcgggccttatcgatgaccttgctgctctcggtatcgatgcgtaggtaatccgacgtgccgtccgcggtcagttcaagataggccttggtcggatcggtgacggtcaacatgccatcattccggcgcgtgagacccgaacccagcgtgttatgcacggcgttcgtatccgtgctcgctccgagcgtacgccagaacggcaggttgaacacgatgcactccatggcggcgatggcggcgacggcggccagcaaggcgatcagcaggcgcaccaaacgcagccggtgccgggtatccgggcggctgggcaggtgccgttcatgattcgacggcatcggacggtctgcgcgagtgtggtctatggaatgcacgcatttattctataggctttattcgggcttgatgtcgggcaaacaagagacaatgtgaatcatgccaaaacgtacatcggaccatgggaagcacaaccgcacgccactgctgggcggactgaaggattcgatgaacgcgctcgcggccgatctgggactgtccaagccgaagaagcacgatacgaatccgttcggcgatgccttgcaggagaccagtgagcgtaaaggcggcattatcgacgaactgactcgccatgcagtggcgctgagtcctgtaatcaagcgacgcaccttccccgaattggagaacgtgccggaagggctggtgcttggatgggcgcagctgccctccaccagaggccgtggcttttcgcttggcattttccccgaccgcgatcattttgcgcaggtggcgttcgccgatacgcatggccgcgtattcgtgggcaccgaccccaacatggacgtgcaggatatgcaggcgcgattcatgttcggcaaggaaaaggaagtgactctgccggacggtgagcggctgggcgaaagcgacgagccgcgttcacgttccggtttctcccgtgcaggccatggcctgggaagtgcgctgcatcatgggcgtggtttggggcgtggccttggtcatggtgctgacggcgtgaaggccattaccggtggcgtggtggggcgtgacgacaccggacgcatgacgtggctcgcctcatggctcaaggccggcaaccggtacacgcttgagcagatgcgtgccaatctgccgcctgtgatgcgtcatgatttggaataccgcgatgccattaccatcgcgttcttcgccacgtatatgttgccgcagatcaatggtctgctcatcggattcggttccggcaatatcttccgccgtctcaaccgtgaggcgccaatcggtgcgattcgccgttcggtgcgtgacactttggcggcacgagcccacggcatgcgggcctccggtctggaggatcacttcgccgatctgatgcgcgaagccggcgccctcgacaccacgccgggactggaagcggtgcatggcgccgaaccgttgcacctgtacacctcgacgtattcgagcggctatttctttacgtgggataagtccttggcattcgggcaggcgctgaaatccttgaagatcgaaggcaacctcaaccgattcgctgcggtgagcgcttggctggagcgcaacgcttccttggggcgcaaccctacggaagatacggtgacccgtgccgaggccgcgcaaatcgacatgaaactcattgagaaccctgcgattatggcgcttgacccgtatgatggcgagcaggagcgtcgggccgtgctgagcctggtcgatatcgccgcacgcacggctgggcagattcgcagtgaattccctgatcctcgagatgtgctgacccagcagaacgtgccggattcgggtgtgacgaatgctgcgggcgctgaaagtactgagagtgttgagggcgctgtagagcggaccaataagagcgacaccaacactcaagccgctcggccttcgtattcgccggcgaggagcgacgaatgggtgtatcgtcagaccctctcctcactgttgcgccggttacggttgccgtatcggtttgatgtggagttccggtcgcgcttggattcgggtgaagtggccattggcttcaccactgccggcacctcgatgatgcccgatagccggtatgacaccactcgccgtacgtggcgtgcgctgagcagcgccgaacgcgcgtcgatgagcgccgcctacaacctgcgtgtcggcctgatgatggcagcgctgagtttcggcaccagcgaatccgtgcgccaggtgtcgttgcacatcgattccattggtcttgaagaggcgattgccgaacaggattccgccatcgaggcgatgatgagcgaggccctaagcgccttcgaacatctacgcagtggcgatttggggcgtgtgggttccaaagccgaccccaaagatggtgatttccatggcgacccgacccgccccatcacccatgaggagacgttcgggcaggcggcgtccggtgacgaacgcggcacggccgggggagcaggcaacggtaccggaccgtctgcggatgctacggatcaggccgcggccgaatccactgacgccgatggcgccgcgtccatcgattcgcagttcgaagacctgatgaagggcgtcgatatcgacgaaatggcgttcggcatgccggacgataccggcgcaggcgacgacctgggcggtatcggcggcgagggcgtcggcactgacgatgctgatggggccgccggcatggacgatgatccgatgagcgtgctgcgccgcaatcccaccgtgcgcaatatggtcaccgtcaccttcacccgtgatgccttcctcaagcgactggacaccgatgggcttgacaatcccgaggaaacctaccgcatgttcggtgccgtgatggacgtggacggcgaaggcggcctgaaacccatcagcgccgacttcgacttggcggacagccggttctctcccaccggatcccaggaggagcccgaactggccgaccgtcaattcagcccggcgaccgctcacgtgctgggcgcacagaatagtgccggactggctatccagcgagtggacttactgcagcatggcgtcaacgaattccacgatatcgccaggaacacgtcgctcggctccgtggaaaaggcccagcgagccatgcagatcatcgaatcgatatgcgatcccgaactgaccggtttggcctctcaggtcaccagtgcgttgatcgatggcaaggacaccccggacttcacgttcacgcttgccgacgatcttgacaaggagcgtctgcgcgcccgagacatgctgttctcgggccaagccgatcaggccatcgaagcggccgaagcggctgtggcccatttggatcaggtgtatgcggcaggccatggcgtacctcgatacttcaactcctatgccgagcgcgtggtctacaaccgactgttcgccacattggacgagcgtacggtgctcatcccggacaatctgttctacgcacacatggagctggctgacgtgttgagccagatcaagggtgccgaggcggccatcccgcacctcaaccgtatggtggcgtacgcgcccgcctacccgctctcacatctgaagctcgccatccaactggcccgcaatgaggattgggattcggcacgcgccgcctgcctgaatgctctgcgtgtggccttggaccgcgacgatgccgcgttcgcctactaccggtttgcgtacgccgaatggatgcttgaccggttcgacacagccgccgcagcctacattatgagcgatcacatcgctcccggggccattggttcgttggaaagcgaactgcaggaactggtttcccgtgcggactcgcagtgcataccggtgcctgaatcggtggaggccgccgcccatgtgcttgccacgcatgatctgccggtctggccgcataacgaagtggctgacatcgtgcgtgacgccg

SEQ ID NO: 2859 - DNA, 8064 bp, Unknown
  R36_18m  MAG No. k141_32850
tccatcgccccctacctgattccggtggtcgaaagctggggcgtgcaccccggcatcgccggcggcctggtgaacatcatcctgaccctcatcatctcctactgctccatcgtgatctccgagatggtgcccaagcgcatcgccatgcagcgcaccgagcagatcgcgcgcgccgtggtgcccgccatcgacgccttcgccgccgtctgccgcccgatcatctggctcatcggcaagaacacgaacggcatcgtccgcctgctcggcttcgacccgcagcagaccgagtccgaggtgtccgacgacgagctgcgcgtgctggtcagctccaacaccaacctttccaaggacgaacgcacgattctggacgatgtgttcgacgcgtccgaaaccatcgtcgccgaggtgatgcgcccgcgtgccgacgtggtcttcatcgagggcgaccagcccctggccgaggccgccgcgttcgtacgcgaccagccgtactcccgttacccggtgaccggcaaggatttcgacgacgtgatcggcttcgtgcatgtgcgcgatctgctggacgtgcgcgatccgaacgccaagatcgtgcgcgatgtggtgcgcgaaggcatctccctgcccggcacctccaagctgctgccgagcctggaactgctgcgtaagcgcggcatccatctggccgtggtcatcgacgagtacggaggcacggacggcatcgtgacgcttgaggatatgaccgaggagcttgtgggcgatattcgcgatgagtacgatctgcccagcgagaagggcggcgaacgcaccacccgcaccgcgttcgtcaatggtgtggccacgatcgaggccagcatgaccattgaggacttcgccgatctgaccggcatcgaattggaggacggcccgtacgagacggtcgccggctacttcctgtccaagaccggcaagatgggtgcggtgggcgacgtgctgcattccgacgacggctacaacatggtcgtcaccaaggtggatggccgccgcatcgaaaccatcgaagtccgcaaagccggtgccccggaccatgcgccactgccagccgaatcacaaagcgacgatgccaactagccacgtgatattcaccacctattcgttcggcccggggcataaccaaaaatcgtagaattatatggacaggttccacctactgaaagaaggaacattatgacacttgcatttgttgtgccgggccttgatgaagcggccagtgagaaggccatcgccatcctacagaaccgactgagccaggagcaggaggccgctctggtcctcaagcacgcgcactggaacgtgaccggcccgaacttcatcgccgttcacgagatgcttgaccccgaggtcgaggccgtgctggctcaggccgacgagaccgccgagcgcatcgccactctgggcggcaccccggacggccgcgcggacgccatcgtgcgcaaccgcacgtggaagtcgttcgacgccgagggccgcgtgggcaccgaggagtatctcaaggcgctgatcgagtactatgacgccttcatcgccgacgaccgcaaggccatcgccgagctggacgagctggatgtgatcagctccaacatcatccaggaccacgtgcaggaactcgaaaagttccagtggttcatgcgctctcacctggcataagtaaaagcagtattccgtggctcccctcaaagaggggagccactttcgtctcacgtgaaatagagagtctccacatacataagttggaaaagtgtataaaactccccattttgaggttggaaaacgtagccaaaaccgcattcttatggttggaaaacgtgactggaaccgtatttctgtggttgtaaaaatgtagccgtacgttcaacaacgagtggcaggcccacatgcgggccgcacacttagtcaacaagtacatgtcggtcagatggttcggactggtcagagggcccgctctgatcagttaggtcggtctgaacggactggctgggctggtcggcctgagtagcccgtttggaccgatccggttcgcccttgctggccttcacactgcttcagctccagctgaagttcgctgatgcgccgttcgagttcgtcgatgcgccgcacgtgtggcgaagtgagactaaggggagccgagagatggctcacaggccgagggcaccggccacggccatggcctcgtgttcgggatcggcctggccgatgtgtacgttgacgtgaatttcgtcatcgcccggctcttcgagaatgtcggactgggattgcagcatgctcggcttcatgaagtggccttggcggtgggaaaggcgttccatcacctcgtcgaatgtgccctgcatgtagacgaacaccacgccttgacggcgcagcttgtcgcggtagatcttcttcaacgccgagcaggtgaccacggcgggctcgccggcggccacgcgctcgtcgatccacgcggcgatggtgtcgagccaaggccagcggtcttcgtcggtgagcgggtgtccggcggccatcgagatggtggcgcattcggaccatgcgaacgaatccgatcaggccatcagccacatcaccggcactgaagcctgacccgtcatcgtcacagcaccacgcggcggttgaggtcgcggcgcagcgtcttccagccgggtaggtaggcggtcatgcggcgttggaatccggcgccatggccgctttcccacagatgcgtcatctcatggaccaagacgtattccaggaattgcggttccatcactcccaattgaaggttcagacggatgcggccggttcgcggcgtacacgatccccagcgcgaggccatgacccgtagcgtgatatgcgtgggctgccggccgatgaccggcccccacttggccagcagctgtggcaacgcggcgttgatcgcggccgccgcttgtcgtttgcgttcgtcggtccagatttgggagcggtcaaaatacggctggacgttcgtaccggcttggcccggcccggcgtcgccgattctcggacgactgatatcaccggttttcggacgaccggcaacgcctccatcatggccgctggcaccagctacgccacgacctccgttctcgaagcctgcaccctcgttcaatgccatgatggagcgccgttgcgcctcagccatgcgctgctgctgggcgagaatccacgaatgtcgctctttgacgaaatccgcgatacgactctcgctcatccgcatcggtgcggagatttcgacgcggccgctcggcggtttgatgcgcaaatacaggtttttgatgggtttgcgcgtcaggtgcagatggatgccgtcaatgtccaacgactgcccggcggcagcggaccgaacggatttcggcgcaccggacttcggagcggtggattgacgacggcgataaggcatgcaagtcattcttgcacaacggcggacaacaagcggcacacaatgccgcccctcacgaatcggcaaccggcgctgctacattcaatccgcataccaactgcccacaccggagaaggtcgcgcaggagaaggcctcgctgctcgagatcgacgacagcttccagaagatcgtcctcgtacgcgacgtggtcaaacccgtccgcgacgaacacggcatcctcacgatgagcgtctacgatttcctcctcgacccggacagcctgacgatgtgacgccggacggccggcaaatgccccggaacgcagccccccactcctcgaacaccgccttcgcggtggccgaggacaccatgacgagacagccgagcatgatggcacccagcagagggtgccgaagttcgcgatgacgtactgccacaggtccgacccgtccgtgtagccgtcgaagcgcagcgccgcgacggggacgagaaatccgtcaagcgcatgcgcggcgtcagatacaccgtcctgaagaaccccggcaagctgaccgacagacggtccgaggcgtccgggaacctgcggtacacggaccccaagggccggccctaccgttcatgacggctcagggaacccctccggacgatgcccaaacgaccggccgaccaggccgggaccgaactggaccgccgggtgttccgggcgtcccacagccgcatccccgagatcgtcgaactcgcccgaaagatccgccgtcatgggcccgacatcctcgggacaatcgaattgggctgttcaaacgccaggctcgaggcgtccgacaacaggatcaaggtcaccatccgcatggcctacggcttccaccacgcgaacaatcccatcgccctcgtcatgctccgccgcggcggactcgacatacgcccaccacaaccaagaacccaacccacgaaaacagcagaagcctcatatgtattggacatttctgcgcagagagggaggtgtaaccgcagcattacggtgtgagaacgcaaggttacatagctgggcattggctgtggcgttgctagacattgaccgtcgagccggcaatcatggcgcaagcgacaatcacgacacgccgttattgacataccgccgttcaatggtattgtaattacttgtgcgcttttgaagcgtatggatcgggcccgtagctcagctggttagagcgcatccctgataaggatgaggtcggaggttcaagtcctcccgggcccacagaaaaaaatgaagcggctgcgagccgctctttttttctcacggggctatagcgcagctggtagcgcatctgctttgcaagcagagggtcgccggttcgaacccggctagctccacagacaacccttggaataataccgattctgagggtttttgcgttcttgttcgagggattctcccagtgcgccatggccctctccatcgaaaaaggggtggtcctgttaaggaccacccctcgaggattcagaccaaccgcgtggtcattgtcgctccgtcttcacggaacggtacacgaaaatccttcgccttgcggcgatatcgcccggacccggaggactacaccttcctctcgggtggaaggtaccggcagataattggctcttccggttttggtgtgtagggggatgcttataggtgggcttgtatggtgtgtctgaagccgccggtgtggaggaggctgcgggtcacgccaaaaccggaagagccgttttcttttccttctccggtggtttcgtcgttgaccgtgttgccggtggcttccttgcaggcttgtttgtaggcttcggctgggctggtgtggtggagggcgcggatgcgtgcagcggcgtgttcgatgtgttcgagcgtggcggatggcgcgtcggtcaggccgtggcgggcgaggacttcgttgcgccacgagtcgtagcgttgctcgcgcaccacgcgtggcttcctccgccccctgacccatgcgtcggcgtacgcccaatcgccttcctcgtagatgtcgcgtgcccaggacgccgtcggacggtcgaacgggtaggggcccgccggcagcggcaacttgtcgaccgtcgggtcgaacacagtgaatcgtcgccgttccctcgcttcgcgttcccgttccggcgctgccagcgcctccgcgacgtccgagtggaacgcggccatgcgctccttggcgccggaggacgtgaacccgtcgtcgggttcgcgcagtccgtgctcctcgagcagcgggtggatgtcgtggtccatgagccagcggagccgggacatgttgaacgcgaggatgaatgcgagcgagattgcgaccatgaggcccatcccggcccccatcagcagtgtgctcatttcagccggctccagcgttcggcgcccgcgcgcgggctgaaacgtccccgccagtcccacggtccgacgaaacgcaaggccaacagaatcggggagcatgtggcgaggaacgcccagaagaaagccaaccatccaatccagtcaggtgtggatctgccggtgtcgacccattgcgcgctcgaccagaacatccatgtcatcgctatggggaagcccgatatcgcgatgaggaacagcgtgccgacgatggggccgccgaacatgtagcgcagcttcgtggcgggcacggaggaggcgaatgccaagtcctccagcgaggcggggacgtaggtgttcggccggccgaacacgagccggcagaaaccccagtacaggaggagtccggccagccacatcacggcgaccgccacgtacgtgttccatgcgtcgcgggatatggtggccggtctgagaaaagccagcagcgtcacgtcatcggtatgcgtgtggtgcgtcttcgtgtccggggtgagcagccgggcgatgccgtggatcatgaccatcaggccgggcgcagccgcggcggcagcgccgccggccgccgcgccagcccgcgcccagccggaatcgccgccgaaatccagcttgcgcttgaccggcgtcttctccagcgtgtcccagaacacctgcgccccgtcctcaagacgccccaccaacacataccgagtgaacaacgccaacagatacccccacttccaaaacccgagattatccttgaaatgactgcccgggtcatctccaccgcctctgtgcacctgattgtcgtaaagtgcgtctaagccgctacttatcagccatccggctccagtgccaatcgccgttccgacaaatgcgccgaccacggtgccggcaccggggacgatcgatccgacgaccgcgcccacggcaccgccaacggtcccaccgaggccatcaacggcaggcccgagaccctacgcggcatcgccctcggcttccgcaacctcgacaactacgtcacccgcagcctcctccacaccggcggcttcagacacaccatacaagcccacctataagcatcccctctacacaccaaaaccggaagagccggatgattccctgcaagccgatcacgccaatccgacccgacgactaatcagattgaggacggctgaattaagcttgtgccctcatgatacaacatgtcctgcgaccgacgccagacacaacggcagcattctgcccaccatagggcgtgtctttaaccagaaagtaccctcaaatacgttcagcaagatatatgcacgcagaacagcccttccgcattatcttatttgacatagagcatgccccttccattccacagaatcaagcaaataaacgagcggagagactgggcacaccgcaaaacaatggcccaacccctccgctcgattgttatggaaggaagagggatgaataagtatgttgacttcactgacttgatgaagacgatcagcaccgcgccaatcagcgagcagaccgctgcaagcgggaagagtgcgtgatagcccaccgaggaaattagcgccgccgcaacatcccacgcaccatattcaggacaaatccagtccgttgttgtccttggctttgctcaccatatcagtcaaatcggggtcgtccacagacaccgcgttctgctgactgagcgtcaacgatagcgagccattataggagtcgccgtattcgtccttgccggacacgcttatggcaatcgaattcatcagacgctttctgccgtagttcagatccacggtgatagtcggcatctccggctcttcatccgtgccgaaatcccagttgcgcacattatcgagcgcctgacggtactcatcttcagcatcgtccacgccggcatcctcgatttgctgaatcacccaggatttcagatgcggatactgcgcttcatgactgatccagtaattcacgaaatgctgagacaacgctttgatatcgatttggtacgacagctgcgtattgccggcagacttggcagacgatgtcttcgggaacagctggctgcgcacattcttatcttccagctccacgccgaaatattgttggatgaatttgctggcctcggccttcacctcggcagaccttttcgtgcccttggcccggtcgatgtcgttcgagtacccatcgtcgttcatcttgtccagctgatcgtagaacgtttgctccgcgccggtgatgtcccaagcaccgttcttgaccaacgcatccttgacgttcaatatca

SEQ ID NO: 2860 - DNA, 6277 bp, Unknown
  R36_18m  MAG No. k141_32966
gattatcagcagcaacaccgtgccggccacgatacgccgacgacgatagatggcctgctgctttatgctgatcctgcgcttgcgcggcttgccggaacggtcgtttcgggcgggcccgccggatggcccattgtccccggtgccggctccgcgtgccgttctcgcgcctgatgtgttcctctgcactgccataacccttccagtctacggtcaccacacccatacacgcttggggagcccgccattttcacaatgtcagctgggtaatcgcaggccgccgtccagaatctcgatcaggccgtcatcgtcaaggctggcgatgcaggcggcaagctgaatctggtccttccaaagcttgtcggcatcttccctgggcaccgtgactccagcgggaagctcgcgcagcgcggcgagcaccagaccgcgcacctgtcgatccgtgccttggaatcgttggcgtgggcgggtgcgacgctcccccagtccggggcggccggccttgaggaacgcgcaatcgtcggcaatcgggcaggtgtcgcataacggcgatttggccgtgcagatcaccgcccccagttccattaccgactggttccatgtgaccgatgggcgttcgccacgatgcagtcgggagcgtttgccgccacggaaagtgctgttcacggtatgttcggcgctaccggcattatcggcgacgtcagcatcgcgcccgagaatctcgtctttgggcagcatgcggttcgccagcgcgcgttcggccgggctggccgctcccccgcgcgattcgacgccaaggaacacacggctcagcacgcggcggatgttggtatcgatcacggcgattcgttcgccgaacgcaaagctcagcaccgcggaggcggtgtaatcgccgatgccgggcaatgcagtgagttcgtcatacgtacgcggcagtttgtcggcgtactgctcggccaccacgcgggcacattcctgcaagcgcaatgcacggcgaggatagccaagccggccccatgcggtgatcacctcggccttgggggcctcggcgagtgagcgggcgtcgggccagcgtgccatccaatcgttccaatacggcaccacacgactcatctgcgtctgctggctcatcacctcactgaccagcacgccccacggcgtggcccgtccgaagcgccatggcaagtcacgcgcattggcctcccaccatgctcccaatcgcaaagaaattgctgtgtcgttcatcgttcttattcttagcagctatgacgaacgaggcaaaacacaacccccagagcacaccgaatccagccaatcccgaaaccaaagtcgagaaaatgttcgaatacggctatcgcaagtcgaattacgggccggacgagctggtgaccgacgcacacggcaaccccatctccgtggtggacgcgatgctttccgccgagaaggccgccgccaccgaaaccgtgacgccgcacctgtgctattactcgccgcgtattcccggcaacaccggttcggccatccgcctgtgcgcagtgaccggcacgattctgcatctggtggagccgctgggcttcaacctgcgcgacaccaagctgcgccgtgcgggcctcgactaccatgacatggcccacgtggtgttgcacccgaatttcgacaacctggtggagtcgatgcccaattcgcgcatcatcgcgttcaccgcgcacgccaccaagctctacaccgaggtggaatacaagccgactgacatcctgctgttcggccccgagcccggcgacatccccgacccgatggacatcatggagggccctcatgtggccgaacaagtgcggctgcccatgcgcccgtccctgcgttccctaaacctcaccaactgcgcatccatcgccatctacgaagcctggcgccagctcaattttgcgggcggagcgtgaggagaaggcccggtgggccttcgagtagcgacgccgaacgaacgccgacaggcgcgagagcggaaacactgagcttcgcgcagtgatgaacgctgaatataaggccacctgcgtttcgaggggcggatttggcatccgccggaggtctactgccgcttcaaggggctgtcaaaggacgagaccccgagtatggccgttgaaatatcaatgcttgtactcggggtcttcatatataccagcccctcgaaacggaagtagacctccagaaaggtcggaatcagcccctcgaaacgggaatagacctccagaaaggtaattcgagctggtatctgccttcaaagaggtacattcgagcgtttgcagaatgctatctgccttcaaagaggtaccgcaatcgagaaaccccgggtatgagtgttgatattccaacgctcatacccggggtttccgcatataggtacctctttgaaagcagatagctctccgcgaggggccaaatgtacctctctgaaagcagataccctaccgaatcaattcttgaagctgtgaatcggcgcagggattcggccgccacgggtcacgaaggcctcgcagctggtctggttcaccggaatgatcggcgcatagcccatcaggccgccgaagttggccatctcccctacgcctttgccttccaccggaatcacgcgcacggcggtggtcttctggttgaccatgccgatcgcggcctcgtcggcgatgatgccggaaatggtggctgcggtggtgtctcccggaatggcaatcatgtcgaggccgacggagcacacgcaggtcatggcctcaagcttttcgatcttcaggcagccattggttgccgcgtcgatcatgttcttgtcttcggagaccgggatgaacgcgccggacaagccgcccacgtaggaggacgccatgatgccgcccttcttgacctggtcgttgagcatggcgagcgccgcggtagtgcccggtgcgccgacctgctcgaggccgatcttctccagcacttcacccacggagtcgcccacggccggggtcggggcgagcgacaggtcgatgatgccgaacgggatgccgaggcggcgggaagcctcctgagccacaagctgacccacgcgcgtgatcttgaacgcggtgcgcttgatggtctcgcacaggaactcgaaatccttgcccttggcctcgtccaatgcacgggagaccacacccgggccggaaacgccgacattaatcaccgcgtcgccttcggtcacgccatggaagccgcctgccatgaacgggttgtcgtcaggcacgttgcagaaggccacgaacttgacgcagccgtaggagtcgttgtcggcggtgcgctcggcaacgtccttgatgatgtggccgagcagttcgaccgcgttcatgtcgatgccggtcttggtggaaccgacgttcacggacgagcagacgatgtcggtctcggaaagggcttgcggcagggagcggatgagcaactcctcggccggggtcatggacttggagacgagtgcggagtagccgccgatcaggtcgacgccgacctccttggccgccttgtcaagcgcgtgggcgatcttgacgaagtcctcgctcgtcttgcaggagctggcaccgaccagcgagatcggggtgacggtgatgcgcttgttgacgatcgggatgccgtagtcgcgttcgatggccttgccggtggaaacgaggtccttggcataggtagtgatcttgcggtagatgttgtcgcaggtcttgtcgacgtcgtccgaggcgcagtcgagcaacgagatgcccatggtgatggtgcggacgtcgagcttctcctgctcgatcatctgattggtctcgtggacctccatgatgttcagcatggtttgttccttacaggatatttaaagactagtttggcggtcaccctcatcagagggataaggatggctccgtcagcggaaagcccaccgggctttccgcctcctcgcgtgcggcggcctgctgagcgggccgcctcaaatacggtgcatcttggtgaagatttcctcacgctggcagcggatgcgcacaccgatgtcgtcgccgaggtcctcaaggttgccgaccatcgcgccgaagtccttgtccgcgttggcgtagtcgacaatcatcatcatgttgaagtaaccgtcgatgatggtctgggaaatgtcaagcacgttgacctgatgttcggaaaggtatgtgcagacgcgtgcgatgatgccgacagtatcctgaccgacgacggtgatgattgccttgttcatggaactccctaaacgtgaggtgtgaatatccagttaccgtcttggcgaattgccggacgtgccctcaagtatagggaaggcacgtgccaaaacacgtgcctttcgtctgttttgccttacatactgagatgactgccggttaccacctaccgctgcagcaactgtatgtcaccgccagatgccgtcaagcacacgcacatccacgcaatcgaccttgccgtcagcaacaaaacggaactcgccatcgccgtccgcaccttggaacagcatactgccggccgcttcgccgttgttaaggaagacttccaccacattacggtcgaagaagatttcgacgcgacgcacatcggcgatgccgctatcgaaatcgatgtcgtccacgactgttcccttcgtgaccagtcgggtcacgccgtcgcgacgctgcagctgcaattccatcgaattaccattggcggaattggtaccagtcgcgatgagcattgtgaaatcgtcatcgtcagccagatgcatgtccgtgtaatacgcgttgttcggcacaataaagaaggtcccgttttcgtctgcatgcgcttccaaacgatcgcctagcagctgctcgtacacttccttgacaggacggctggtcaagcggccgtcacgcacgtgcagttcacgtggcagcgacatcatgccgttggcaatgcacggcttttccacacgcatcgcgggaaagtcggtataccagccgaacacgatacgacgcccgtcgtcggcagcaaagctttgtgtcgcgtagtagccggtaccgaaatcgcaccaatcgctgttccctacctgcaaacgtgggccatcggcggtgtccttgagatcaccaacataccaacgcacctgctggaaacgaccttgcttgtcacggtagtgcatcaaagctccgatggcgaccgtcttgccgtcgagctggaacaggtcaggacattcgtaggtacgtgacagctggtggccgaagtcggcgagcaccggtccttcatactgccacgtcacgttgcgcttgagcggtttcttcgcggagaagagcgccatggcaggcaccgtatccatattgggcttgtcggtgccgggcatgccttgcggaccgcacgtaaaccagccgtctgtaccctgtacgctgatgccaggcgccgcggaggacacagcatcagtatcgaattcggcgaccggcagattcgtggcggtcaccatgtaagcgcgttccggatcgatcgcctcgccgcccatgccggtttccaccttcggatcacggaaatcgaagccaaaaccatcgttaacgcgcaacgcgaccggagattcgacactcacatgcacgccatcctcacacaagcaggtggtctggtattcagtaacagacgattcgtctccgcgagtctccaggtgccgggttagatacaggcgaatagcggccgcatcatcacccttgcagggattgtcacacgcatccaccgtcaccgcggatccggagaacgcgcctccaacgatgcgttcgtcgatatgcagctccggctgcggttcgaggaagattggcagatgcgtccaatgcaccagatcgcggctcactgcatggccccagtgcatattgtcccagccaaaaccatacggattgaattggtagaacagatggtagcgtccttggaaacgacacaggccgttaggatcattcatccagcgagcgaatggctcgaaatgcgccgcagggcgagcgaaacgatcatagatctgatccagcgtcggctgcgtatcccattcattgtcgtacggattcatgctgatgaaacgcacgccttcatcaagaagattctcacactcggacaagtaggcgaaccgcacggtcagttggcgcgctctcaccgtgagacacacgtttgtcggcaccggaatcaagaaacggtggcgacgctcggccaccggcatggcatggctggcgatttgatggccgtccccgtctgtaatggtgacggcagcgtcatcgccgcatctttcggcgaacaattccagcaagcggta

SEQ ID NO: 2861 - DNA, 3731 bp, Unknown
  R36_18m  MAG No. k141_33064
ggtccgggtagcacacgtagaccggcgcttcggcgggctggaacttgcgcttgaagttgaacagcgagtggaagccgtaggcgggttccatccagtcggccacgatctgcagcgcgtgttggagcacctgcgtgccttcgctggccggtgccccgtcctccccggcgttgtcccgatcgggattcatgccggccaggggcgccgcggacaggctcatgaactccacggcgtgcgtgggatcggcttcgccctcgtcacgcagccgctcggccatgcgcgcgatcaggaactccatgatgccgttggggctgtcggtgcgatggcgcatgaaatccaacgtccagccgacgatgcgcccgtcgcgccaggtgggcaaccagctggtgacgcccagcacgcgcccgtccgcgtcgatggcgtaaagcagccgcacgcgcgggtcgcgcagttcctcgacgccgccgagcgtgaacttcatttccggcagcgccttgagctgcgcccactcctcggagatgtcctcgatctgttcgcgcacatcgagcgacgcttccaggaatgtggactgcacgtcggtcacgccgtcgcgcttggccttgttgatggcggtgcgcacgtcctgccatttcttgccggtcgtcttccagccgcgcgggtcgaccaccatttcgctgccgacctcgatggagttccagccggcttccagcaacgcgtcgcgctgttcccgatgcacgccgtagaacaccggcgacagcgaacgttccgcacagtgctgggagaaaccgttcagatcgtccatccattccgccggatcgccgaacggtccggtgcaggtcagggcgatgccgttgagcacgcgatacgccacggccgatctgcccgtgggggacagccagtagctgttgccttcccacgtggtcatgaagctcatcgattcgccgccggtttcgaccagacgttcggcgcgcgcccgggctcgctcgttcgattcgctcacgtcgcccatccagtggatcaccacggccagcaccacgatccagaacaccaggccgacgccttggtacacgatcgaggccatcggagtgcgcggcacgaacgacagcttcatatggctcaggaagccgatgggcaggaagcgtcccggcagctcggccagcagcgacgaggccgtagcgcgtggcgagaaggtggcgggttgggcgatgccgtatatcaggtatatggcggcgcacgccagccaggccagcacgatggcgccgatgccgccgaccagcctgcaccagccgatgcggatcgggaagtgtttcatcgccgccagcagggcgatggcgaacagcagcgggggcaggacgttcgccacgcaggccacgatcgcgccgtgctgcagcagggaggccatgccgtccggcgcgaagctcagcggcacgaccagatagtaggcgacggcgatggccaccgtgaacaggttgatggccacggtgcagatggccgcgaaccgacgtccgcgatacaggccccacgccagcaccagggtcacggcggtgggcagcaacgagcgcagcaccgcgccgggcatcgaggcccgcaacagatcgaactgcaggaagcatccgccgtgcgtgtcaccggccaggcatttggccagcatgccgttgtcgacggaaaccgggctcatgagcaggccgatcgtgctgagcgggcccgcatggttatgggaggtgatggcgatgaccggccccagggccagtaccacggcgatggccgcgaatatgcgccgcgcctcgaaggaggtgctgcgcagccagtgccattcggcttcgacgtgcgcgggcggaccggccatcacacggccggcggcatggccgatcagcgcggcggcgagtatgcagtagccgctggggttgccgctgtagagcaacgtgaccaggatcgccacatagccgacgagtcggatgcgcctgcgccataggtggctgcagaacgcgctggccgccatgagcgcgccgaccggcaacaccagcgggctcaatgcgaaccgcatgcgggagacgaacagggagtcctggaacatccatccggccgccgcgcacagggtcaggcccgccagcacgccgccggccgcgcaggcgagcgcggtgacgacggtgcgcacacggccgagccatggttcggctatcgacagcatgacgagccacaggacggcgtcgaccatgagttggatgacgccgcgcgccaggaacagcgagcagatgagtttgccggcgttgaatgcggccatgctggtgctgagccgcagcggaaacgcgaatccggccatcgcggccaccagccacgccaccagattcagcgccaccagcgtcgccgtggcggtgacggccaaccggtgatcgtccgcccactgccgcacgtcaccggccagttcacgccagctttccgccgcatggctggaccttgccgtatgcggtttggtggcgcgggaggtcgtggcgggcttcgtccgcgagggttccgcgtcccgcaggggccgccgcgtctgcggcatggccgccggccgcgcgttcccatgctgttgttcttcgctcattgcaacacctccacttgtgggtattcctccaacgatttcgtcatttcgcccagcccggttcgcgcgccgaaccagtcgagaccggggttccagaccgcctgcaccgcaggccagtcatggtcggcgccgggcacgaccagttcggtgttctgcatgccggccgcgcgcgcggccgcggcgatggtgcgcatgttggcgaccgacttccgatcccctttgccggcgccggcgaacagcgcctggccggccgtgccggtggcggcgatggcgttgaccggcacctgcccgtcgtaggccttgcggtcgccggcgaaatatcgccgaaccatcgtctcgacgctgccatcggtcggctcaagctcgccatccaccggcagcatcgcaccgtagatgtcggggtgacgcggcaccagctgcgtggtgcaggtgccgccttgcgagaatccgcccatcgcccacatacgggccgacttggctaccggcagcgtcgccctggcccagttcaccacgtctttggtgaggtaggtttcggcgttgcctcgggtggtgtcggcgcacaggctgttgtgcatggccgaaccgttctggtcgggtgcgagcacgatcggcgccagcccgtcatgttcgacggcgtaagcgttcatcgtggcggcgatgttgccggcgtcgatgaggcgaccgggactgcccggctgaccggcgagcagctccatcaccggcagggccggcgggcggtcggacagcgcggcgggcggcaggtagaccatcgccttgcgcgccttgaacttggattcggtgttcgggatgctgacgacgaacaccctgcccgagtcgggcatggatggcagagcgtccttgcgcgccttgtcgcgccactcgccgacgctcatcgaggccttgcgcacggtgaccgaaccgagcgggggatatggcgtatagccgacgagactgccgatggtctggtattcgccgtagatcgagtccacgccaagcgcggtggacgccagcaccagcggcaccagcacgacggccagcgcgcgacgggccccccgtaacgtcacggcggcggccagcacgaagccgaggcccgcgaagcctcccgcgacggtgaggatcaccggccagcccagcgatacgccgaacacca

SEQ ID NO: 2862 - DNA, 3074 bp, Unknown
  R36_18m  MAG No. k141_33191
caagttcgcatcggcttcgtgaggagtgtgtgtctactcgaacaatgcggcgtcagtcgctgggtagccaagttggaacgcggtgtaggcgtgcttggcggccagtgcggcgaggatgagcagcgtatcgctctcggtggaagatttcgattcggtcacggccttgatctgcgcgcgggcgcagtccatttcgatggcggcggcggtcggtacggtctggccgcttgccttgtcggcgatggtggtggggttggccagtagttggtcgatggcatagaccttttggcgggggtcgctctggccggaagaactggactgtgcgccggaatcatcaaaattgccgttcgccagcgacaccagctgctgcccggcggtcttatgcatatcgctcaacgccaacgtagccccagcggtctgtcctcgtgcggccaagacctcgatagcgaatccggcgcgatcctcggccacggccatcgcatccaataccggtcggtcaacgttggcggacgtgacgccatcaagacgcgccggcgtcacctcaggcgcggactgcccgaatttatcggccagaaaagccagccattgcttggtctgcgcgtcacgtaacgttccctcggcaaaacgacccgaacaatacccggcaacgtcaatccaagtcaggggagcggccaggccggtggcatactgctctaataacggcgtgccttcagccggatgggtggcgtagtccgccaacgtcatcgctttctcgcaagggctcatttgagcttccgcctcggcccgtccggccagtcgcggcatcgaacacgccgaaagcgaacacagcatcgcgctcgcgcatagtgcggatgccaagcgccgggtaaaccgtcctgaagagaagcgtgtctgcatggaaacctacactaatagctaactgtgaccactcataggccatgcgccacataacttcataggaggtacggatcgatggaactggacctgacaggaatacacaagctcgccgccgagcaaggaatcgaccccggaaccctggatgatgcgctggcagaggccctgcgcctcgcctacctcaagactccgcacgccgccaggcacgcgcgtgtggagcttgacgaacgttccggcaacttcaccgtctgggccgccgacgaaatcccggtcgagcccaccgaggacgacccgcaccccgctcccaagctgggcgaggaatacgacgacaccccgcgtgacttcggccgtctcgccgccgccactgcacgccaggtcatcacccagctgttccgccgcgccgaagatgagaaggtattcggcgcgttctccggtcagaagggcaagctcatcaccggcatcatccaacaggatgcttccgacccctccaacgtgcatgtcgcgatgggcgatgtcgaagccattctgcctcgccgtgagcaggtgcccggcgaacgttaccgccacggcgaacgcatccgcgtgtacgtggtgaacgtggcccgtggcatcaagggcccggaaatcgtggtgtcccgctcccacccggagctggtccgcaagctgttcgagcgtgaagtgccggaactggtctccggtgccgtgtccatcatggccatcgctcgtgaggccggcgcccgcaccaagatcgcggtcaaggccaacaccgatggcgtgaacccgaagggtgcgctgatcggccccggcggcgctcgcgtgcgtgccgttatggagaaccttggcccggagaagatcgacatcgtcgactactccgacgatccggccaagttcgtggcagccgcgctgtccccggctgtggccaccggcgtacaggtgatcagcgagaagaacaagaccgccatcgccttcatccacgacgaccagctatccctggccatcggcaaggaaggccagaacgcacgactggcagccaagctgaccggctggaagatcggcatcgaatccgccgaggcccatgccaagaaggtcgccgctgaaaaggccgcccaggctgcggccgaggctgctgctccggaagccgaataggccgccgggctcgaaggcgaatgatcttcagggcgcattatttcctgatacgagccgcgtcagcaatggcgcggctcgctgcgtctacgctatccagcgctatgagtatgcttgattggcgtatgtgggctggtgcagtgtgcgcgaaatcgcccacaccagagacgaggtaacacgatcatggtcgcacgatgagacagggtaggcttgccgtcatcaccaactgaccacgcccatgcacgcgcgtggtcacagaataggagtaattagtggcgaaaccacgcgtatacgaactggctaaggttttgaatgtcgatagcaaaaccgtgcttgagaagcttaaggacatgggagaattcgtcaagtccgcttcttctacgattgaaccgccggtagcccggcgtctgaaggcagagttcgccaaggacaacgccaagggcgattccaagcccgcatcttccgtacaaaagcctgctgccaagcccgtgcagcagcgccgcccggccgcaccttcggccccggcttccacttcatcttccgcaccgactccggccgctcccgcacgtcaggcatcgcccgcctcggcacatcagcaggctccgactccgggcgcaccgacaccgcgtccgcagggcggcgcacgccccggcatgccgacccccggccgccacggtcagcacgacaaccgtgagaatggtcgcgataatcgcgaaggccgcgagaacggtcgtcagagtcgcccgaacgatcgccgtaacaacgatcgtcgtaacaaccagggccgtccgaacaatggccagccggggcagcatcagaacaaccgcgacaatgcttcggctccgcgcccgcacgctcagggcggcgccggtgccaatggcggcaatgccgctgcaaacgcgattccgcgcccgcacgctcagggcccgcgcccgggcaacaacccgttctcccgcaagcagggtatgcacaccccgacgccgggtgatattccgcgtccgcatccgatggctcgtccgactgctgatagcggtcgtggc

SEQ ID NO: 2863 - DNA, 11281 bp, Unknown
  R36_18m  MAG No. k141_33284
gccaaggcacgtcgaacggtgattacggcaacgcctatgccgccggccagtgcacgtattgggcgtatgaacgccgtaagcagatgggcattggcacgccgtcctatctcggcaatggcggcgactggtggcgcaacgccccctcgtacggcttgcgcgtggaccacaaccctcaggtcggtgcggcgctctccttcctgcctggtcaggatggtgccgacggtacctatggccatgttgccgtagtcgaagccgtgtatggcgacggcacattccagatctccgaaatgaactggggtggtccgtggaacatgcacaaccgcaccttgaccaatttgggtcagtactggttcgtccactgaccggttggttcggccgatatatgcggttgaagggttcctcttgaagaggaacccttttcgtattcgaggccggtccgtgatatcgtcggatgttgcgttgctacccacgagttgctacccacgagttattgcccacgaaaggaggagacatgcccaaggaaaccggtgagaaactcatcgtccagaacaagaaggcccggcatgactatgccatcgaagacaagtacgaggcagggctggccctgaccggcaccgaggtcaagtcgttgcgcgaaggccgcgcatcgctgtccgaggcgttcatctccatcgaccgccgtggcgagatgtggctggagggcgcgaacatccccgaatacctgaacggcacatggaacaaccatgcgcccaagcgcaagcgcaaactgctgctgcaccgactgcagatcaccaagctcgcccgcggcatcgaagccaagggatacacgattgtgccgctgagcctgtacttcaaggacggtcgcgtcaaggcggagatcgcgctggcccgaggcaagaaggaattcgacaagcgccaggccctgcgcgaagagcaggacaagcgcgaagccctacgcgccatgcgctacgccaacatgcgccactagtcccgcctcttggctcccctccggaggggagccaagagtaggatgtccgcgttgtgggccatttcgcccacgattaacgcttccgtagcattgcactcctacgctctggaaccatctgggaaacatacccgcccagctgactatccggagagaggaaatccaatgtctctaagcaagggaatacaatccgctgcggccgccgccctgagcgcggccatgctgatcgccgtggcggcctgtggcacgactgacagcaccgacaccgcatccaagagcggcgattcatccaaggactcgtccagcacttcgattcaaggcttcgacaccagcagcatccagaaggacgacgagattgccgcactgctgcccgattccgtggccggcgacggcacgctgaccgtcggcgccgatacttcctatgccccggccgagttcctggccgaggacggcaagaccccggtcggctttgatgtcgacctgtccaaggcgctggccgcagtgttcggactgaaggaaaacaccgtctcctccacgttcgattcgattatcccgtccgtcggctccaagtacgacatcggcatctcctccttcaccgtgaccaaggaacgcatggaggctgtggacttcgtgacctacttcaaggccggttccacgttcgtggtgcagaagggcaacccgaacaaggtcgactcctcgaacctgtgcggcgtgaaggtggctgtgcagaccggtaccacccaggaagaggaagtcaacaaggataacgagcagtgcaaggcggacggtaaggatgccatcgacatccagtcctccaagctgcagaccgatgtgactaccgccgtggcttccggtaaggctgatatcttctacgccgatacgccggttgccggctacgccatcaagcagaccggtgatacgctcgaggccctcggcgaggacgttggtgtgacccctgaggccgtggccgtcaagaagggcgattccaagaccgccgaggccgtacagaaggccatccagaagctgatggatgatggcacgtacaagaagatcctcgacacgtggggcgtctcttccggcgccgtcgacaaggccgagatcaacccgtccgtcgagtagtttcggttactatgaagactcccgttgccctgcggcgggagtctttttgtatatgtatgcactgtagtgtataaatatgcttaaccgttgatcgttgccgttgaagcggcgtaagagagaagaagaaacgattatgcagtccaccaaactgaagtccattatggccattgcactgagctcggccatgctgttcgccaccgccgcttgcggcgcctccgacaaggccgatgccggtacggattccgccaagggctccgatgccgccaccatcaccagctacgatgtcagctccgtggagaaggatgacaccatcgccgcactgctgcctgaatccgtgaccaaggacggcaagctcaccatcggcaccaacccctcctacgccccggccgaattcctcgacgccgacggcaagacccagatcggctacgacatggatctcgcccgcgccatgggcaacatcttcggtctcgagaccgaaatcgtctcctccaacttcgatacgatcattccggccatcggctccaagtacgatctgggcatcgccgcgttcaccatcaccaaggaacgtatgcagtccgtggacttcgtctcctacttcaccgccggcatgggctatgcagtggccacaggcaaccccaagaacgtcgatgagaacgacctgtgcggtctgaacgttgccgtcgagaccggcaccgtcgaggaagaggccatcaacaagaccgccaagcagtgcaaggcggacggcaagaaagacatcaccatccagtcctccaagcagcagaccgacgccaccaccgctgtggtgaccggcaaggccgacgtcttcttcgccgattccccggttgtcggctacgccatcgcccagaccgatggtcagctggaacagctcggcaaggacttcgatgaagtgccgaacgccatcgccatcaagaagggcgattcccagaccgccgaagccgtgcagaaggccatgcaaaagctcatggacgacggcacctacactaagattctccagcactggggcgtcgaatccggcgcactggacaaggccgaaatcaacccggccgtcgaatagtcgacaagctgtcgcgaaaattcgaatggggcgcactgtttgtaacacagtcgccccattcgtgcactaaggttcaacgctagttgcaacttgcagttcaggctgcctaacacatccaaggaaccagattatggcgaagaaagaagtcgacggtgaggggctgaacatccccaaccgcatcaaggcgttgccggtcaagcgccccggcccgattgtggccgcagtgatcgtggtactgctcgccgcgatgctcattcaaggcttgattaccaatccgcgactggattggcccaccgtctggaagtacctgttcaacgagaacgtgcttgaaggcattcgctataccttggagcttaccgtgatctccatggtcgtggcgatcatcctgtcggtgattcttgccatcatgcgcaaatccatcaatccggtgctgcgcggcgtcagctggttcttcatctggttcttccgcggcacgcctgtgtacacgcagctcattttctggggtctgttcgccgtgctgattcctaagatcagcctcggcattccgttcacctcggtggagttctggagcatcgactccaacgtggtggtcaccgcattcaacgccgcatggattggtctggccctgaacgaggccgcctacctgtccgaaatcgtgcgtgccggccttgaagccgtggaccccggccagaccgaggcggccaaggcattgggcatgaaccgcacgctcatcatgcgccgcatcgtgctgccgcaggccatgcgcatcatcatcccgcccaccggcaacgagaccatcggcatgctgaagaccacctcgctggtcaccgccgtgccgttcaccctcgagttgcagtttgccaccaacgccatcgccaaccgtatctacaagccgattccgctgcttctcgtggcctgcttctggtacctgctgatcacctccattctgatggttgtgcagtcccgcctcgaggcgcacttcggcaggggcttcgatgcccgaccggtgggcaccaagggcaagcagacgccattgccgggtaagaccgacggtgaaccgaaggatgacgtggacaagctcaaccagaccacatttgtcggattgaatgcataaggcgggagcgcgattatgactacgaatgacatcaccaactccgctccggtcgtgcgcaaggcggctgacggttccgtgattcctgccgtcgaggccgtgcaggtgcacaaggcgtttgggccgctgcatgtgctcaagggcatcgatctaaccgttatgcccggtactgtgaccgtgattctggggccctccggttccggcaagtccacgttcctgcgtctgatcaaccagctggaaaccctgaccggcggttccatcgaggtgtacggcgaactcatcggctacaagcacgtgaccaaaaacggccaggacatgctacagaccttggacgataaggagatcgccgcacagcgctctcgcctcggcatggtgttccagcgcttcaacctgttcccacacatgaccgcgctggagaacgtgatggaagccccgatccacgtgcagcaccagtccaagaaagccgcctgtgacctggccgtggccgagcttcagcgcgtcggtctgggcgatcgcatggactattacccctcccagctgtcgggtggtcagcagcagcgcgtggccattgcccgtgctctggccatgaagccggagatcatgctcttcgatgagccgacctccgcccttgaccccgaactggtgggcgaagtgctcaacgtcatgcgttccttggccaaggaaggcatgaccatggtgtgcgtgacccacgaaatcggcttcgcccgcgaagtcgccgaccagatcgtgttcatggacggcggcgtagtcgtagaaaagggcggccccgacatcatcgaccaccccaccgagcctaggtttaaggacttcctacagcatgtgctgtaggaaggctgttatattacctcagcactgtcgtgcttcggcgtcgcctacggggagcccactgggctccccgctttacggctccgcctacagcacgtgctgtaggaaggctcgttgttgcagctccaaaagcgtacgctgatgaactcagcgtacgcttttcacgaaggggcatgttccaatcctgcaaaggcggcgggttggattcgctttgcgcaataatcgtccgctaggctggtgagccatgtgtggaatcgttggatacgcgggaaatattgaaacggcatgcggcaagcctttggaggtctgcctgcaaggcctggaacgtctggaataccgaggctatgactcggccggtgtggcgctgaccgcgcccggcatggataaggtggtcgtgcgcaagaaggccggccgtttgaagaacctggtcgaagacatcgagcgcaagccgatgccgctcgccacggtgggcatcggccacacgcgctgggccaccaatggcgagccgagcgacgtgaatgcccacccgcacaccagcatggacggcaaggtggccatcatccataacggcatcatcgaaaacgcctctcagctgcgtttcgacctgcaagccgaaggctaccgattcgcctccgccaccgacactgaggtggccgctaagctgctcggcaagatcgtggacaagattatcgcggacgaaggcaagccagacttgttcaaggctgtgcgccgtatggcccgcatgcttgaaggcgcgttcaccattctggccaccgactgccgccagccggacatcgtggtcggagcccgccatgattcgccactggtcgtgggccttggcgagggggagaacttcctcggttccgacgtcgccgcattcgtggcctacaccaagcgcgccatggaagtcgaccaggatcaggccgtatgcgtgtccgccgacaaggtcatcgtcgccgatttcaacggcaacgtggtcgaaaacccgaagacctacaccgtggattgggatgcttcggccgccgaaaagggcggctgggattcctttatggacaaggagattcacgaagaccctgccgcagtgcagcgcaccctgcttggccgcttcgacacgaatggcgacatcacccttgatgaagtgcgtatcgacgaacacgacttcaaggccatcgacaaaatcatcgtcgtggcctgtggcaccgccagctacgccggccaggtagccaaatacgccatcgaacactgggtgcgtatccccgtggaaatcgaactcgcgcacgaattccgttaccgtgacccgattctgaccccgcgtacgctcgtggtggccatttctcagtccggcgaaaccatggatacgctgatggccctgcgccacgcgcgcgaacaggggtccaaggtgctggccatctgcaacacgcagggtgcctccattccgcgcgaatccgacgccgtgctctacacacacgccggcccggaagttgccgtggcatccaccaaggcgttcgtggcgcagattaccgccgcctacctgctgggcctgtatctggcgcaggtcaagggcgcgatgttccgcgatgagattcatcagatgctcgactccctgaaagacatgccgcgcaagattcagtgggtgctcgacacccagcccaagaccatccaggcggccgccgagcgcatggtgaacgccaactccttcttgttcctcggccgccacgtgggctacccggtggcgcttgagggcgcgttgaagctcaaggaaatcgcctacacgttcaccgagggcttcgcggccggcgagctcaagcatggaccgatcgcgctggtggacgagggtgagcccgtggtgttcatcgtgccgccgcagcgcggccgcaatgtgttgcacgccaaggtgatctctggtatcgaggaggtcaaggctcgtggcgcgtacatcatcgccgtggccgagcagggcgacccggatgtggaacggtacgctgacgtggtgttctggcgccccgcctgcccaacgctgatgagcccgctggttgacgtggtgccgctgcagctgttcgccatggacatggcaaagctcaagggctacgacgtggacaagccccgcaacctcgccaagtccgtgaccgttgagtaagccacatcggtatgtgattgacgagcctcatattccgtttgagatggacgtgctgtatgaggacgagcggatcatcgtggtggacaagccgcattttctggccaccatgccacgcggcatgtggtatcggcagaccgcgctgatccgattgcgtgagcggctgggggagccggacatcacgccagcgcaccgattggaccgcatgaccgccggcgtattggtgttcgtgcgggattcggcctgccgcggcgcgtatcagatgctgttccagaaccggcaggccgtcaagatctatgaatgcctggcaccctgccggccgatcagcggcccacgattcggcacgatcatgcaggtcgaaccgccacgcccgttcccattgctgcgccgatcgcacatcaccaaggaacacggcacgatggccgcattcgaggaaccgggtttggccaacgccgaaaccctcatcgagcgcggtgacctctgtttccctcccgctggcgggaggtggcgcgaagcgccggagggtggtccccatccgggaaatcaccccatctgccgctacacactccacccgcgcaccggcaaaacccaccaattgcgcgtccacatgaattcgctcggcctgcccatcgtgggcgacgacttctacccgcgcatccagacacgcccctacgacgatttcagccagccgctgcaattagtggcgcgtgtgctacgattcaccgatccaataacaggcgagaagcgcgaattcgtttcccgtgtgccgcttaagatctgatttcttaggggggatggcgagaccaatccccgcccgtccgaatcactgtccctttcgactggccatccagctcattgcatcgtcgtacaccatcatgatgcgcttgcgatagctatcgatgaattcctgcgcaccaatgctcgcgataacgtcgtgagcgggttgcacggtgctgtcgaatgcctccggcagcctatccaccaaggtgtggaatcgtaaaatcacggattcctcatctaatcccatccgctgtgcgaatcgttccagatgtttgcggcgcaatcgaagaagatctcggcgtccgccgatgttcatcgccaaagtggcatttatgatctgcttgccatgccccaaataagggaacaccgaagcaaggtcatagagcggggcaagccgcacggacgcgccatcgagcaatagcgagtagttcttggcgtggctgtctgttgccccgacgagataactggcgaggatgccgtcggtgaaggctcggatattgctttcggcctgatcgggcagaccgtgcttgcgcaacatttccgcatatgcattggacgttgggccgttgtgttcctcgtatttcagcgatgagggaatgcccagcgcttgggtaaagtcttcttggtgcagggccgtcaccgtaccattggcggacactatacggtcataccgctcgctgatgatggctgggaccccatcaaagatgtgaaaagaggtgtgggccacgggtattcccatcgcctccacaatgcgcatggtgatgtgttcgttgaatgcttggtgtggaagggtcggtatgccgggcttgatgatatgagtcgtccgcgcgattccagtggtggagaaccatgatccattgcggttcctcagtgcgatcttgccctgctgtcccgcgaccgaccaatgctcgtctacgcttgcggactggatgcctgtgggggcggctgcgcgtagtcgattcgcgatctgcgaatcgctgattggaataagcgaatcgtcatctatgggcaagtgcgggtcggcggacagccgtaatgcgccggtggcatcgaatccgatggcttgcaacagatcaaatgcgcttgtcgatcgggcatgatgcaatcgcatggcttcatctcgggcctgaggggattccgggaccagggcctcaaggaaattacgcgggatgtcgcctgaatattcggctgcggtaatgggcatggaaagcgatattggtgtgggtgattgcgaccaacgataggaatcgtgatattggaaaataatgctgccatcgtttgttcttcgaaactggccgatgggtgtttcgccgagaaatgcattgagagtgttttcgctcatggtgtcaccattcatagagttcggcgggctgcggggttttgcggacatccagcgacaagccaagctcagtcagagcgctgagaatggtggagaatccgggattggggactcgggcgtgttcaaattcgatcagccagcgacgtgacacgcccagccgttgggccatgtcggtctgactgatgccctggcgttgcctttcatccttgataagccgcgcgtattcggcgatatccatgacaatcatgtgcaaaatatatcacagtatagtaaagtgtgcaatattctgcacatagttggaaatgtgcagaatattgcacaaccgagtcgattggtcggtgcggaattgcctatggatcactggcaggtgaatcactgacaggtaccagtggatgccagcacatgccgctcgtcagctgatgtcgcgcacggaaccgcgttcgatcagttccggcgggattacggttttgacgccgaccggtatcttctcgccttcgcattgacggcggaccatggagaaggcggtggcgccaatgtcgtcaaagcgcagcttcatggtcgtcaggttcaagcgcggaaccatatctaccagcgaatcatcgacgcccacgatgctgacatcctcgggcacgcgcttgcccgctgactgcaacccgagcattgcgccgtatgccatttggtcgttggcggcgtagatggccgtgcagtcggggtcgtgggccaacgccacgccggcctggtagcctgaatccgcgcaccaatcgccgatgtacatgctcggtacgcgtgctcccatttgttccaacgcttctcgccaaccgcgggcgcggctttcggcggcgcgcgaggtggacggtccggcaatgtggtagacggtcttgtgccccttgttcatcaggtaatcgacgatagcggtcgagcagccatactggtcggcgtcaacggtggggcagtggtcggcggcggattcgcagatgagcacgactggaagttctcgcggaggcttgtatccgacgaaatcggagatgcgttcctccggcactacgatgacaccatccaccggctgacgctgcatgcgatcgatggcggcggaaagcgtgcgttccgcaccgtggcgcatggtctggatggtgactgaataatcgtcatcggccgcgttggccacaatagaatcaaggatgcgggcgttgccgaacgtggcggtgttgaacatcaccacgccgatatcctggaagcggccgtgctttagggctcgggccgcataattcggacgatacccaaggcgtttcattgcagcttcgacacgctggcgtgtttcgggtttcaccgcatcgctgccattcgccacgcgggacactgtctgtggcgaaacgccggcggctttcgctatgtcttgcatggacacctgtgttggtctcgacatttcaccctcgcttgactcattaatgtcggtgtttcgtttacaacgcttatcttagggacgcttacggtaacgataacatcgttgtcttcgtgaccattgtagcagagtgactgagaaacccttaattcaacacggtactcaacacgattggataatgttacaaatggtgttatgatgataacgcaaacattttggtcaaccttcgaaggagaggggttgggaatggcttcagccgatatcgcagctgcgcccgtgcattcgggcaaggctcgtgtgaataagcacaaggccgattggcgtggatggaaattcatgtggccttttgcggtggtgttcgtgttcgtgttcatcgtgccgatcgtgtacgccgtttatatttcgttcttcaagaagcagatgatcggcggcaccaagttcgtcggcttcgagaactacgcgcgcctgttgggtgatggccagttctggagca

SEQ ID NO: 2864 - DNA, 18348 bp, Unknown
  R36_18m  MAG No. k141_33600
cgaacaccgagctgaccccggtgagccttggcctgccgggctccctgccggtgatcaacaagaccgccgtcgattacgccatcaagctgggtctggccctgcactgcgaaatcgccgagtggagccagttcgcccgtaagaactacttctacccggacatgccgcgcgactatcagatctcgcagtacgacaagcccaccaacggcaacggctacctggacgtcgagctggaagacggcaccgtgttccgcgtgccgatcgagcgcgcgcacatcgaggacgacgccggcaagaacacccacgtgggtggcgccgacggccgtatcgaaggtgccgaccactcgctggtcgactacaaccgcgccggtgtgccgctgatcgagatcgtcaccaagccgatcgagggtgcgggcgaccgcgctcccgaaatcgccggtgcctatgtgcgcgccatccgcgacatcgtgcgtgcgttgaacatctcccacgctcgtatggagcagggcaacatgcgcgctgacgtgaacgtctcgttgcgcccgagcccggacgctccgtacggcacccgttccgagaccaagaatgtgaactcgttccgcggcatcgagaagaccatccagtacgagattcgccgtcaggccgctcgtctggacgacggcaaggagattctgcaggagacccgccactgggatgaggcttcgcagaccaccgccggcggccgtctgaagtccgatgccgacgactaccgctacttcccggaccccgacctcgtcatgctccacatcaccaaggagcacatcgaggagatgaaggcccagatgccggaaatgccgcgtgagcgccgcaaccgcctcaagtctgagtggggcctgagtgatctgcagatgcgcgacatcctcaacgccgacgccctcgacctgattgaggaaaccgtcaaggccggtgccaaggccgccggtgcccgcaagtggtggctgggcgagctttcccgcgaagccaacgccaagggtatgtccctcgaagagctgccgatcaccccggccgatgtggccgaggtcgagaagctcatcgcctccggcaagctcaacgacaagctcgccaagcagaccgtcgaaggcgtgcttaagggcgaaggcactccggatgaagtcgtcaagaagcacgactacaagatcgtcgaagacaacggtgccatcgaggcggccgtcgacgcggcgttcgaatccaacccggatgtcgtcgagaagctcaagagcggcaacatgaagccgatgggcgtgatcatcggtgccgtgatgaaggccacgcgcggtcaggccgacgccaaggccgtcaccaaggtcgtcatgggcaagatcaagggctgattagattcactggctcccgctggcgggagctgtcgaacggagtgagactgagggtggtcgccatgtacggatgaccaccctcagtccgcttcgcggacagctcccgccagcgggagcacttatttgtagggagatcctccagttcaaattcgttggacagctcccgccagcgggagcctttattgattctgtaagaaagtcgtctcagagcatttccagcgttcacccagtcgagtaagatatgttcggcactggaccgtgagccgaaacaagccgaaccgggggatgtataccgatgaccgcaaccaacgagacgctgagcatggctaccgaagcgcaactgaagcgcgatctgccacagagcatcgtcattccgccaatccgtggcgaaatggtgcacctgcgccccgccaccgtcgaggacctgcctcgtttggatgaacttgatgccttctatggcgcatccaagatcaccggcaaggatgcggtcaccgaacgcgccatcgtacacacatgggtccgccgctcccaagcctgggaagccggtcaggcacccgccgaatccggcgtgggcgacccggaatcccgccgcaccatcgcatgggccgtattgactgacgccgaccatgacgatgacggtcagctcgatgcggccagcaccgataatgtcatcggcatgattttcctcatcgacatcgacggctggtccaagtccgcccgcatccagatcatcttgggccgtgagtaccgtggccgcggctactcccgtgacgccatgccgcgtgtgatgacttacggctttgcgcccgaaccggccggcctgggcatgcaccgcatctgggtgagcgtgccggaaaagaacagccgttcgatttcggtctaccagtcgctcggcttcgtgccgtccggcacctcgcgcgacgcgttgtgggatgtcgaaaacaacaaataccaggaccttatcgtcatggacacgttggtcgacgagtacgacccgattcgttcgcttgacgcttttggtatgcacttgattgaggacaacccgggtgtcaaggaagcgctgtccgcgcgtgagcattccatcgccatccagcagaacaagccggaacccgagctggcacagcgtggtgaggcagccgccgtcacgacgagtgacgtgcagtcccaggcccagacgccggcggccgcacagccagtcgagccacaggccgggcaccccgacgatacgcagaagaacgcgcgccacagtctcgaagaggaaagcaactggccgtacggccaggcggaacgcaagccctcaaaggaagcatggtggcgtacgctgggccgcggccgcaaacgcgatacggaaagtgagtgagtaaacaagcatgagtgccgaggatctcgacaattacgaaaccgacgccgaactcgcgctgtatagggaatatcgtgacgtcatcaagctgttcacctatgtggtggagactgagcgtcgcttctacttggcgaataaggtcgatttcaacgtgcgttccgctggccaggacgtgtatttcgatgtgcagctgactgacgcatgggtatgggatgtctaccgttccagccgtttcgtcaagtctgtgcgcatcgtgaccttcaaggacgtgaacgtcgaagaagtccagaaaaccgatatcgacattcccgacgatattcactgacaggcaatcgtctgatacagcctgtattgacaatgcgcggcattccgtcatcttacggcggggcgtcgcgcattgttcatacaacgcatagcaaaagttcagattcgtaaccttgccatcgtgtgtcttgtttgcttgcggttgatagaagatgatgctgcttgcacttgcaggaatctcgctgaatctatggaaggttcgtcgctgacgaattagcccaagaccaaaccgattcgccgcgctgtgcgtgacgcagcgttgccgaatacccctacctcacgattggatgcgtcgcctttctgctgatggaagacggcgcatcggtcgtatatcgggagaattctgtaagcattcgctcatctttcggtgtgcgattccggggcttctagtaaactgtctctgattttgcgtttataaggagcataatgaccgacaagcaatccgtagtgattatcggcggcggtccggctggacttaccgccgcatgggaactcgtcaaggatggcggcgcggaaaactatgacgtgaccgtgctggaggggacccgcgaattcggcggtatctcgcgcaccgtgaagcacaacggcaaccgcatggatatcggcggccaccgtttcttctccaaagacgaacgcatcatggattggtggaagaccgttctgccgttgcagggcgcaccctcctatgatgacaagaagctcggccgcgaccacgacatggagccgggcggccccgatccggagacggaggacaaggtgatgctcaagcgccaccgcgtgtcccgtatcttctggaaccgccacttcttcgattacccgatttcgctgagccccaacacgttgaaggccatgggcttcaagctcaccatggtggccggcttcagctacctgaagtccatgttccacaagctgccggaagacaacctggagaacttctacatcaatcgtttcggccgcaagctgtattcgatgttcttcgagggctacacggagaagctgtggggccgccacccctcccagatctccgccgactggggcgcccagcgcgtcaagggcctgtccatcatgggcgtgctcaagaacgccttccagaagcttagccccaggaagcgctccaacgcggaggtcgagacctcgctgatcgaggagttctggtatccgaagtacggtcccggccagctgtgggagaccgtcgagtccaattgcgaggccgccggcgtcaaggtgctgaccgacgccagggtggtcgaggtccgccagaccgatggcgccgtgtcttccgtggtgtacgaggattccgagggcaaccgcaccgagctttccggcgaccagttcatctcctcgatgccggtcaaggacctggtcaacgccatcgacgcggccggcgacgatcccgaggccgctgattccaagcccgccccggccgatatgaccgaggtggccaacggcctgccgtaccgcgacttcgtgaccgtgggcctgctggtcaagcacctgaagctcaagaacaccaccaacatccccaccctcggcaatccgccgatcgtgccggactgctggatctacgtgcaggacccgggctacaaggtcggccgtctgcagatcttcaacaactggagcccgtacctggtcaagaacgtggacgacaccgtgtgggtcggcctcgagtacttctgcgaggagggcgactcgttctggaacatgagcgaggaggacgtcaccaagttcgcgatctccgagctcacccgcatgcgtgtgatcaacggcccggacgaggtcatcgactcccatcgtgagcgcgtcaagaaggcgtaccccgcctacttcgacacctacgagcacatggacgagctcatcgagtacctcgacggcttcggcaacctctactgcgtgggccgcaacggccagcaccgctacaacaacatggaccactccatggccaccgccatggaggccgtcggcaacatcaagaccggcaagacgtccaagaagaacgtgtggtccgtcaacaccgaaaagtcctaccacgaagaaaagtgaataaaccttgttgagctccctcgtcacagagggagctttttttggttttcggcgggccgttttgcgttggtcgagttggcgttgtacagtaaacgaagttcgtgaaaactcagagacgcagcgaacattcatgagcggtgcaaccgcaataatcactcttaacgcctggataggcatgggtctgttcggtatggaaagggcaaccagtggcaaatagccagaatcttgaggatatgaagctgcctgagctcaaagagctcgctaaacagatgggcctgcgcggcacgtcgaccatgcgcaagcccgagctgctcgccaccctgcaggcggcgcgcaatggtggagagccgccggccggtgtgaccgtgcgcgctcccaaggccgccaaaaccgccaaggtcgtcaaggctccgcagtccgatgccgctgaggccaataccacagacaatgctgacgtggccacccagtcgccggctccggctccggccgccacggaaccgcagctcgatttgccgcttcccgtggccgacgatgccaagaaggacgagaccgaaccgcgacgcacccgtcgtaaggccgccgatgatgccgcatccgaaccgcgtgcggcccgccatcgtcgcgatgacgaccagtccgatttcgctcgccgcaagccgcgcaagaaggccgatgaggccggcgatctgctggccacgctcgatttgggagatgcagcgcctaccgagcgtcgccgcgagcgccatgaggacgtggaagttccgctgattcgccgagtccgtgatgatgaggacgagcagcctcgccgccgtcgtcgcactgcggaaaacagcgaagaaaccgtgcgtgacctcgacgatatcctggccacgctgcccacgcagaagcacgaggaaacgtccgaagacggcgagcagaacgacgatcacgagttcgtgcgtcgtaaccgccgcgaccgtagcgatcgcaacgatcgcgatacccgtaatgatcgcagcgatcgccgtaaccgtcgcatgcgtggccgtgatcgcgacaacgccgatgatgatcgtcgctatgatgatcgcgataatcgtagcgatcgcaatgaccgtgatagccgccgcgaagagccgcaggaggatctggtgccggtggccggcatcgtcgacgtgctcgactcctacgcttttgtgcgcacttccggctacctgcccggcccgaacgacgtgtacgtttccatgggccaggtcaagaagtacggcctgcgcaagggcgatgccgtccatggttcgattcgcgccccgcgcgaaggcgatcgtcgcaaccaacgccagaagttcgtgccactgcaggccatcgattccatcaacggccaaagcgtggaagaagcgctcaaccgtccgcagttctccaagctcacgccgctgtacccgcaggagcgtttgaagcaggaaaccgccccgaacaagctcaccggccgtatcatggacatcgtttccccgatcggcaagggccagcgtggtctgattgtctccccgccgaaggccggtaagaccatcaccctgcagaacatcgccaactccatcgccgccaacaaccccgaggtccaccttatggtggtgctcgtggacgagcgccccgaagaggtcaccgatatggagcgcacggtccagggcgaggtcatctcctccaccttcgaccgtccggcctccgatcacactacggttgccgaactggccgtcgaacgcgccaagcgtcttgtggagctcggccaggacgtggtcgtactgctcgattccatgacccgactggctcgcgcttacaacatcgcagcccctgcctccggccgcatcctgtccggtggtgtggacgcgcaggccctctacccgccgaagaagttcttcggcgcggcccgcaacatcgaaaacggcggctccctgaccatcatctcctctgcgctggtggaaaccggctccaagatggacgaggtgattttcgaggagttcaagggcaccggcaacatggaactgcgcctgtcccgcgagctggcggacaagcgactgttcccggccatcgacatcaacgcttccggcacccgccgcgaggagctcatcaccaacccgcaggaactgccgattatctaccgtctgcgtcgactgctgggcggcatggagcccgagcaggcctaccagacgttggtgccgcgcctcaagaagaccgccaccaaccgcgacttcctcgccgccatcgtgcagcaggccaacaccggcaacgcggtcaacggcaactgaccagaccgctgaacaatagtgtaagggctgcaccccgattgatacggggcgcagcccttgccgtatatgatgcaaatacatcaactatcacattgcagttgtagtattgccgtcaacgttcacatgcacgctgacgatatatgagatgaaagatgtatcaatgggttcgattgttttgggagtgggcaatggtgcggccatgttcggcgatgcggatgccagccatatcccctacggcgactatgacatctgagatatctgactttgcgcatcgtgcaaagccgcaatcgggagtatcctcgaatctatgagcgaaacgagcagcggctggcaaaggaccaccatcgactccgcccaggcggcggcccacccggaaaccgcacaagcggtggcgcgcatcaaagcgctgcgccaaaccatcgataacatcgattcggcggccatcgcattactggccgagcggttcaaggccacctcgcaggtcggcgtgctcaaagccaacgccggattcgcgcccgaagacaccaagcgtgaggactatcagatcgaacgcctccaccgcatcgccatcgatgccgggcttgatccggaaattgccgaaatgtaccgtgaattcgtggttaccgaagccaagaagcgccaccagcgcatcgccgatgccggtggcgacccgggcgtactcgacgtattcgcctgattcgcccgcagcgaatgggcacctttcggatattcgtctatagggcaagttgcctgcagcgactacattaatacgggaatggaatgcccatagtggccgactgtatgaatgggatacgtagatgagatgtggtgccgcactggtcagttgcgcattgtgcgtggcttcgattctcggcggtgcttggatgtctcgtccgactccggttgattacggtccggtgctcgctacggcaagtgatatgtacgccgtcgccgatgccgagggggagccggtccgttggtatgtggtagggaagggcggcgccggcaatggcgccagtgccgattccggcaatagcggttccactgataccgattccgccaatagtaattccggcacgtccaaggtttctcgtatccccgcttccgccgccaccctgccatggaaagtcagcgtcacctactcgcttgacggtccaaacgtcgaggcaaacgaggttgccggcgcatctggactgatcggcgtgtatatcgatattaagccgcaaaccaaggaggccaaccgtacgatcccggttgtcgcctttaccgtgcctacgcaggtagccgatgatgtttccgctgacaactccattacggtaaccacgcaaggttccaataccgtagtcgccgcagctggaaaagccgcaaccggcttggaattcagctgctatatgaacgccaaagacttctccatgagttccgtggcgctcgccgtattgccttccaattccagcagtccggcagttggtgctaatcccgatgccgcgaatgccgccgcacagcctgctgccgatacggatgtcgcccaactcgtcgcctctgccgccatactggtcgattcactgaccgacgccggttccggggagcatcaacagctcatcgagcagcttcaaaccctgcgcgataatgagcgtgcgctggacaagtccgtagtggccgaacgcgaaaccgcccataagcggacgtttgaagactatatggccgcgtatgtgggctcatataccacgcacctgtctggatcgattggtacctccacccagttgccggcgttgatgggcacggccggcgaactgtccggggatacgcctttggcacaagccgtactcgacttggccaacgcggtgaacaacgtcagtgccgcacatcagcatgccggtgcggtcgatgcgttggatgaggtgattcgccgcatccagcagcaaggcaccaccggactggtggatgatctgaccgccgaggcttcggaggaagccactcgaggctccaagcaatacgccgatggccagagccagctctccgccgcaatgattccgtattcgatgaaatacacggacgtctacacggccaatttgagcgccctgaccggcggcacgtcttcgggcgccaccgcttacgagagccaagccatcgccgaaaccaacggtagcgatgaactcgccgacgctcaatccaaggtcgatgccgcgatgagcacgcttgccaccgcctccgagcatacgggcaaagccacggccttgcgccagattgtattgcgattctccgatcagttcgaaggattcgcgtcctcggcttccggcagcgatggcgatggctcgtccggtgatgtctcttccggtccggtgaccgaggctcaggcactgactggcctggtcgattcgcaatcgcaatcgttctacggcaagacccgggccgcccaagccaagcgtaaggccgatgccgcccgtaagcaggccaaagccgcgcaacagcagcagtcgcagcattccaaggcctcactggtcgatgacaccatgtccatgtctgctggcgatgtgatgaactatgcgggtggtcttacttcggccatcggtggtggaggtaagttcgattcgtccaagagcgatggttcgggaacgaacgactcagccaagtcgagcgatactggcgattccggcaacaatcttgacaccgctccagtactgttcggctttggcactggcggcacgctgctcaagcatgacatgagcgcgctgatcaatgagaccgtggagatcagtgatgctggcacgctcttggcgcaggctgtcgcgcagctcgatagccccaatacgcaacaaaaaaccgccgaaaaccgatacctcatcgtgattccgacggtgtgatggtgtatgcgggaaaatccgcatgcgacaggtgcccaatacgcgtaaagtgcgttatcggtgtgggacgccgcatcaaaaactggctttttcgatgcggcgtcccacaccctcttgtaagtcagagctaactatagtttgaagaatggctaaattccaaggatttgttgattcggtctgtgggacgccgcgtatataaaacgtttgacacgcgtggtggcccacgctattgtgggccgccagcttacaatgcgggatatttgcgtgccgtcccacagtcgtgtcatccgaacgtcaaaaaacaaaagaggggaacctcaataggaggttcccctcttttgttgttgtgcgcaacgctcagtgctttggcttcttggctggccgagccgttaagcgggaagcccggtgggcttcccgtaggctcggaacgagcggcattgccgtgagacctactgttgttgtgcgcaacgctcagtgctttggcttcttggctggcggctcaccgagctcgctggcttcgacggcgacctcggtttcgggcgcgtcttcggcggcggattcctcggcgtgcttggccaccaagtcgaacttgccgaccacgcgaccggcctgcgcgatatcgcccaaggcggcgtgaatcgcgttcacaccttccgaagcagcggacagtgccacagacaggattggggtcttcatggagaccttggcctcggacttgatcttacgcagctgctccacggccttgccggcccaagtcagcagctcgggggaagcaccggtggcggcctcgacatacgggtccacgaccggccaggcggcgcgatgcacggaaccggaaccggcgtgcatccagctccacacttcctcggtggcgtacggcaggtacggggccagcagacgtgcgaaggcgtccaagcccagacccagagcggtgcgggcggacttcacagccttctcggacggcacattgccgtgctcgtccggagtgccataggcgcggttcttgaccagctcgatgtagtcgtcgcagaactgccagaagtatgattcgatgacttccagcgccttggaatgctcgtaggattccagcgcctcggtggcctgacgcaccaccaaagccagcttggccatagcggcgcgatccagcggttcggtcacatcggccgggttccacgaggtctcggcggcagcgcccacgtgatggttctcgtcctcacggccgatggccagcgcgaacttggtggcgttcagcagcttgatggccagtcgacggccaatcttcatctggccgatgtcgtacgtggcatcgaggcccaggcgagcggcggcggcccagtaacgcacggcgtccgcgccgaacttctcgatcggctcgttcggcaccacgacgttgcccttggacttcgacatcttcttgtggtcggggtccagaatccagccggacagcgtggcatgggcccacggcagacacttgttctccaagtgcgcgcggtccacagtcgagaacagccaggtgcggatgatgtcctgaccctgcgggcgcaggtccatcgggaaggtggaagcgaacagggccttggaggcctcgtccggctcggcccagtgggtcacgatctgtggggtcagcgaagaggtggcccaggtgtccatgatgtccttttcggcggtgaaaccaccgggcacatcacgctgggactcgtcgtagccctccggcacgtcgatggtcgggtcgatcggcagacgatcctcggacggagtgattgggtgatcgtaatccggctcgccggaagcgttcaccgggtaccacagcgggaacgggacgccgaagaagcgctgacgggagatcagccagtcgccgttcaggccgtgcacccagttctcataacgcacgcgcatgaagtcggggtggaactcgagttccttgccgcgctcgataagctcggcgttcagcttggcgtcggtaccgccgttcttcaaataccactggcgggaggtgacgatctcgagcggcttgtcgcccttctcgtagaagttcgtcatacgcttggtcggggtcggctcgccgtccagatcgccggactcgcgcagcttgtcgacgatgatcttgcgggcggagaacgtggtcttgccagcggtttcggcaaagacctcgcggccggccgggtcctcgatccagtccggggtatccatcacgatacggccgttgcgctggatgatcgggcgggtgggcagcttcaggtcgcgccaccactcgacgtcggtcacatcaccgaacgtacagcacatggcgataccggcacccttgtccatttcggcggccgggtgagccagaatcggcaccttgaccttgaacagcggggagtagacgtactggccgaagtactgcttgtagcgctcgtcgttcgggttggcgatcagcgaggtgcaggccgccagcagttcggggcgggtggtctcgatgtagatcggggtgccgtcctcaaagcggaaggccaccttgtggtagaagccggggtattcgcgcgattcgagctcggcctgggccacggcggtctggaaggtcacgtcccacaggccgggggcgtcctgctggtaggcctcgccacgagcgaggttgcgcaggaaggccttctgggccacacgctgcgggtgttgaccaatggtgtggtaggtctgcgaccagtcaatggacagacccagcttgcgccacagggcctcaaacagcttctcatcctgagcagtcagacgctcgcacagctcgatgaagttcttgcgggaaatcggcacctgatccttggcgtcgatcttcttgccatcagtgccctcgaacggcggcttgaagtccgggtcgtaaggcagagacacgtccacgcgcacgccatagtagttctgcacacggcgctcggtaggcaggccgttgtcatcccaacccatcgggtagaacacgtcgtagccgcgcatgcgcttgtaacgcgcaatcacatcggtgtgcgtgtaagagaacacgtgacccacgtgcagcgaaccggagacggtgggcggcggggtgtcgatggagtagacggccttgcggtcgcgggtattgcggaatttgtaggtgccgtcttcatcccagacggcgcgccacttgtcctcaagtccgtccacaccgaccttgtcgggcagcggggtgaggttggcgttgatgatggatttgccttcagtcataaagccaaagtttatgcacgttgcatgacaagccgaactgtacagtaaacagcccagtaggctgttcgcaggcgagatacgaacgatcgaacgatagtgagccaaggactatcgggcgtagcccgtccgtgactgaaggttgcctacttcaccgtcaacccggccagcggcatgcgacgattgatcatcgaggtcgggtagccggagaccttggtggacgccacagtgaagcatttgcgggtatacagccaatcactggccgcatcctcgctgatcagccgggcgtacgccttcattcgtgcctcataatcggcgtcattagtggcggcgcgagcatccgcataggcctgttgcgcttcggtatggtcgtaatggaacatggaatcggggtcggcgaatatgccggcatcatccgtgccgtccatgctcatcacggtcagttcccatttgccgtccttgattcgtttggcataatcctcatcggagagcacttcaaggttcaccgtggggcgcggctgccgctcgatctgctgcttgatggtttcggccaacgaccggtattcttcgggaaccaccagattcaccgtagtcagatattgcgcaccgaagtaggagaacatctgcccagcttggttttcgtcatgcggatacagtccggtcaaatcttcgtatccgggttccagcgggctgatggggccgcccaatgctccggctgcgtcgggttgggcggaggcgatgccggctgcgtcgatttgatagcggaaggctttacgcgcctgttcgtcggagagcagcgaatcgatgccgttgttgtaggccagcagcaccttatccgtagtggccccctccttgacggtcaggccatccttgccgttcaaaccggtggccgtcgaagccgaaaccggtgccgccatatcgagactgccgtcggtcagggccttgctgagcgcatcggcgtcggagtattgcataaattcaacgatattgctggccgcttcggtgccatggtaggtatcgctgcgcgccagcttcagggaatggccaggctggaaatcggccacggtgaatggtccggaacctatggccttgcgttgataatcggcactggacgactcggaatcgtagacaatgccgagtttgccggacagcgctcgcagcagcgtcggattgggcttggcaagcgtaatgaccaccgtggtggcgttcggattggcgaccgacgtcagatcgcccaattcgtcgacgtccgccaccttgttggtcacgttctgttgcaacgaccacacggcgtccgaggcgtccaacgtatgaccgttcgagaaggtgacgcccgattgcagtgtcagggtgacggtcagtccgtcatcggaagtcttccagcttgtcgccagtcccggctgaatcttgttgtcttgatcgacggtcactaatgtctcatacacattgtcgacgagcaggcgctcggttgccgcagaggaatcggaccgaatatccaaggattgcggcatatcgtcgatgccaatggtcacatcggcatcgagggatgatcccggctggaaccggttttgcatgaacgtccatcccgcaaccacgagtgcgccgagtgccacggcgactccgagaaaaatcccccacttggaccatgtattgttccgcttgctgtgctgcatggttttcagtctagcggtggattcagcctagaatccgcaattcaccatgatgaggtatgagttagcgcttggacgtgctcttgccggcgggcggcgcatagctagggcaggtgtcggacagcgggcagttggcgcagtcgggggtacgtgcgtggcaggtggcccggccgaacagaatcagtcggtggctgagattcgtccactcttcgggcggaaaacaggcggtgatttccttctcgattttcacgggatcagggtgtgcggaccgccaatccgaccgccaacgcagtcgtccggttacgcgcatcacatgcgtatcgaccgggaatccggggatatcgaacgcgttgccgagcacgacgttcgcggttttgcggccgacccccggcaagctggtcagttcatccatcgtgcgcggcaccacgccgccgaaccgttcgtccagtgccgtggccagtccgatgagatgctgggttttcgaacggtagaaccccagcggatgaatgatgtcttcgacttgggccgggttcgcggccgccaagtcacgggcggtggggtaggtggcgaacagttccggggtgaccgtgttgacacgcttgtcggtggtctgggcgctgagcacggtggcgatcagcaattcgagcggattcgagaaatgcagtgcgcaagcgggtgccggaatcacctggcgcagaatgtcgtattcgtcatgcatgcgcgtgagacgcgcggatttggtttctctcatcgtatggacctaagcggcgtaatgtcgatgattgatggtttgtagcgctgctggtctgtcaggcggcggtgttgagatcgggggtatcgtcatcggtgccgatggcggcagaggatgctttggcggcctgctgtgcggcggcagtttccttatccgtctccggcgggtcgaatcggtagcccacgttgcgcacggtgccgatgaggtgttcgtattcgccgccaagcttggcgcgcagacgacggatatgcacgtcgaccgtacgagtgccaccgtagtagtcgtagccccatacttcctgcagcaactgggcgcgcgtgaacacgcggccggggtgctggaccaagtacttgaggagttcgaactccttgtatgccagatcgatggggcgtccatgcagggaggcggtatagccgttggtgtccacaatgaggtcgccggagcgaatctggccatcttccaccgtggtggtggattcggcgggagaaccggctgctgcggctgcgggagcgttgccgcgctcggagaccaatcgcaatcggccctcgacttcagccggggaagcggtggcgaccaccacatccgcaatgccccactgggagttgaccacggtgaagccgccttcggtcagcaccagcacgattggcgtggacaggccggaagcgtggatgagacggcacaaggttttggcggtcgccagatcatcgcgtgcatccagaaacagaatggtgttctccggcatcttcaccaagctggctgcatccatcggcagcacgcggacgcgatgagaaagcagggcgagtgatggcaaaacggtggcggggtcgctggcgaaagtcatcaacgtaagatccgtcacgctaatcccccttatcctgcaatgtgttacgcaattgctcggtgtggctgtacgagtcgtcagcggcgttatgccgctttcgcgcggtttttcattattctacgcgcttgtagtggacacataggttacaagtttgcggaatatggaacggcagacgtccatcaaccgatgacacggccgagcaccagtgcggttgcggcgatggtcacgcccatcagcattaccggcatcaggccggtaccgatccacggatagcggatatccgggtccggatcggcgtcacgcacccacaacgtggaggccacggccaaggccagtcccaaaacgatgaggatgatcagggcaacggttcccgcaacggtgcccttggcgagcatcgcgcccaaatcaggcaggaagcaccagccggccacggcgagagccgccacacctgaagtcacggcgtgagagagtgcgcggataagatgttcgcgcttctcacgagccatctggcgcccgaaggagaagaccaccagcaccaccagcagcaggcccatggccagtgcccatgaataccaaggaagtaccgagccatccgcagcggtctgatccggcggaacctcgctggtcgggaaaggtacgatgacgaaaatcagagaaatcgcgccaaacaccaaagtgacgatacgatccagcatgctgccgcggaacggccagaacacgacaaatgcggccaacgtcagagcggcgataatcaaagggatgatggggacggtgccaggggagggaatgaccgtggctgcgatgagcagtacataggacgtcagttgggccaacaacatgctcagggctttgttcttccaaccctcctgggtgatctcggtcatgatacgcctctcagataatcgaatttccatcccaatcctacgtcgggcattggaacggtgaaatcaaacaaaatagccctttctggtgaaggggcttatgacactaaatcagaacgcgataacgcccaaatgctccaacagcactttgacgccaagtagaatcagcaccacgccgccggcgatctgcgccggctcctgccagcgggagccgaacgcgcggccaatgtacaggcccgcagcggagaacagtccggtgaccacaccgatgctgaggatggcgaatgccatatgggctttggtgaacatgaaggtcaggctcacgcccacggcgaacgcatcgatgctgcaggccacggccaggggaagcatatgcttccaatcgaactgggcggtctccttggagttttcctcatcttcttcgaaggcttcgtgaaccatgttgccgccgatgaacaccaacagggcgaagatgatccaatgatcgaattgggttacgtatttgctgaatgtagatgccgcgaaatagccgagaatggggaacagcatctggaatccgccgagccagagggcgcttttcgcggcgtcttgcactcgtacgcgggatacggccagacctttgccaatggatacggcgaatgcatccatagctacggaaacagaaataagcaggatttgaatgattatcggaatcatggtgcgacagaaggttcatcgccggattaccgtgcgatgggcctcgaccagcgttcctacacgccgcctacgcctag

SEQ ID NO: 2865 - DNA, 3411 bp, Unknown
  R36_18m  MAG No. k141_33744
cgggcccacgggatgtcgtcggaggtgggcttgtggtcggcgtccgggccgtcccacacctcgtcgtacgggttgaggaagcgctgcatgtaccaggcgcgcggggtgttgtacacgtggtcggagtcggagtgggagccgaaggcgtcgcgcgggttgaacggggtggtgttctccaccgcgaggtccaaatggttggtttcgatgaattcggcaaggtcttcggaacacatgtgcgcttcctggtcgcccagagcgtcctcaaggtcgaattcgtcgataccgagctggttcggcatggtcacgtaggcctcgtccggcacgcgcttggcaatccagtgatggccgcccacagtttccagccaccagatttcgttggagtcggagaaggcgacgccgttcatctcgtaggtgccgaattcctcaagcagcgcgccgaggcgctggacgccctggcgtgcggtcttgacatacggcagcacgatggtcaggaagtcctcttcgccgatgccgccgggcacctcgggctcatcgcccctggccggcgtgtattccacgaacgggtcggcgccgagcacgcgctcgttggtggtcagggtctcggtggcgctcatcgccacgttcgcctcgttgacgccggcctcgccccagatgccttccttgaggtccgcgttcggcacggcggtgtactgcagcgggtcgtccggcagagtgatggtcaggtgggagatcactgatttgtattcgcgcggctgttcctccggtttcacgacgatgaagcgcttcgggttgaactcgccgttcgcggaatcctcgttgcgggcaatgatggtcgaaccgtcatagctcgcgtctttgcctaccagaatcgtggtgcaggccatagtgtgatggtgtcctttctcttattcaagctccccttgtcaggctgagccgttcagcaaacagcccggtgggctgtttgtaggcgagggtgggagataagtcccaccacagatgttgcgggcggtagcccgtccgtaattgcaggacgagctgtctcgcaaagcgagactgaggggtagtcactctagctgtctctcccccagtccgcctacggcggccagctccctcatcagagggagctcacatacgccaactaaaaatcacgccttaccggtcaggaagatgccgtcggtgtcgggcgcttcgccgctgttgcgcagcgcgtgcaacagctcgttgagccagaagccctgattcaagccgggcaacggcttcttggtggcccacacctgcaggtagtactcgtggtccttgtccggcggctgcggaccgttgtaccgcatgatcaccgctgggtcagtgctgcggcccaagaacttggaggccgaagaattgcggccttgcacggtctcgggaatcatggccggcagctgacgggagaagtccggcgggatggccaacgcatgcgaatcattgaagtcgtacatcagcgcgtcaatcggcagattggccacggaccagtgaatccactcgaagccgcagaccggaatcgaatccgggtccacgaactcccagtgcaggtaacgggcctcggggttcacatcaccgatgtagaacgggaaggagacgaccggcacgccgccgttgaagtactcaggcgcggcggccttggcaaaatcgtccggaatgacggtgaaatcggcggaaatcttcatatgtcccagtatcgctcatatgtgtgacgtactgggggctgtgcgttacggggtctctcccccagtctcgctgcgctcgacagcccccactcatcagaggggggctagttgcgtcgggttatgggatcagggcgcagaagagggactcgaataccagtagcgggttgccgttgccggctaggcgcttgcgggcgtgggccacttcgtccagacgggtcacggcaccggcccggttcaaccgcaccgacaattcggtgatcgacgagcggttctccaggttgatgaggcccaccgaatcctccgcattgttctgcagcaccgccacatctcggtagatggaggcgatggagttcagcgcacgatccaatacgtcgcgcgtacggcgggtgaccaaacgcttcacatcgtctttcttggcaatctggttgaatgcgccacgcagtttcggcgggatgcggtcgctcggtgccagtccgttgatgcggcggaattccgcttcctgaccggcggtgatgcggttcgcgtctgcctcggcctgggccttggcattgtcgataagattgccggccaacaacactgcatccgaggcacgggccagattcagcacaccgaccacaagttcatcgcggtcggacataacccgttcgtcggtggcgtacaacttggcgatgccgatatggccttcggcgagtcgggctgcacgctgcgccacttttggctcgacattggtggtggaggtcaggaatccggccaccgcctgggtggagggcacggcgaggttcacgatgcgtgtgcgcgagcggatggtgggcagcacgtcctgggcgctgggcgcgcacagtagccagatgcaatgctcggccggctcctcaatctctttcaagagcacgttggtggtgcgctcaagcatgcgatccacgtcttcgatgatgatgatgcgccacggtgcggtggcgggcatctgctcggaggtagtgatgatctcacgcacctgatcgataccaatagtcaccttgttcgtggtcagcaccgtgacatccggatgcgtgccggcaagcacctgctgggtgacgcgcgtgggctcagcgctcatgccgtgatccgggctttccagcgccgccgcaaacgcacgagccatgttggaacgacccgatccgggaggtccacagatcagccacgactgggtgatctggctcgggtcgccctgcgcgatacggctcagcatgtcgattaccggcttttggccgactagtgaatcccatacgctcatgcgagctccttgatgtcggattcgatggcagcccataccgcttcaatgctctggctcgcatcgataacgcggaaacgattcggctcggcggcggccaagtccaagaaggcctggcgggtgcgggactggaagtcatcaccggccgattccatacggtcttccgcgtgttcgaggcgatggtgggacagggctgggtccatatccagcaaatacgtgcggtcgggcagcaggttgttggtggcccacatgcttaaggatcgaatctcttctggcgtgagttcgcggccaccagcctgataggccaaggaagagtctaaatagcggtcggtgatcaccacttcaccgcgctccaatgccgggcggatggtttcggcaacgtgctgggctcggtctgcagcgaatagcagcgcctcggcgcgcggtgcgatgtcgacggcgccc

SEQ ID NO: 2866 - DNA, 7326 bp, Unknown
  R36_18m  MAG No. k141_34446
ccggttttggccatgccaccgcccaagatgatgagtcgcggatcaacggactgagccaggatttgtatggtgtcgccgatggcgcgcactaccatgtccagcacatcgacggccttggcctccctctttttcgcgcgacgaatcaggtcgggcatcggcgggtcggcgttgggccacagacgccccacggatgcgcccgagcagactgtttccaagcatccgtattgcccgcaagggcacttgaggcgatgaggttcgactgggatatggccgatttcgccggccgcgccgctatagccatgcatcagcacgccgttttcgacgatgcccgcagccagtccggtgccgaagttcaggaacgcaatggtaccggccatgccgtccgcaccgcccaatacggtggccgcgccgacggcggcggcattgacgtcgttttccacatgggccggcacgcccgaacgctgcgagaccaacggccccatatccagcgagaccacgtcgagattcacgatattgcccacatgcccgctggccgaatccaccgtgcccggggtaccgacaccgatggccctcacctcgtcaaaacgctcacccgctgcctgatgtgctacagcgacgatgtcttcgatcacggcatcgttgccatgcctggcgggaatacgggcggaacccaataccgtgcccattgcgtcaaccagcacagcttcgatttttgttccgcccacgtcaacaccgattttgagattgttcatagtgttttcagacatcagtcctcccctgttcttcatcgaacgtttcgcttgatatcagtgtgcatccgactattgacaaccatcttaacaaattcccccaagacgacactcacatgcacgacacaccgaatgacatattgattgcgtcaatcaattaacagcgttaatatcttaatcaagttcagattcaaagacgagcggaacaactcgcaacggtgcagacaaggaggacttaagaccgatggcaacaaacaccacccatgccacttcccaagccagtgtctccgaatccaaccgctcccgcatcgtcaagcacctgtatcacaacggcatcagctcccgcgcgcaaatcgccaaggcactggaactcacccccgcggccatcaccaaaatcaccgcacgccttatcgaggccggcatgattgaagagaccggcgatttggaaggttccaagaaccgccgttccatcggtctcaaactcgacaccacgcggttccgcatcatcggcatcaaattcgcccgctcgctggtgcagatcggcgtgttcgacctgtgcggcaacaccctgagctttgaaaacctgcccacggtgtacggcaacaccatcaacggcaccatcgtcaccatccaccagcgcgtcgaacaactgcttgacaacgacccgtccattgtggccatcggcatggcggtgcccggcccctacctgcgtaacgtaggccgcaccgccgtggtgtccagcatgcagggctggcgcaaaatcaacttcatcgacgaattcgccaccgctttccgcgtgcctgtgttcatcgaacaggacgcccgcgccggagccctcgcacattatctcttcgacccgtcggtgcacgccgacggcaacctcgcctattatctggtcggcgaaggcgtgggcctcggcgtcatcgacaacggtcgtctcatcaacggcttcctcggtgccgccaccgaaatcggacacatctccatcgacgtcaacggccgcccctgcgattgcggcaacgtcggctgccttgaacgctactgctccacccccgccattcacgatacgctcatcgccgatggcaccgtggttcccggcgcggccgatatgacccacaccgaagccgcccgcgccctgttcgccaaagccggcgacggcgacgaagcgtcaatcgccattgtccgcgaagtcgcccgatacgtcggctacggatgcgtcaccatcttcaatggatacaatcctgagcacatcatcatcggcgacatcgtgtccgaagccggcccgatactgctcgatgaggtgcgcgccacggtggccgaacgggccatccccgaaatcaatgcctccacttccatcagcctatccaccctgtccgccgacgcggcggtctccggtgccgcagcagtggcggtgacccaattcctcgaacacccctcggtgttcttcgacgtctcctaaaccaagcgccgacatcacaagatgttccatacgaaacacccggtaaaagaaacaaaggaaaggaaaccaaccatgactaccccgatcgttctgagcctcggtgaactgctgtgggatatgctgccgagcggcaagcgagccggcggcgcccccgtcaacttcgcctaccacgcgatgaagaacggcaccgaaggctgggctatcagcgcggtcggcgaggatgagctcggcgacgaactgattgccaaggccaacgaggccggcatcaacaccgtcatccagcgcaacgcctggccgacctccaccgtcgaggtcgcgctgaagaacggcatcccggagtacaccatcgtcaagggcgtggcttgggaccacatcctgtacacccgccagctcatcgacgtggtctccaaggctgacgccgtctgcttcggcaccctggccctgcgctcccccgaatcgcacgccaccatcacggagctgctcaagcacaccaagccgggcgcgatgaagttcttcgacatcaacctgcgtggcgaccactactccaaggacctcatcgaggaactcctcaaggcggccaccgtcttcaagatcaacgacgaggaactcctgctgctgcgcgacatgttcgacatccgcggcacctccggcgaagacgcctcccgctggttcatcgaggaattcggccttgactacgtgattctgaccgccggctccgcctactccaccatcatctcccgcaagggcgaggtctccacgctggacactccgcacgtcgaggtgaacgacaccgtgggtgcgggtgactccttctccggcaccttcaccgcccgcatcctgctgggcgacacgctggcagaagcccaccgcaaggccgtcaacaccgccgcctacgtctgcacccaggccggtgcctggccgcagtacccggccgagatgcccgactatctggctgaaatcggcaagtaatccacccatccccttatccgccattcgtgcgacttcacgaatcgactgatcgcaaccggtgagattctccgaacaggaaatctcaccggtttttcatatggtgcgctcacactcatgctcttcacatcctttcgcgtgtcatgaactaaagcggtttagaataatgctgttcccttgatatgtatatccctcaaacaaagaagttgaatttatgacgaccaccgcgataccgaagtcggtctcggatttcatgcagcacatcacggacctgtgtggcaccgaacacaccgcctgggccgagaacttcaatgcctgctttgccgacaccctgaccaccacggtcaaacggcatgacgacggcaccacattcctgcttaccggcgatatcccggccatgtggctgcgtgattcgaccgcgcaattgcgcccgtatctggcccttgccgccgaagacagcgatattgcgaacctgatcgccggtctgatacggcaacagttccgctacatcatcatcgacccgtatgcgaatgccttcaacgaggaaccgaacggcgcctcctgggacaaggacgaccggtccgatttctccagcccttggctttgggagcgcaagtacgaggtggattcgctgtgctaccccatccagttggcttggatgctgtatgcgaacaccggcaacgccgatcacttcgacgccgaattcattgccggcgtcaagaagattcttgacgtcttcgagaccgagcagcatcatgaacgctccccgtatttcttcatccgcgacacggacatccccaccgaatcgctgagcaatgacggcaaggggtcgccagtggcgtacaccggcatgacctggtccggcttccgccccagcgacgacgcctgcacctaccactatctggtgccctcgaacatgttcgccgccgtggtgatgggctatctggaacgcatcttcggcggtgagattctggatgacgccgatatcgccgcccgtgccggcgagctgcgccgcaccatcaccgaaggcatcgaaaaccacgccaagacgacgaaccgcaatggcgagacgatttacgcgttcgagaccgacggcctgggtcacgtcaatatcatggacgacagcaatgtgccctccttgatggcggccccttacttggggtactgcgcaccggacgatccgacgtatctggcgacccgacgcacgctgctcagcgacgaaaacccgtactactacgagggcgagtatctcaagggcatcggctcaccgcacaccccgccgcgctatgtgtggcccatcgccctgtctatcgaggcgatgaccagcgacagcaaggacttcaaggcgcatatcctcgaccgtcttgtaaccaccgacgccggtacacatctcatgcacgaaggcatcgacgtggatgatccgaccaagtacacgcgcgaatggttcagctggtcgaatatgatgttttgtgaactggtcatggactatttcgacattcgtgtgaagcactaagacgtgcccgctgaatgctcattgcgcacccaccgcatgttctcgttaaggaaaggaacaatcattatgaccaataacccacggtatgcactcggcaccgaagccaaccgcattttcatggcttccgaaacctacgagctgctgaagttcggcaagggcttcccagcgccggatggcggttccggctggctgaacgccgacggcaccctcgacccctcccacggcgtcgagacgtggatcaccagccgtatggcccatgtgtattcgattggtgccatgctcggatacccgggtgcgggcgagctggccgacgcggcgctcaggggattgaccggcattctgcatgacgacgagcacggcggctggtacccgcaggtgttcgcggacggcacccatgcgccgggcaaggtctgctatgcgcatgccttcgtgattctcgccgcgtcctccgccctgctggccggacgtccgggtgccaaggaactgcttgacgaggcgcttgccacgtatgacaagcatttctgggatgacgaaatcggtttggccgtcgatacctggaataccgaattcaccgagctcgacccgtaccgtggtctcaacgccaacatgcataccaccgaggcgttcttggccgtggccgacgccaccgggaacaacacctatcgcgtccgcgccggccgcatcatcgaccatgtgatcggctgggcgaagcacaacgagtggcgcatccccgaacatttcaagtccgattggtcgctggacctcgaatgcaacgtcgacaagaaggatgatcagttcaagccgtacggcgccacgccgggtcacggcatcgaatgggcccgcttgatcacgcagtgggcgttaagctccttcgccaaccttgacggcgcacagccgtacgtcgacgccgccgagcatctgttcgcgcgtgccgtggccgacgcatggaacgccgacggcaccgtgggactcgcctacacgaccgactggaacggcaagcccgtggtcaccgatcgcatgcattggacgctggccgaatcgttgaacacttccgccacgctgtatgcggccaccggcgaggagatgtacgccaactggtacgccacattcgcccagtatgtcgatgagcatgtcatcgaccacgagggcggttcctggttccatcagcttgacaaaaacaaccacgtgattggcacggtctggccgggcaagtccgatctgtaccacgccttccagtccacgctgattccgttcttggacccggccgtgtccattgcgacggccgtgaagaacgctgaataatcgacagcatctaagcctctatatccttttttcttcctctttctcaacggcgttggcccccgtggaatacgggggccaacgccgtactggtcgcatgtcattgtctgcaagccgatgcaatgaccgttctacgccatggtatccatgggcttggcggtgctgtcccgaatcaccagtttcggggtgaggattcgccggttgccgctcacctgctctccggcaagcactttgagcagcagtttggccactttggcaccgtattcgctggcatcacgatgcgcggcggtaattgacggatacgccgcctcacaaatgaaactgtcttcaaaactgacaatggcgggcagcccattcggatagacttccgcatggccctcccccgcctccatctgccgagcggaataatcttcggccatggcgtgaagactggccgcggcgaggatctccgtttcatagatgaacgcggtaggcggcttcggtgaatgcagcatctccaacgtgagcatcgcggcctgttccgcaacaaaatcggtgaattcgatgttgatgaattccagctttcgccgtttggcaaatgcgcggaacgccgcgacacgcccctgtgaataatccaggttcggatcgccggaaagataggcgattcggcggtgtcccaatgacgacaaatgttcgagcacggttcccatcgtgcgtgaatcatcgatggacagtgacggcacataattgttcgggtcgggtcctccggcaagcactgcgcgcacacccagattcttcaacaattccgggcgtggatcatcggctcgcaaatcgacgaggataacgccatccacgcgcttgcgcgacgcccaatccttgtatacgctcatctcctcgttcaggaatcggcatgggcggtacagcaaaccatagcctttggggctgagcgaggcgtgcacacccgccatgaagtgcagcatgaagctttcatccgtgagcccctgcgtggatcgtgcgggggcaaagcctatggtcatggtcttcgaggatcccagtgcttgtgcggcgtagaccggcgtccagccgagcctggctgcagcctctttgacccgacgtttggtttccgcggaaacgccgggccgatcattgatggcgaaggataccgcggtctgcgagatgcctaattcatctgcgatgtctttcaggctcacacgctgcgtgccgtcagacgatgacgatgcctcgcgagcagatctcatgaacactcctttttacgaccgcattgcgactattgcgatacggttgacggcacccccgcattgggccatatgcatcaaccgtgcgctaactcttatgatatc

SEQ ID NO: 2867 - DNA, 17009 bp, Unknown
  R36_18m  MAG No. k141_34603
ctgccatccacgctgccgggcacgagcagactgtccgccacgaggctgtaggccgtaaatttcgtgccattccaaacgtggacggaaccgatgtggccattgagatcaagctcataccacaaatcgccgtttctcagcccgctatggttcggctcatacatttgagcgaagatcttgttcttgccgtcggcggtggtcttcgcgaccttcgcctcggcctcggccttggcgatgtcctgattgatggaatccaaggtctcctgtgggacggcactggccacggtcgccgaggcgatggacgaccagccggacttgttgccggcatggtccactgagcgtagcgcgtaactgtgctggctgcctatgctcagaccagtgacgatgtagtcaccctgtccggcctgtgtcgcgctgatgacccgcataccggcagttgccgcatcctcaccgacctcgatatggtcgaaatcctgttccatcgaacttccggaggatgtttttccgtcccaatggacggtcaccacgcccaattcagacgacagaacaggcttcgacggcacggagcatggcgtcgtatccgactccacagttgccaccacaacggccgaccattcgccgagcttgtcagagtacgttggcacagccctgaccctgacctcgatttgtgtgccacagtccagaccgccgaagccaagctgcgtcttatccgtcgtgccagcggaatgccacggagcaccgtccacgtgcttgcgccactcgacggaataattggagatctcgattgccgtattgtcggtcgcctctgtcacggcggaccacatggcggtggccaagccgtgggcatacccgtccgagccgatgtaggcgtcggtctgcacgatcaatccgagcggggccttcggaacgcgatggtcacggtcagatgaggcggtcgtaccgccctcgctgccggccaacgcggcaccaccggtgatgcctttgattttcttcgcctggcgcacggaagcgtcatacttaatatcattcagagcgattgagcaggataagccctcgttctggcgcatgctcaggtcgatttcctgcacgcgcaccttctcaccatgggagacggtgggggcggtaatccagtcgccggcgtggaagtcgatgagcggtagattatccacgccggaagtcaccagatcgcgcgtgtactggccgcgtaccctagccgcatcatcaagcgtggattgcatgaatgcctgtgccgtgtccttatcggacacgccgccctgcgacgaataggactcccacttgccccacggtgtcggggcagccggattgtccatgctgaaaagcaggttattgtcaccctcgacgaggatggtggatgccaggtcggcgatggactcctcgaatggggcttcgctgatgtcacgagccaattgcagcacaatgctcttgctcaggtcacggctcaacgccgtgctatccgcattccacattttcagcgtgcggccggacgtgcgccaatcacatccaccgccgttgaccagcgagctgagaatggtctgcaggtcggtgcccaacgaataataaagcgtgtatttcctcgcccatgccgctccgcccgcgtccttcgccgtatcgaagccgagcgacaggccggtggccacgccgccacgagccttgttttcgtcaagcagcgtcttgaggatcacaccaggattcgacgaatagaagggcctcttgcccttgttatcgccgtccgtgagcagatggctggaatcgttgttctccgccttggacagcagccagcttatcgactgtccactataggtgacggtgcgcgtgcggtcgtcggtcttgccggagcgtcccgtgataacgaaacgcgcattgtccggctcatggtagccggtgccgtccgacacctccacggccacttcgagaccgtccgttaattcgcggtcgaaagcctgagcgtcaccggacagcagcgagtattcgatgctgattgcgccatcatcattgtggagcatcgacgcgctgaaactcaccggctccgccaatacgccgattcgctctccgaacggacgataggccacgagccgagcatgcaaagacttagccataataatcactccaaggaaggcttgaatcggcacgtcaccgccaacgtgccggactgtttgatgcgaagcgtgtagctgccggaatcgacggcaggccacacttgcaacggctcgcttgtccagtcgacgccggacgtcacgtcagtgccgccagtccaagcgttattgctgtctgcggtccatgcgcgacggttcccggcatcaagataaagattcggcgcattcgacccgctccacttgatatccgtgcctgtcaccgagtctgtcaccgtcacagacgacacgttggacaaacggaggatgagattaagcagcggagcgttggaataccatccctcactgccggcctgcgtcttgccaggaatcaagacaccgcccaaagcgggaagcgtggcagtctgccaatcaccctgccaaaacacgtcaggcagttggaagaccgccgtggcggcacgatgattgctccacggtatctcgtcaccgtccggctgacaggacgtgcacacggccttggcggtcatgctccgagtcagaccagtggacacgtcacgctccacacgagtcaactcggacgcgagacggcagagccgataaaagcggtgcatcaaggtatccgcatcaggcccgtccgtgatgaatttcaacgtgatttccggcgcatcgaaagccaccggcccatccggaagcatgacgccgttccgaccgttcaccgtcacggaatcaatgcggggtgaaatgctggtgaaatgggtggtgccgacaatcagactcgaatgctcaccggtcagctgctgaccattgatgagataatccgcgagaatcattgcaccaccctttttcgcctgtgtgtcaccattgcggcatcgccgccgtctgcaacttctgctgcgtgctaatgctcgtcggagcaatcgcaggataatagaatgtctgcgtgatgttcgtcacgctcccattgccggaggcggcagtgttaacgccacgcgagccgttggcgacgccgacggaatacgaggcgtcctgcgaaggtaggatgccggtcagcctaccggccgccttcctcaccttcgaagcgctctcgtcgatgccgaccgccatgccctcgccgatcatctcgccgacctggtcacggaacacgcgcgacggagaatggatgccaagcttgcgtttcacccagttcaacgcattcgtggccgcgttgacagcggcagacacgagcctgcctgccgcgccagcgatgccggacgcgatgccggaaatgatgttccatccgacgcttccccagttcaccgaagtgaacccatgccagatctggccgaccattccgggaatcgcgccgattagccgcggagccgatgagacgaaaccgttggccaatgcgacaagtagctgaacaccagcctgcaggatctgcggaagacgattgatgatgccaccgacaagctggccgataaggatcggagccctgcccaccaagtccggcatggcgttgatgaggccctgagccagtccgaggataagcttcaaaccactgtcgatgatctgcggcaggttgttaaggacgccttgcacgaggttcaggacggcgttgatgccgatggggatgagctgcggcaattgggccgacaatccgtccaacagcgtcgtcagcacggtcacagccgtggacgcgatctgcggcaaagcctgcacgatgccctgcaacaggttcgtaaccatcgacaggccggattgcaggaacgaaggcaggcttgaagtcacccacgactggaacttggcgagcaactgaggcagtctcgtcgtgatccatgtggtcgcgctggtcagcagcatcgtgccgagctggcccaacgcgccgagcacgggcggaatgatccgcatgaccagtgctggcagcgtgctgcccaacgaggaaaacagttgcggcagtgcggcggtgatgccggtgatgatctgcgcgatacgcggacccacattcttgatgacagtgccgaccgaatctaccagctgcttggtcaatccgttgatgtcggcattgtccttgccgagctccgccagccagttctgccatgcggccttcatcatgccgacggaaccctcgatggttgtcgcggcctccttggcggtggtgccgctgatgcccatctgctgctgcatgatgtggatcgcctgcaccacgtccgagaacttgtcgatggacaggtcgcccatctcaccgttcgcctgcttgaccttgttcgcgtcctggatcagacgctccatctcggatttcgtaccgccgtagccgagcttcagattgtcgagcatcgcgtagttgccgcgcgccagagactggtaggtctgttggatggactcgatgtcggtgcccattttgttggcgttgtccgacatgtcgaccatggcggtgtttccgagttccgcggccttcgcggtgtcgccgccgagcgagctgatcagcgaggcggaaaagctcgtgacctgcgtcatgtactcgttggcgctcactccggcggtccggtacgcttccgccgcgtatttctgtacggtgcccgaagcatccttgaacagcgtgtccacgccgccgacggcctgctcgtaggtcgcgtatgcgtcgagagcgctcttgccgatgccggccagtcccgcgacggcggcgcctacgccggccagtccgaccgtggcgacgctcttcaacgctcctacggccttgccggacatggagctgatcgcgctcaacgccgtatcggcaccgcttttgagcttcgccactatggccgacgcggcactgccggcggctccaggaatctgcgacagcacgccgccgaccgcgccgccgacgttgccgagataaccgccgatggcattgcccacgtttttgaacggggcgggtatcctgtccgcgatggtcgagctcatcgacgagaatgtggccgataatggcgcggtgagccgtgtggcggtggattgcatcgcggtgcctgctgcactcatgccggccttcgccttcccagcgatacctgagaaagccgacgtggctgccttgccgacctgtccgaacgcggtggagaccggctggacgatggccgagccgaggttcctgaacgccgctccgagcgaaccggcggtcttcccgctgctggcggcgaggttgtcctgcgcggtcttgagcgctttctgcgcgtccttcaaacggttctcggcctgcgtcgcccggtcggtcatggtggacagtttcagccgggcctgttcgagcctgatggtcgcggcctcggcctgcgtgctgccctcgccgtgcttggcgatggcattggcgacgctctcctcggcggcacgcacctgattcgccgccgccttctgctggagcatggcctgacggtatgcggacgtggatttcgccacgtcacgctcataggatttcagcacattcgcactgaaaccgttcgccgactggctgaacccgtttttgaacgcgcgcccgaaaagcccaccgcttttgccgccgttcatcctcgaatcgaagagcttcgacgcggctttgccgctcgcgccgacctccttgttaaccgcgctgcgaaaccccttcatcgaagggaacacgctgacatgcgcggaaccaagttcgctgccgaacgccatgcgacaccacctattcatttttaatgtttttgaggccgaaaaggccgctcatcgacgcctcagcctcacgacgctcctcatcggtcacttcaacatgactcccgccaccatcccccgccgcgaggtctccaagcaacgacgtaccgccagactgaatcgcggtgatgatcgccgtcgcatccatcggcagtaccatgcgcacggcagccatgccggtgtaactgctcgggtccgccgaaatgctctcatagagagctatcgcgtccgcatagcggagcctgccacccaaatcggcctgcagactccacccacgcgccgcgaaatcagcccttattcgacttccgtcttctcctcggaggagctggcagaagtcgacgattttcccaattccacaccctggatcttcgccagaatctcgccgtaagcgttcagaatgttgaatgggaccattgcaggctccttagacagctccttcgccgcatcctcgccagcgaaagccgcgagaatctccttcaacgtctggatctgctcggtgttggactgcaggtcggacaggcgcacgaaatcatcgatgctgagattcagaggcagcttgtaaatgtggccgtgcggtgcgaggaaccatacgctgccgtccttgatgaggtgcttcaccttcatccgctcggccgacgcttcaagcgccttctcctcgtcctcctgagtccaggcgtcgaaatcggcggcgcacggcatcacggtgttcttggtcattgcttccttctttcaaacgactatgaaaaattcctttactccactggatgaagaggaagaatcccagcacatgcgaagaaaggaagaaagaaacacatgctgggaagaatcaaaaaatcaggccgtcggagtgtaataggactccagatacttggaattgccggaatccacagtcgggtccacaacccattcgccggtcagcttgacaccggacacctcgccacgattatcctgatccggttcggcgttcgtgacctgcacgacaccaagacgacgacgatggacaccgctcttatacacggtctcctgataggcaaaccatttagcgtcctgcacgatgtccttgacgtgatagacgccgctggaatccggcttgcccttcatgatctcgcgagtcagatcattgtcttcggcgaccgtgaaacccaatgtgagcgtcgggtctgctgcctgcaatttgtatccgggctggtggaattcggtggcgtcgtcgccgtcgcgtccatcctctggagcgccatcggaggtgatgaggccgacattctgtccgaccgtgaaaattccggtcagcttgctcatcgggtcggccacggtcttcgcgatcatcgccgcattgagcgatttggaggcatcataatgcgccagcagaatcttgctggtaagcacaaccttgaccgcgccaaggttgttgccgtctttatcggctgccattttttgtcctttcaaacgaaaaaggcgctgaaacacttggtttcaacgccttaaaaatcagaaaaactttaaattattggaattccccaatcgcggagaattcgagagccatgtaatagcgtgcgatgttcgcatcctcggcaacaggaaacgggccattacacccagcctcatcaatgcccgcaatcggcgaaccgtcaagcaagcaaatatcggggtcggtgagcaggccgtagatccgtgccgccaagtcacggcaggatttcagagcggcacgagatccgtagcgcacggtcacgccgacgctccggtcgaagagcacgcgattcgactgcgagccgccatcgtcacgcaccacgacgagcggccgtgagccgtcgtaatcgtccggctcacgattcgaaacgatgatcgtcgggaaagacggcttaagcctggcacgtagaaaagagcagatccacaattcaatgtctggtggcaggaccatggtcatgatttcgccgccttcaacgccttgtggagattgcccgtctgcgattccacgagcatggtcttcggatcggtgccgaccaccatgcatgtggttcgatgcgcgtgcttgacctcctcgatttggaggccatcgcgatacgcgcccgtatccaccggagcatgcgatttcgcatatgcgagcgtcttttcggcggcacgacgtgtcatggccttgacgccagccgaattcagtagctcgtcaaaatatcggtcgttgaatttgaccgtcactcccaaaaccatcacccccgatattcggatagtggaatctcaatcgtcggctgccatgacgtgaaagcattcgcgtcacgacttggatagccgctgacctcccaacatcgcccgtcatccggcagtgcttgaatcctgtcacccggcatgatgtccaatgacgggtccggagacgtgaggtaagccgtgctcgtggtctgctcgcgcagaccgtctggcgtgcgcgtgctactggaactggcgagagcgccggtgaaatccaaagtctccggattggaccagtcctcgccggtctgctcgccggaatacgggtcatcgactttcctcgcacgcagtcgccgccacttggtcgcgccggacatactgaaggacgagccacggccgagataatccaacgcggaagtcacggcttcaccccccacgacaagcggtaaggctgcagcgtgcgcttctcggaatcgaaaagcgccacgttaggcacgccaccatcggaacctgaccggtaggtaacgcttgagccattcgtggattgggaggataccgtgccaggcacctgcatcacacgagacgcgatgtccaacaggatcatctgcacttccggcacatcctccaaatcccagccatcagtaatggtcgcttccacactccctggcagatcagggaaggtggcgccattgaccagcacaaggctcccagcctcgctgaaacgcgcgtccttcacgtgctccacgccatcaagcttcaggctcgaaagcgcggtcacatgcttggatggcaagagcagcgagtcgccgccatgaccatccaagcgaatcgtgcgggtgacggaaggcgcgacatgccagccgcaatgcttgcgaatcgcagtctgagcggccctcatcttgaaaccggcatcgacttggaaagagtcggcgcttggaatcagatcaccaatcatggcggtcatgccgcacccccaatcgcttacttggctgccatcaggccagcggccaccagagaatcgataagcgcatcgaattcctgcttggtcggcgcggtagaagccgcctttggcacattcttcgccaccggaagagagacggcaccgccgatagtgaccggcttgcccttggcgtcaagcgccacaagctccgccacgtcctgcgtcctatcgacgttcgtctctttcggagtggcgaagcgcacgtacttctgcgtcatgatcaggccgccttaccgagagtgaccttcacgaaggccttcggatacttgacctgcaggcccagacgctcggagacgcggcacttctgcttgaaatgcaggaaatcgtcggtgtcggagtcggtcatcttcacgaccagaccacccttgcgcagcaccttggcgctcttgaaggcaccgaccagcgcggtgccttcggtgatggcggcggtggccacggtcgggatgttccacagcttggccccatcggtcaggttgaggtaattgccgttagcatccttggcgatggtcagcttccagaagtcaagcggattcatcacgtaggcgtcggcttggaagttggtggtggtggtgatctgcagggcggccttggacaggcggtcggcgtcggacagttcatccttattcatcgtctgaatttcacggttgaacaggccggtcagattgttttcactgccattgccggacagcagctgcgtctcctcctgcagcttcaggtcatactgcgcggcgtcgttgatttcgccgatgacccaggacagatcatccatcatgtcctcgctgatgccgaagaagctggccaccttgccgatcttgtcctgcttccaagtcgggtccttccaatggacctgcggggctgcgccggtctcctcgaccatcttggcgttgccttccagcttatcgaaaaccggatactgcaggacggtgccggtgatggcgccggtagagaacaggtctgccacgaccagcggacgctgatacgggcgggcaggctcggtatcggtctgggtcagatacggcttgtaaccgtcagacggcgcaccctcgacattggtgtcggtgttcgccttgcactcgacctcgtagccatgagcgatggcggacttcacgtcaaggcccgccgtctgcatggactggacgtaatattcgccgatgctcttggcatggatggcatcggagccaccgacatgctgcacgacagacttggcattgagctggccgatctgcgtgagcagatcatcggcctgcttcataccgtccatctgacggtcgatgccctcgatctcagccagcgcgttcttcacaaatgcgatggtgtcgccatccgccttgccagcggccagcagaccctgcttctcttcgagctgcttgacaagcgcggctcgcttttccttgagagatgccattacggtcactcccctttccgcccaacttgggcaatctttattgcgagttgcaacgcttccgcttcggaaaaaccgtccggctcctcggacttggccccttcaggctcctcgttcttggctgcaccggcatccgatgccttcgcatcgtcactctggtcattgtcattgttgttgtcggactgagtagcgttctcagtcacgaaatccttgagcttcttcgcctgacctgtcaggtcatcggcgatctgcgagagaatgtctagattcttctgcgagagggggcgtccggtcttcaaccggctcagcgcgtccttcacgtccacgatgccggtatcctgattcgctccgatcggcacgaaggatgcctcatataccttcaattcgcgcagttcgtttgccttggtgccgtcatcaagctcaacctcgccctcgtccatcacgtcgtatgcgaaggacagttggctcagacgcttttccttgatcaggtggtagacctgcgcggccttcggagagtccatgtcgaaatggcctttaatccaccagccgtgatcgtcctctcccatcgaatcgacgccgccgatgttgtaatcggggtcatccatacgatgcccatacagcaccggcagcgtgttgtcgctgtcctgccatgccttgatcgtcttgtcgaacgcgccgttcgccaccacgtcaccgtagcagtcgggttcgcgggtgaaagtggaagggtaggcgatgaattcgccgtccttgagcgccgagtcctcgccgtcggccttgaatcggcaatcgaaatccttaaagtgcatcatgcacctccttgaaatgcgttcgcatgtcctccgtctcctgcaatgccctcacaccggcatcgaactgccccaaaccggccttgatggtcaggtcggcctgcagttcgttctgccatttgagccatttgatgtcatcgacgcccataccggcgccgaaacgtgatctgacgctcttctccaggcggtcgcgccaagcattgacgatggcggctgttttctcgccgtcgtccgattcaatggccgaaccgtcggctggacgcgacgggtcaccgccatcctgcgggcttgactggccgcccttggtgacattgagcggcacaaccagttcgtcaccgccatcgacgcgcggcaggttctggctggcgcgcgcctcgttaggcgtaatccacggagctcccaccgaagtgctcatcacactggcctgctcctcgaaatcgccggaaagcttgctgcggatgtcgaattcgatgtaattcgcgtccggcgcaccgaccttcggagcgaggaaagtgtttatcctgtcctcgatcatgcgcatggtcggaccaagcgtctcggaatacagcatcttgcggaattccttggtattcgagaaattcgcgttatcaaggatgccgaccatgaccggcgagacgtggtagacgcttgcgacggtggacagcgaaagcttcgtgacctcgctgaattcctcctcgcgagcattgaagcccaagcgcttcaactccatgccatcctcaagcaatggcgtggcaccggcctgcgctcccctgtcggtgaattccttccacccgcgcatgaaacgctcacggtcggcgtcattccattccggcgcatccttcggacgcaccagcacgctgccgatacggccgccgcgcttccacacctgagtgcgatacgaccatgcctgaatctgctcgttgataatgtccttcaaggccctcacgggagtaacgccctgcgtcgggtcatcagggttccacccgtggaacacaagcatgtcatcggccggaacatcatagtatgacgtgcccaaatcaggataaacgcgataataggccggctggaacacactgccatcacgcttcgcctgcacccagcatggcggaatcggctgaatctgccagctaccgaacctgtcggcatcccgatcaggcgtctgcatgacaacccagtaggcgttatcgtaaagcgccaagtcagccacaagctgacgcatcaactcatagcccgtcatcgtgccgttcggctgcttcagtagatttatcagcacatcatcggtcacgcgctgcctgtccgtgtcgctgacacgctcgaattccttcaagccgacctgagcgacattccgtgccaggaaagtaatcacggtacgcaaatgcggctgtgtcttgaaaagctcggcctccgtctgaccctgaatcacggccatctggtcagacaaatcaaaggaaatgctgtagcgcggctggaaaacgttcctcaaggcgctccaaaggcccataaggcacctccaatcgcttcaaaaaatcaaagaatcatcagtccatgtcccgaataggcggaggccttcgccggttcggcatccacagcctgcatggtctccaaggcgtatagcgcctgtgattcggcaaccaatccggagatctgcaatgctgatttcgtcctgtcccacacctcgacctcacccaatcgtcgggtcacggccacgctcacctgttgttcgatggcgggctgggggagatggcggagtttgttttccttcactcggtcacggaaacggccggttgcggctcccatgcgaaagccctcgatgagatgcaccgtccaaccggcctccgcgagcgggtcggcgaagtccacggccgggcagcccttggactgcaaggcgatttcgtggatgttcggccaagcctcacgaagcattttgaggtatttcggcacccagagcatgccgtcgcggcgcacaatcagttcgacgtgcggcaatccgtcctcgcggtagccggcggcggcgatataggtggtctcacggtcggcgctggtgtccacggaaagcactacgcgcccgtcatcggggatacgggacttcgggtcgatgccgcgcttccacagcttcgggttgatgtacggcgtgatgtcggccgtcacccactggcacaagacctcggtgcggtacgcggcttcggtcatgccgttgatgtcggccgcgatactccgatacgtcatcggcccgtaacccatggaggggttcgcctgacgaatgccgtcgagatcgtccagctcgcatttatccggagccgaccactcaaaatacccataggacgggtcatgttcatcggcccattcgtccggcgactgcttgccggtctcgaccgacgcattccatgattcagccagggcacggccctcgtcaacgactcggcgcagtacgacgctacgatagtcgccggcgttcgagatgccccacaattggcttgaccagatggctttcgtggtttgactgactgcgttccagccatcgtcggtatgctgttcgcgcagctcatcgaacacgacacggctcgcggacttggaacggatgttcttatcggcgcgcacgatatactgcgccttgttacggcagataatcgcctcttcgccatgcgaattgttgacccgctgcacacgcttctgcaatacgggcaccgcaagcgcggcctcgccctcggaagccggattcggattacaccaattcagcacggcctgatacggggcacgagcattgtccaacgtctgcgcggcaccgaccacgagaaacttccaagccggcgacaattctggatgacggccagaatcaacgaacagccaccacgcaaccagcacgctcatcaacgtggtcttgccgttctgacgggcaacctcggtcaccacgcggcggaaccggtatgagccgtccggcagaagctcgagtccgtggatcagcagccatttctgccacgggtagagatgcacgtggaggaacttttcggcgaattcgatgaccgcgaacccgttcgacgtttccggcgtcaattcgcgcagcgggggagtgaatatgcggggagtggtgatgccgtgggcgtcgtcattgatttcaccgatgcccatgacgcctcccgtttagctgattttcgccagatactcctcaagctcatcggcgaccggcttgacctctttggcggcgttctggatattgccgcgtgcagccggcgtcgctcccaactcgcgcagcacattcatcagatgcggcacgaggtagagcgccttggtgacctcctgaccagtgccatgctgcagcgagtaatcgatttggcgggctatcgctctgccggaggcaatcgccgccgcgtccgcttcggtcgtatccagtgcggccaccgtcgcctcgtaattcgaggtgatagccgtgccgtcatccggtttatccaggatgcgcatacggcgttcggacaacgtgttgcacgagtcgatggccttcaagtcaccttggatggcctgcgggtatgcggcgcgatacagggcgtcgatacgttccagttcggcggagcgttcggtgtccctgtccttgcccttgcggttcgcggcgagcgcgcggcggattgcggcctcggcggaggaaaccgtcttgaagttgaggacggtgcggatctcctgcaggctcatggcaccgaggaacaggcgcagggccttctggtctttatcctcggccatgatcactcacctcctattcgctgatgcgttcggccttttggccggtgtaatcctcccaacgcttcaatatcacgtcgcagtagtgcgggtcgagttccatggtcacgcacttgcggcccgtctgctcgcacgccatgagcgtgcttcctgagccgccgaatgaatccagcacggtatcaccgacccgactgctgttacgaatctcataggccatgaggggcaccggcttcatggtcggatgctccgcgttgcgcgcaggtttctcgaattccagcacggtggtctgcttgcggtcggagaaccagcggtgtgaggcaccgtccttccagccgtaaaggcacggctcgtgcttccactggtagtcctgacggccaagcgagaacgtgcttttggcccagataagcgtctgacgaatagtcatgcccgccttgtcggcggcggcgaggaaattctcggcttgagtctgcgcgaaccagacatagaacgcgcatccgggcttcaacacgtcaagcgccgtgacgaacgccttacgcagaaactccacgaactcgtcatcgttcgcccaggaatcattctcaatggtcagatgttttttcgtcttgccgacaatggcgacattatagggcgggtccgtcagccacagatcggcctccccccccccctaacagtttccgcatgtcctcaggtttggtggaatcgccacacatgagacgatgctcgcccagcacccagatttcgccgcgcttcacacgctgcggagcatcatcgggcacctcgacatcctcaacctccgaatcgtctcgctcaggctccaacgcggcggcaagctcatccacatcatcctgagaccagcccaatccatcgagactgctcacatcggacagcaaagcggatagagtctcgtcatcgtagccgcccaagtcggcgagacgattgtcggccagcacgatctgcgccgcctggtcatcgtccacatcgaccgtggtcgcctgaatcgtcttccaaccgagcttcttcgccgccagatacgtgtgattgccggcgagaatctcgtaatcgtgggaggcgtgcgtgccgatgttgaccacgatgggccgatactggccgcgcgccttcaacgattcggcgatggcatccacatcgccgcgccgaggattcttgtgatacgtgctcaggtcggagattttgaacgtctccaccttcaaattaggcatgatggctccgttcccgcgcgtgcgcgatggggtggtcaaattcggagggagaggaacagcggccatgcgggtcgtgtcccgtcgatggctggttttgggattctaccgccccctccgggtggctggtcaggcttggaatgcttcgacgaatgcgttggcgccgtctgtgagtcgtttgaggaatgatttgctgtcgatttttggtatgactgcgatgctgccgtctgctgaggctgttggctcgaggttgattggcatgtctacttccatctcgcctaggtcatagtcggtgctgctgctggataggctggcgctgatgtggagtgtgattggtatggttgtttcgtggactgtttggccgttgaatgtcttgattggttcgtgggtgtccatgttttagctcctatgctgctttgatccattgtctgctgagtgtgccgattggtgtggctgggtctttgttgccccgaaggttgttgcattgcgtgtggcttggcctgaagccggccgggtcgtgctgcagatcggggcgtttggtcaccgggtagaagtggtcgaggttaaagctgtcgtctgtggtgttctgtggtgtgtcgtagtcgatgggcattccgcagagccagcatggacggtgttcggccttgcattcgaggaagaatttcttgcggtctttctcgaattgtcttccgcctttgcggacttggcggctgtagctgaccatgttgctgtcaccccgcaatcgttgaagagtaagtggcttgggcgagattcgaattcgcggtggcccgacatggttagtctgttttgaccacgccgtcgcaatcactgcgatggccggttagtcctctaccgtacgcaagccgtggcatgcgcggttggcttcgatccaacgac

SEQ ID NO: 2868 - DNA, 7775 bp, Unknown
  R36_18m  MAG No. k141_35166
cactgccgtgggagccgtccagtcaaggcgggaatccatggtggtcagcggaatctgcaggtagggggcttcctcgttgttatcgaagccgatgacctgcacctgcacgggcacctcataaccagcggtgcgcagagcggtcaatgcgccgatggccaactgatcgttcaaggcaatcacaccgtcgaatggcacgccggaatcaatgagccgctgggtcacacgggcaccggctccgatggtccaatcctgatcggtgttgccaatcagctgcggatccaaggagagcccacgcctacgggtctcttcgatgatgccgcgcagacgcagctgcgcgttgccttctacggcattcagcaatgcatcttcgtcgtaaacgtcacgggcaccgatcactgcaagtctggtggaaccgcggtcatacaggtagcctgcggccatggcggctgcggatacatcgtctggggtcacgtgatccacaatgccccacgtggtacgcgcgccaacgatgaccagcggaaaatcaaccttcagatcatcgggcgaaatgttttccacctcgctcatggaaaggatcatgccatcggacaccgtggagttgaacttcttcagcagatcgcgcgcgcctttcgcggagccttccgcatacgtggtgacgtatacggaatagtcgcgctgacgggcggcctcgatggtgcggttggcgagctcggccagatatggcggaatcagcgaaggcacggcgagggtgatgaagccggtgtgatcgcggttgaggttgcgggcggccacgttgactcggtagtcgaggtccttaatgaccgactcgaccttggcacgggtctcatctgtcatacgcccggagccattgatcacgttcgacgcagttttgagcgatacaccggcggcctgagcgacatcgcgtagcgtcactcgacgcttggctgttttctcgtcgctcatgccgcgctcctccatccggacaacattgccattctagcgcggtttagcaggccgttttagcgataagaatggcgttgcggttcagcgtatatccaacggcgtcagtctcgcaacggtgggcgatgatgggatcaccttccacaccgttgatggcgacgggctggtttgagcggttgaggtagaaatcgaagcgggtggagccgtctgcggatcggcggatggtgtgcaggatgcggggatctgtggtgggataggttggagtttgaccactctcagtcggctgcgccgacaactcccgccagcgggagccaagtgctttgagcaactgggcaatgtcgtgacggttgaggtcgcagcccacgtagatggcggtaccgttgccataggggcggctggtgatggcgggggtgcgctccagctcccagtcggcggcggactcacctgcgtaagaggcaagcactgtggtgtccgcggctacggaagtcacgtcgttctgccacaggcgggtcgtcagaccattggacaggctgatttcgctgggctcgccttcggcttcttcaccgaggatgttgaattcttcggagcggatgccgagcatgtcgcgtaggagcccgttgccggcgccggggtagccgccgaggccgatgtggaagtgctcgtcgatcaggccggcggcatagccgacgatgacggttccgccggccttcgcgaagtcggcgatacggagaacgtcttcgtcggacaggctgagcacggtgggcagcacgatggttttgtagccggtccagtcgtaggcgagcggcaccacgtccgcgcgcagcccggcatccaggaagccgcggtaccagtcgcgcacgtcgtgccagtggttgagtttcatgctgggcagggtttcggagcgtgtggcccattcggattccgcgctgaacaggatcgccgtgccggcacgctcgagctcagtgccctgcagcccggcgtcggagagggtcttcagcgccttaccgagctcgcatacgccgcggaagaccttggaatcggcgcccgcgtggggcagcatggcggagtggaacgcctcggcgcccgacttggattgccgccattggaaaaagcagatggcgtcggcgcccatggccacgtgggccagggagtcgcgcatgagttcgccggcccgtttgcgtgtgttcagcggcttccactgcacggctgaggtggagtgctccatcacgtaccacggcttgcccagcgcgagggagtccatgagcgcgtccgagcaggcgagttcgtccaggtgggattcgccctcatggaagtagtgatcgttggacacgaagtccacctcatccgcccatttggcgtagttcatgacgcactggtcggtggagaccatgaagttcgtggtgaacggcttgtcggggcagatctgctcgatggcgtcgcgttcggctttgtagaagtcgagcagcatgtcgttgccgaaccgctcgtaatccaactgctgcgacgggttgaccatggcgtcgccgcccatgtgacgtggcagcagcacctcgtcgaaactgttcacgtgctgcgaccagaaggccgtgccccacgcctcgttcaacgcgtcgatggtaccgtacttggcctcgcaccacgtgcggaacgcggccaaggcgttgtcggagtagtcgtagcggttgttccagccgtattcgttgcccatgtgccaggcggtcacatacgggttgtccttgtagtgttcggcaagtttgcggcacaggcgcagcgcgtattccttgaacaccgggcttgtgggctgccacgactggcgtgagcccgcgttgacggtatgaccataccggtctaccggcagcacctctggatgggattcgtacagccacagcggcgcggcggctgtggcggaggccaagtccacggcgatgccggctctgccgagcctgtcgatcacatggtcgagccactcgaacgtgaacgcgccctcgaccggctcgatcttgtcccagctgaaaattgccagcgatacgacgttcacgccggcctcacccatgagacggatatcctcgtccagcgtctcctcgggccactggtccgggttgtagtcgccgccgaacgcgatgccgcggccggattccgtcagcagggacggccacctaaatgctctatgagtagtcatattaatcaaatcctttattgtatcggtttgcgggaagtgctgtgcttgccggttttgggctttggctcccctcagtctcactgcgttcgacagcgtcatcggcgctttgatcaaggcgtgaatgctgcgttgcgttactgcattgccatgttgccatgttaccgtgttattgcatcgctacgttgccacgttgccacatcacattgcattgccgcattgctgcgttgccgcatcacatatcgcaacacaaacgcagcaacgcaatgacgaccggagatggcatcgccgccacccgcgaggaaccgcagtgcaacgcggtaacataacgcaatgcgatgcgattcccgcgtagttacaggcagttacagattgagtaccgcatcagcaatgcgcatggcggattcgcggtgggagaccagcaccacagccgcgccgcgctccttgtctgcatgctgctcacccacggccatagcgtgaatggaacgtagaataatagcctcgttcaaagcatccaaacggctggtcggctcgtcgaaaagcaccagatcagcattgcgcaggaacacacgagccaaaccgatacgctggcgttcaccttcggatagacggtcgcccaactcgcctacctgagtatcaaggccatcgggcagggaatcaatgagatcaagcacggaggccttggcgagagcctgacgcaaacgagcatcgagaccgtcagctgctgccacctgaacggcatcgccctctgccaattgcgccgccaactgctgctgtcgggaatcaacggtcttggcacccacttccccattgcctgcaacatttgcagcttcaacctcggactcaggcaaagcaatcagcagattgtctcggatagagccatcaaacaggtgggtttcctggctcatcatggcctgaatacgtcggcgagcatgcacatcgacctcgggcaacggcgtgccggacaacgtcacctgaccgcgctgcggatcccagtagcgcagcagcagcttgagcatggtggacttgcctcggccggacggcccctggatacccagcacgccatgctgcggcacgtcaagcgagaaatcggacaggacttcatgctcccccgcatatgcaaaggtgacgtcatcaagacgcatgcccatatactcctgcggcacaacagtgccgttctcggtcacagcgggcacctcgtccatcagtccgaacagtcggctagcggacgcgaaggtctgagtcaggttagcgggcaaggcggcgagcgccaaagtcggttcgaacgagccggcgaacagcacgaaggcggcaatcagagccggaatgctctgcgggttcgcgccggcacaggcaatagccacggcgaccgaagccgctgtgagcacagccaccaagagtccgctgattccggtgaaacggccgttgaccttgctgagtttggtgtgatccttccacaacgcatgggtacggtcctcgatggcctgcgcacgttcctcgccgcggccaaatcggatgatttcgtccaggccgcgcatgtcatcgagtatcacatcgtcgagttctccggcagcgccacggatggcagggccaaggttacgtacgccggtggcaaaaaatcgcggcacaaggatgccgataaccaggtgggcggcaatcaacgccagcgccatccatgggcttagggtggcggccacaatcgtgtagatgatggtggaggttaccgcgatggccaccggactgatggtgtgggcaaagaagatctcaagcagttccacatcggtggtcagcatggcgataaggttgcccttacctttgcccgcgagcttggccggcgccagtctgcgcaacgcggcgaacgccttggaacggaagagtgcgagcagatggaatgccacattgtggttcagatattgttcaatgtatcgggtgatgccacgcagaagagcacagataatcatcatgatgacggcgggcgcaacacccatgccccacaccggattaccggtaagtgcaaatgccgcgataatgccgaacacgggcaggaaagtggccgaaagatggccgatggtgccggcggtggaggccgctgccatcagtcctgccagaggtcgggcttccttaagcagtcgcctgatcacttggaatgtgctcattttggaagacgaatcgctatttgcaacaccagccggagtctcagccgaggcctgctcactcccgccaacggaagccgtcggcaaagctgactgcaggcggtcaaccgtcatacccgcctctgcgcttacgcgcgctgcgccaccctcagtccgactgtcgtcggacagctcctgcttgcgggaaccaacctgcagcacacgccgagcatggccttctccgaagttctcaatatctgcctgcgtggtaaacagcttggcgtagacgccgtccgccgtcatcagctcggtatgggtgcccctctcaaccgacttgccgtgttcgagcaccaccacttgatcagcgtgttcggcgttggccatgcgatgggtgatcataataaccgtcttgccgcgggattgcgccaattcgcgaattgtatccaggatcagctcttcggattccatgtcaacgctgctggtcgcctcatcgaacacaaataccggcgaatcatgcaggagcgcgcgggcgatggcgatgcgctggcgttggccgccggacaggttggcggcatcggactcaatcggcatgcccagtccgttcggctgtgcgtgcacgaagtcggcaatgcgcgcctgctcgagcgcggaccacagacgggagtccacggaatccggcgaatcaggaatctcgtcatcgggcaaggccatcagaagattctcgcgcaatgcgcccgcaaacagatggctgctggcaccaatcacagtgacggctccggccagtgtttcgcctgacaaatcggatacctcgacgccgttcagcgtgagcgaacctcggtaaccggccagtgtaccggcgagcagcgaggcggccgtggacttgccggaaccggagatgccaacaatggcggtgaactgaccgggccgtgcggcgaaggtgatgttggtgagcgcaggagcgacggcggaattggggctggtttcaccttgcttatcggtctttgcggatgcggacttggagtcgccgtgcccggcatcatcataggaatagccgacgtggtcgaagcggaccgtcagaccgtcgtcagcggaatcggaatcgttggccggcagggtcgccgtgccatgctcgggctccagggtgtccagcagagcgaagatgcgcttggtggaggtcatgccgttcatcgccacgtggaagaacgagccaagctgacgcatgggaataaagaattcggcggacagcagcacaatgaacagcagaccggtaagagacagcgggtagcccaccccgaacgggatgagatagtgcaggccgtatgccgcgtaggcaagcacaccaggcagatgtgaggccagtgcgattggcgaccagccggacgcaccattggcaaaagcatcgccaatatgcgcgtattgccataacgccacaccgatgccggccgcagcaccgccgtaggccactatgtccatggcggtcagcgagcgcagctggatctgcagcacgcgcatggtcatgacgcggaagccttcggctttcttgtccatctcgatggcggcgcgctcgtcggcgtcgaagtttttcagggtctcaaggccttggagattgtcgaggaacgcggcgcccatatcggtgtagcgcacccagtacttcttgaaggcgcgggcggcggtcatggagacgatgccggtcacgatgatgatgaacggcgcgcagaccagcatgacggcagcggcgggcacgttaatcggcgcaatggccacgaacaaggtgattggcgcaagaatcgcatagaagagctgcggcaggaacagttcaaagaagctttgaatctgttcaacaccttcgccggcggattgcaccacatccgaggtcttgatgcgggttttgtaggacgggccgagtgccaccattttgcggtacagcttggagcgcaaagcgagcttgactcgttcggcggcttcggtgccgagacgggtggcgtgcgtggtggccgtgtaacggaccgctatacagaccagcgcaagcagcacgtaaatcatgacgtcgccagccatgggcagcacatccgcgccgtgccgatcagacaacggcacggggcaggccgcgccttgcgaagtgccgccgcattggagcagcggcggtgccacagcggtcagcatgctgttcagcagcattaccagcgacagcataaaaccaatgttggcaagcagacctacccacatcagggccactttgccagctatgagttttttcaagccaggcgccaattggaacagtcgtttgtcgaacatggtccgcttccccttgccgtgttgttgcggtgtgccctcgtcatgtgtacctgcgctccacattccgcgcaatcccattcaccttaagcgaacgccctcgcacacgccagacttttaaagtgagagaggccacagaattatcgattgcggagtgcgcatgctagacgcgccaaccagaaaaaatatgcttcgatatcaggggctgaaacatc

SEQ ID NO: 2869 - DNA, 12909 bp, Unknown
  R36_18m  MAG No. k141_35440
cccaagccgttcgagccgaacgtgcttattcccatgacgctggtgccaggcgataccacgcgttgatgctgcgcgtcttcatgcgtgtgcccggtgtggatcgcatcgatttcagcggcgtccacaaccagcggacgcccgtcgatggtcgtgctcatcatccgacttgtgcacatgtgtccgattctgccgaatcggacgtctgagttccgaaaaatgtgttctgtgtgtccgattctggagaatcggtcatgtgtgatgtgaattgggatgtttggatgtccgtttctgcagaatcatctttgctctgtactcgttgattcgcaaatacggcgcatggctcgtcataccggccatgctcggcggcgcggccttcctggcggactcggtgctgacgccggccgtgtcgatctcgtccgccgtcgaaggcctgaagacgctgccggcgttggagcatctgttcaccgagaacaaggatctgacgatgatgatcaccgcggtgatcatcgtgatcctgttcgccgtgcagtcgcgcggcaccgaatcgatcggcaaggtcttcggctcggtggtgatggtctggttcgcgttcctggcgatcgtcggcgtggtagccatcggcaacgactggtccgtgctcgccgcactcaacccgtactacggcatcaagttcctgttcagtccgaataacgccaccggtctggcgctgatgggcaccgtgttcctttcgaccaccggcgccgaggcgctgtactcggatatgggccacgtgggccgcggcaacatctacttcacctggccgttcatcaaggtggcgctggtgctcaactacttcggccagggcgcgtggatgctgcgcaaccagaacaaccccgaactggccgacgccgaggggatcaacccgttcttccagatgatggatccgaacgtgcgctatgtggccgtcgtgctgtcggtcaccgccggcatcatcgcctcccaggcgctgattacgggcgcgttcaccatggtctccgaggccaccggcctcaactggatgccgcatctgcaggtccgttaccctgcccgtacccgcggccagctgtacattccggtcgtcaacgtggtgctgtgcgtggccacgctggccgtgctgctgctgttccgcgattcggaacatatctcggcggcctacggcttggcactgaccatcacgatgatcaccaccacgatcctgctgggcatctacctgtggcaccgcagcaacaagttcggcgccgttgtgttcaccgtcgtgttcctggcgatccaggtcctgttcttcgccgcctcgatggccaagttcctgcacggcggctggttcacgctgctgctcacgctggcgatcctcatgatcatgtacacgtggaacgagggcaccaaactggagcgctcgcagcgtcggcacatgatgccgaaggacttcctccccgcgctggacaagctgcacggcgatagccgcatccaccggttcgcggacaacatcgtctacctgaccagcgatccggacctgaagcgtctcgatacggacatcttcttctcgatcttcgccgaccaccccaagcgcgcccgcgcatggtgggcggtggccgtcgagaccaccgacgagccgttcacccgtgagtattcggtcgagagcttcggtaccgactacctgttccgtgtgcgcatccgcctcggcttcaaggtctcgcagtccatcccggcctacctgcatcagatcatgcacgatctggagaagaccggcgagctgccgaaccagcagtcgatctacccgaagcttgacgccgatcccggcatcggcaccatccgctacgtggtgatccacaaggcgctgatgcccgagtcgaaggtctccggccgtggcgccctctcgctgcagatcaagtacgcgatccgccgcgtggccggttccccggtcaagtggttcggcctggcgccgtacaacccgctggtcgaggtgcagccgctgttcgtgtccacgcgccgcccgccgcgcctgacccgcgtggccagccaggcgcccaagcgcgagggctgagccggcaggccgaacagccggtgcgagccgggtggcctaatggcatgtcagggggccgcgaaccgtcatcgtacggttcgcggcctttgcatatgcgaatgatgcagagtgggcggtactgcttgtgaatgtagcgggtggacgggtgacgtggttgatgccttttgccgtatgttcacggtggctatgcgtcggatgggactgtaattcgacttcttgggatcttttttgctgcagtggtgcgccaaaaggtctcagccgtctctgcgacgcgccttccggcagtcagtacaaggttgtactacactggtggctgccacacggatgtccccggtcgcccgcgcctccgcggtacatcgttgtatggatacgtgtcacgtatgcagagtgcatgcagatatgtagaaaggaatcccatgccccagcaggaccatctgaccgcacgtctcgtcgtcgatgacgattttgaggtcgctccggtcaacaatcgtctgttcggttcgttcgtcgagcaccttggccgttgcgtgtacaccggcatctacgagcccgaccacccgaccgccgacgagcacggcttccgcaaggacgtcatcgacctggtcaaggaactcggcgccaccaccatccgctacccgggcggcaacttcgtgtccggctaccgctgggaggacggcatcggccccaagcaggaacgtccccgtcgactcgatctggcctggcattccaccgaaaccaacgaattcggcctgcacgagatggccgaatggcttgaggccaccggcggcaacgagctgatggaggccgtcaacctgggcacgcgcggcctgcaggaggccctggacctgctggagtacgcgaacgtgcccggcggcaccgagctgtcggaacgtcgccgcgccaacggcgccgacaagccgttcgatatccgcatgtggtgcctgggcaacgagatggacggcccgtggcagctcggccacaagtccgccgaggactacggcatgctcgccgcctccgtggccgccggcatgcgccagatcgatccggatgtggaactggtggtgtgcggctcctccgcccatggcatgccgaccttcggcaagtgggagcagaccgttcttgagaagacctacgagaacgtgaacttcgtctcctgccacgcctactaccagccgttcttcaaggaggacggcacgcgcgacatggccagcttcctggcctccggcgtggatatggacggcttcatcaaggacgtggccgccaccatcgacgccaccaaggcccatctgaagagcgcgcacgacgtgtacatctcgttcgatgaatggaatgtctggtaccagggtgaggagccgagcaagacccccgagggcatcggcaactggccggtggccccgcgtctgctggaggacatctacaccgccgccgacgccgtggtgttcggcgatctgatgatcacgctgctcaagaacgccgaccgcgtgcgcgccgccagcctggcgcagctggtcaatgtcatcgccccgatcatgacggagccgggcggcccggcctggcgccagaccacgttccacccgttctccgtgaccgcgcgcctggccaagggcggcaccgtgctggagccgaagctgtccgccggcaccgtggatacgccgcgctatggcgaggtcgacggcgtgaacgccgtggccgtgcgctgcgccgacggctcgctcgccgtgtttgcggtgaaccgttcgctcgaggcgaccgccgagttcgagatcaggctgcaggacggcgcgcagccggcatccgtcgaggcgcagacgctgcacgacgacgatctgttcgccgcgaatacgctctacgaccagaaccgtgtgaccccgcacgccaatgggtcggccatgtacgatgccgagtccggcgtggtccgcgtctccctgccgccggtgagttggaccgccctgcacatcaagtgacgcgatgggccgcgcggtccgttccggagaaggacggatcgcacggcccttgcttcccgggccgggcggaggggaccggaccggccggggaaaacgcgttatgctggaatcagacgggcgttccgcctgaaccgtgcggaacatgcccgatggtgcgacgagaggggtgctgtggcgaaacgggtgaccatcaccgacgtggcgcgcgagacgggcgtctccatcaaaacggtgtcgaatgtgctgaacaacaccggcagtatgcgcccggagacgcgccagcgtgtccaggatgccatcgaacgcctcggataccgcgttaacgtgtccgcccgcgccatgaaaaccggcggcacgaagctcatcggactggccatcaccgatttctgccagccgttcatgccctatctcgccgacagcatcgtggcggcggcacgttcccgcgggtacgcggtgatcaccgatacctacaacagcgccggcggcttggcgcaggcgatcccggagacgaagaagctggccgcggacggctggattttcttcatgggctcgccgatcacggatcgcacgatactgcaccagccgtatccgttggtgattgtgggcgattacgatacgcagggactggccgattgggtcacgatgccgaacgtggaggccgtacgcaccgcggtgggggcgctgctggattcgggatgccgtaggatcgcgttgatcggcggcaccgcggagaacgcatgcccggatgccgaccgcgagtcgcggcccgaaaccaccagcacgatgcgtacccgcggctatgtgttggcccatgaggagcgtggcctgcaggtcgattggcggctggtccgtaacgcggattgggtgcagtccggcggccgcgatgcggtggcggggctgttggacgatccggatgcgccgcgtccggatgcggtcatgtgcctgaacgacgcgctcgccatcggggtgattcatgagctgcagcggcgcggcgtgcgcgtgccgcaggatatgcaggtcattgggttcgacaacgtgccggatgccgagtactgcatgcccggattgacgacgatcgacccgcatgtggatgattacgcgcgacatgccgtggatatgctgatcgcgcgcatcgaggggtcggcggatccgttccgcacgtatgtgacctcctacgatctggtgcgtcgtgcctcgacgtgttgacggcccggcgttcgcctggacatgggtctgtgacgggctgctgtcgcctctcccgtggcgtattccgggagaggcgacatgcgggctaggatcggagcagcacctccgtcagcgcttgacggacggcgctcggcatatgcgaatcggagcaatcttccatgtccggcccgctgacgtgctcgagtgaatccatcgtggccaatgcgtcgatgccgttctccgctatggcggcataagcctgttccttggtcagatatcgcatttcggcatgccgaaggatgtcgaagacgtcttccatgcggggatcgggggccatcgtcgtgtcgccgatggtgacacgtatctcgctgcgggtggatacgtcggcgaccgttacctgcaatgtgagggtttcggcatcataccggcgatccgaatcgacggatgcgccgtcggcctgtacggatatgtcgctgtcggtaatgcctcggaacaggaaatcccatgttctccgggccggcagagcgtgaacgtctccctgggctggcgataccgtgagtgcggatgtggcgccgtccttgcgccatcgataggtgatcgcggtggtcgccggggtgatctgccgagagtaatgtcccgaatcctccatcagcgtgaagtcgccgtccgctccggggaagacgatgatctccagatgctgcgggttgtcgacggagttgatggaatccccctcggacaggggctgcatcggcacgatgccgccggccttcgcgaacacgggaattccgtcgagcggacgccagacggtcatgcgccgtccgttgggcgaagacgcgctataccggcgcccggtgaagaagtcgaaccagtcgccctgcggcagccatacgtcggccttgccccgtcgggaggatttatccatcggttccgtgatgggcgcggccagcagttcggtgccgaacatgtattcgttgggaacgtggtatgcggcgtcgatgtcgggcgatccccaatacatgggctccaccaggggaaggcctgtccgggatgcgcgccagttcatggtgtggaggtacggaatcatgcgatggcgcaggcggagcgcatcgtccatgatcgcacggatctccgggcggaagttccatggttccttgccggagaacggcgagcagctggaatgcaggcggttgatcgggctgaacacgcccagctggtaccagcgggcttccagctcctcgtcgcggtagccgaacatgtggccgccgatgtcatggctccaccagccgtaaccgatgttcgacgcggtggccgtgaaatacggctggaatctcaacgactcccaggtcacgatcgtgtcgccggagaagccgaccggataccgctgcgagccggggccggcgaaccgggagaggatcagcggccagcggccgtcgcgcgcggaatcgcagtagtgcatgtggttgagcacccacagcgggtccaggccgggctggcgggtcacgccgccctgctgccagtcgatccaccagaagtcgatgccgtcggcctccaggtcgtggtgtatgtcgaagtaggccctgacgaagcgcgggtcggtcaggtcgaactcgaccggctcgccgctgtccgggggaatccccatcgttttcgccgctgaaggatagcagtcctcgaacgcgcggatgccgtcgcgcggatgcacgttcagggagacgtggcagccgcgctcgtgcagatcccccagaaaacgttgcggatcggggatcagcttgcggttccaggtgtagccggtccagccggagccgtacttggggtcgacgtcgtccaccagatgccagtccatgtcgatcaccgaggtggtgaacgggatgccctcggacttgaaccgatccatcaatgctacatactcttcgcttgtgtagcggtggaaacgactccaccagttgcccaaggcgtatcgggggagtagcggcgaccttcccgaaagacggcagaaatcggccaccgcatcggcataacggtggccgtgcccgaagaagtacaggtcaatcccggcgttcttccggggcttgatgtcaccattgtcggcgaataggcaggtgttcgaatcgtcgagaaccgaccagccgtcgcgggagaccacgccatcgttcaggggaatggcgccgtcggcccaatcgagcgtgcgggccgtgcctttcatgttgccctcctgcgcatcgccgaaatgccaggtattggttttggtgtctttcacgcctttgaccacgatgctgagtccctccttgctgaagggccgcatgtcgtaggtcagacgtagcgcggtcgtttccacggtcagcagaccgtcggcgatcgaggtggaatattccgggggtgtgccgaaatcgcggttgacggccatgagcgtcgcatcatcgttgaactcgccggtgtctgaccattccagtcgtagcagcgaatcggagaggactccgattctccagcagttccctgaaatgacgcctttgctgttcgtgaaaggttgggtattcatacggatgtactcctgtgttttcagtgattctgtgctaataacatagcatttttcaaagagagtttgcaaccgtgtgcaaaatatgctattttcaagacaagaagattttggtcttcgttgcaatatgacgctgcgcatggattcaagaatgaatcttctgcagatatcgatctcggagaggagatgcagacaatgaccactgtcggaaaagtggtgcgcagagggtgggcgctcttcgcactacctacagtgttgtgtttcgcggtgttcttcgtcgtgccgcttgccatgggtatctacctgagctttacctcgttcaggacggtgaccgatgccaagtgggtggggctgaagaattatgtggatgcgctttcggatcccgaattcggagccgcgctgtggcggtcggtgctgttcaccatcgcgacgaccatcgtcgtcaatgtcgtctcgttcctgctggcctatatgttcaccaaggcgatgcgcggggcgaatctgttccgctcggtgttcttcatgccgaacctcatcggcggcatcgtgctgggctatatctggcagctgctgttgaacggcgtcctcgcgctgtgggaccgttccctgaccacgtcggcggtctatggcttctggggcatggtcattctgatgtgctggcagcagattggctatatgatggtcatctacgttgcaggcttccaaagcctgccgactgatctgatcgaggccgcgcaggtcgatggcgcatcgaacggtcagattatgcgcaggatcatcatcccgctgatgatgccgtcggtgacggtgtgcagcttcctgacggtggccaacggattcaagatgttcgaccagaacctggccctgaccaacggcgcgccgtcaaacgcatccgaaatgctcgcgttcaacatctaccgcaccatgtacggccgcaccggattcgagggcgtcgcgcaggcgaaggccgtcatcttcttcatcatcgtggctgtggtcgcattcatccagaaccgcattacgaccagcaaggaggtcgaggcatgaccgacaaactcaggcacgggccgctgtggacgaccattttcgccatcatctcgctgatatggatctatccgatcgcgctggtcttcatcaactccttcaaaaagcgcgtctacatctccaaggacgtgttcagcctgccgaccggcgacacattcgtcgggttggagaattacgagcgcggcatagaaaagacggatatccttccgagcttcggatggacgatcatacttacgcttgggtccgtggcgctgatcctgctgtgctgctccatgtgcgcatggtggatcgtcagggtcaacaactgggtcgccaagcttatgtatctcgcgtttatcgcaagcgtggtggtgcccttccagatggtcatgttccccctcagcaagctcaccgacacattggacctcaacacgccgtggggcatgtggctggtgtatctgggattcggcgcgggattgccggtgttcatcttcaccggcgtgattaagtcgattccctcggagatcgaggaggcggccatgatcgatggcgccggctccatccgcacgttcttcaccatcgtcctgccgatgatgcgtccggctcttatctccgtggcgatcctggagacgatgtgggtgtggaacgacttcctgatggcctatctgtgcctggatcttcaacggttcaagacgctgtccatcgccatccagtacctgaagggcggatacggatccgtggacatgggcgcgatgatgggcgctctggtactggcgctgctgcccatcctggtgttctacctgtgcggacagaagtacatcatcaagggcgtcaccgctggggcggtcaagggctgagccccaatcatttcaagaaccaatcggttcatcaaggaaaggaaagaaccatgaaaaccaagaaaatgatggcgatcgtcgccgcggccgtcatggcgatgggcgcgatggcggggtgcggatcctcgtcggcggccgatccggacaaaggcaaggtctacttcgtgaacaacaagaaggagatcgtcgaccagttggaggatctcgccgatcagtacaccaaggagacgggcgtgcaggtcaaggtgctcacggccgccgacggctacgacaatacgctggcctccgagttggccaagaccgaagccccgacgatgtggagcatcaccggctaccccaatttcatcaagtggaaggactacatggagccggtccaggactccgccgccttcaagctgctgaccgacgagggcaaggccaactcgtatcaaaccgacggcaaccactacacgttgccgtacgccgcggaatggtacggcatcatctataacaagaagatcgtcaacgactacgcctcgaaggactatgcggtcatcgactccgccgacgatatcaaggactgggatacgttcaaggccgtggtggaggacatgcaggcccataaggacgatctcggcatcgaaggcgccatggcgacccccggactcgaatcttcggacctgtaccggttcgcatcccatatgacgcgtattccgctgttctacgaatataaggacaacaacaccacgttcatgcctgagatcaagggcacgtacgtggacaactacaaggccctgttcgacttggagatgaacaactgtccgacctcgcgcacgctgttgacctccaagacgtatgaggacgtgaccgcggagttctcgctgggagaggtggccttctacccgaacggcgtatgggcctacacgcaggtcaaggacaacgaggtcgccgatgaggatctgggcatgctgccgtatttcatgggtatccccggcgaggaggagtacggccccgctggcatctacgacgcgtcctgggccgtgaacaagaacgccagcgagaaggacaagcaggcgaccttcgacttcatcgagtggctgttcagcagcgacgaaggcaagaaggtcatgtctcaggatatgggcttcgccgtgccgagcaccgcgtacggagatgaggatcagcccgacaacccgctgaccgccgccgcccgtaagtacgagacgaatggcgttccgatggtgaggagcttctccacgcttgacgcctggggtgcagacgtgcaggacgctcttgtggagtacgccaaccaaaccgggaagtgggacgccgtcgccgacgcatacaccaatggctgggccaaggagtggaagaccttcgaggacaccaacggtgtgctgccggaggccaccacgttgaatggcgacgagcagtaaatcgttcctcctccccatccccgaagcggggccgtatcctctctacggccccgcttcccctattcggcgcctattcgtcgacgtcccgcggagtcgcggtggtggatcggatgatcagctcggccggataggttcggtacggttcggaaatcgtcttatgattgataagatcgagcagtttttccgcgacgtcgtgccccatcaatcgcggctgctggcgtatggtggtcagtcccaattcctgcgagtaggttccgtcatcgaaaccggtgatcgagatgtcgccgggaatcttcaacccgaattcccgtaaacggcacatcaatggtatggcgatgccgtcctcttggcagcagatcgcggtgggcatgggctgcatattgatcaatgtgttgaaggtcgactgcaacgaatcgtctccgtccggaataaccagaacgtcgtctttgatatgggcctgcgcgcaggcctccttgaatcccctgatgcgctgagccgcactgagtgtcagcaacgattgcgggtccctgcacacgtatgtgatgcggcgatgcctcagggacaccagatgccggacgataagccgcagtccatgcgcatcgtcgatggccgcccataccgacatgttttcgttggagacggtgttgatgcccgcaatgggcacattcatcgttttcaggcgcgcgacctctctggaatccacgttgaacgaggggactatcactgcgtccgcattgcgtcgcgccggcagaacgtcaaagaaatccgccctgctttttacattgttgatggggtagatggagatatcatagccggcgggatgaaagaccatgtcgagcccttcgaagatgttgcctccgaaccatgtcgtgaccggggtgctcagcagtagcgcgatacggaagctctgcccggacttgagcgccatcgatgatctggaaatggagaaattgagctcggaggcggcttgcaacactctgtttcgagttttttcggagacaagctccggccgtgtgaaggcgcgcgaaaccgtggacgcggagacattcgcacgaatcgcgacgtcgtgaacagaaggtgtggaggtcataatgctcaattatagaaggttgtgcccgaatcggacacattggagtcggacaggctaagctgcatagaacaccgcatcaaaccggttcgacacgcgcattttgcggtattactggacatcaacgtccctttcgaggtaatatcaaaccggttcgatacgtataagtatgtaaaagcacgcatacactgcgtacacattgcacctgcatccatgaaccaagggaggtcccatgaaaaacaaagtgcagctcatcgcttacgccgatcgtctcggcgatggcactcttagctcgatgaccgacatcctgcgcacccgcttcgacggcgtgtatgacggcgtgcatatcctgccgttcttcactccgttcgatggtgcggatgcaggctttgacccgatcgaccacaccaaagtcgacccgcgtctcggcagctgggacgacgtcgctgaactttccaagacccacggcatcatggtcgatgccatcgtcaaccacatgagctgggagtccaagcagttccaagacgtgcttgaaaaaggtgaggaatccgagtattacccgatgtttctgaccatgagctccgtcttcccgaacggcgccaccgaagaggaactggccggcatctaccgcccgcgcccgggcctgccgttcacccactacaagttcgccggcaagacccgcctggtctgggtcagcttcactccgcagcaggttgatattgacaccgattccgacaagggctgggaatacctcatgtccatcttcgatcagatggccgcatccca

SEQ ID NO: 2870 - DNA, 5531 bp, Unknown
  R36_18m  MAG No. k141_35836
cgcagttgaccggttatgagtatgaggtggccgatgcagccaacgcgctgctggatggcaagatcgaatgcgaggcgatgccgcacgccgacaccatccgcatcatggagctgatggatgcgattcgcgaccgttggggcctgaagttcccgtttgaggtctgatttcagctcccctccagaggggagctgaaattattccgctgaatctgcatctccttcaacaatctgctcatacagccgtgcgaggcgttcgtcacgcacggctttcgttaattcgcactcccatacggtaattacacgccagccagcggcctccagttcggctcgctgcgcgatgtctcgattgtgattgcgcagtagcttcgtctgccagaattccacattcgatttcggcatcgaatgtttggaacagccttcatgcatgtgccagaaacagccgttgatgaacacgatggtgtggtatttcggcagtactacatccgggtggccggggtaacgcttgtcgttcttgcggaatcgcaaacccttgcgaaacagatagctgcgtaccagcacctcgattttggtgtctttgccacgaatatgcgacatcgtgtacgaacgggtgccccgctcatacttctccactggctgtttcttgcgattcacgcactccagactaccgtgacgttgcggcgaggatgaaagcctgaacgaacaatcacccatcttgcccgtccgtgtctcttatcgcgggcaatgatcatctgccggtcgagactgcacgattagaccgaatcaaatggatgacatgatgattcgtagggccacggcggccgatattccccaaatcgacgaactgctgcggcaggtgctcgaagtgcatcatgccggccgaccggatctgttcaaaggcggtgtcaagaaatacacggacgaggaattgaaggcgattctggccaacgatcagacccctgtgttcgtggcggttgcgccatctgccaatgacggcaccgacgtcgaacataacgccgacccccccgccaccgaccaagtgcaatggcatagcgccaagcgacgtctgctttgcgagatttgcgagagatgaatgcgataccagcgttcatggctatgctccttaatccaatatcaatggatgaacctgcactgccccgtatgtcaccatcataatatatcgaatatcaatataaaaatatcgaaaatcactttcaccattcacccacacacatcgcgacgtgatcgaccgttcttgccttgctcgcagcatccacgaccaacacgggaaagtcactttaaaaaagcactttatcaatgtggataactcggaagctagaaccacatacccccgttcagcttgccaatcagaaacctcatcccataccgtcagatgcacccgcacgcaacgacgcgtcagacaacagaaagaaggaccaatgaacatctctacgtttacccacaactcccacccggcaattcggcatacgcattttgtctagtgcgagattgagagttatgatgacacgaagaaaactcatcatcaagaaacttcggcaagcggcaaagcagcgagggctcgatttctatttgttacggcaaggcagcagacatgaggtttactgcctggacgggttgaggatacccatcccccgccataatgaagtctcagaacgaaccacgctggatatcatcaacgagagcgagcagaaactcggaaaggggtggtggcaatgagcaactatgacgtgcttgtgcaacccgatggccgatattggtacgttcaggtaccagctatcaaacggtcgacccaggccaaaggacttgacgatatcgagccaatggctaaagatctcatcactgtcatgaacgacgacgacaatccggagctcaaggtgacgtttgtgttgccgaaacaagccaaacaacacgtaacagaaatgttccggcagcgcgaaatagcaaaaaaagccaacacacaagcggctgccgaatcccgactcgccgcacgggccctacgcaacgaggaactcacgtatcgacaaatcggagctttattgggggtctcctaccaacgagcatttcaattggtcaacggcaaaacaaagcacaaaacgacagcgtccgaatcgcctcagccaacaactgaatcacgctccccacgcacgcaccatgccacaccgctatcgactccggtctcggcttagcgaacgggtccacaaagcccagactgtttccgcctcccaagctcaagagcaccgagcaggatcttctcatcccagcagattgaggagatcgtccttggtgagggtggcgatggaggcgggggcttcggtgagggcgctggcgccggtgccggcttcgtcggcaagcaaggaagcatcggtgaactggcgggcgagctcgctcttggtatgctgaagctccaagatgcgttcttcgatggtgtccttggccaccacctgatacacgttgacgtcttcggtctggccgatacgatgtgctcggtcggtggcctgatcctgcgcggcagcgttccaccatggatcggcgtggatgaccacgctggcaccggtcaggttcagtccggtgttgccggccttcaatgaaatcaggaaggcgggcgtatcgtccgcattgaactggtcgacgagttcgagacgcttctttttaggcgtggatccggtgatggtgtagtagcgtagtccttgcgcgtcgaaacgttcggcgatcagatcaaggaagctggtgaactgggagaagatcagcgccttcttgccttcattcacgcaggtttccaccagttcggtgatggcggcaagcttggccgactgatccttggcatcggcatacagcagccttggatcacagcagatctggcgcaacttggtcagctcggcgaggatgcgaatcttcgacgtgttgaaatcggcttcttcgctgtgttcgagctgcattctgagccgctgctcgtgggccgcatacagtttgcgctgttcgccggcaagctgcacggtcagcgtggtctccaacttgtccggcaaatcggtcagcacttgggacttcaacctgcgcttgatgaacacgcccaccaacgactgcaattggcgagacacccgggcggcctcaggattgacctgtgcggcggcccgaccttcggccgtgctgccatctgcagcccgggcgttggagatgggcaactcgtagcgctcatggaatcgcttgtatgagcccaatagtcccggcatcaggaagtcgaagatgctccacagttcggagagtcggttctcgatcggcgtgccggtcaaggcgaaacgatggtcggcggccacggccttgaccgctttggctatcttcgtggtgtgattcttgatgtactgggcttcatccagcgccatgacattgaaacgttgctcattggcggtgtaatcatcgacatcccggcgcagcaggtcgtatgaggtgatgagcacggtggggtcatccgcccggaacgcgcggccgatggcggtgcggcgctcggctttggtaccggccaccaccacggcgttgaagctcggggcgaacttggcgaattcggcaccccagttgtacaccaaggacgccgggcacacgatcaatgatggatgcggcccgccatcttcggaatcgaaagtaatatgaccggttacggctgattcactattaacagcattaccggcatccatgccttgagcggtcggcatgccactagattcgttgtggtatcgcgacagcaacagggcgataagctgcacggatttgcccaaacccatctcgtcggccaaaatgccgccaaaacccttgtcgcacaacgtgttcagccattggaagccttcgacctgataagggcgcagaatatgcttgagactatccggcacttcatacgacttagggtcgatgatcttgagatcgtcgatgtattcggtgaacgaagcgtccttgactacatcggagccgtcatccggcaactcaccatccagtaggaatgctcgaccgcccggcaactcgatcagcccggagttgagctgctgctcgctcagatcaaggtcgctggccaatcggtccaacgtgctgagattcgcgccgctgagtttgaccagcgtgccgtccttcaaatgatggaatcgttgacgccgacgatacgaagacagcaaggcacccacttcgtccggcggtacttcatcagcgaggggtgatatctccaccaaattgcctttgatggacaatccgactttgacgcttggcggcttgggcgcgatcagccggtcaaaagccggtgtggtgaagacctcccctacttccttcagtgcgggcaatccctcgtcaaaaagacgaacaatctgcgtggtgtcatcgcgatcgatagtggccgcatcagacacgaattgtttggcggtctttcgcgcggccggcgttcggaacccattcaccgtctgatgagtggcggccgcaacgcgcttgcgctggtcaggcatggtaaagaattcacgcactacatcaatcgcaagatgctcagcgtcgaaatcacgcccaatcacgccccgagacaaggggacggaacgctcatccctagcatgcaccgtcgggccatcgggtagcaacgggacaatggcatcgccgtagtgtgccttgacctcgcattgcacaccatgctcatcacgatccagataaaactggaggctgcattccgtaggacttaattcagccagctcgcgaggaatctcactggcctccaacagtccggcaccaaccagctgaggcaatagcgtgcgtgcgaacagggcgatgtcatcaccggcaatgacctgcccctcgccatcgggttcaaacaggtctcccaatagtcctcgcaacggaatcaatcgtttcgggcaacggacgaatcggcatcccgctgcgcttttacgctgagagcccgccatcatggcggataccgcaccggccggattagtggaggcgagcaacagccatacattcttgccgccgtcaatcacggtttccaccgctggcactccggtaagcaggtatccggcatccggaccatacgtattgaaatcacgccgcgcaatgcgcatgagaaaatctggctcgccaccatcaactggcaccgatgcaggctgcccggagaaccatgtgttcagcacgagctgtacgcctctgccctcacgtacggacagcaaccgggccacttccggtgctgaaagcgtcagatgacggtcgatggcgatatgcccgtaatacctgtcctgctgctcggccgcacgacgcacggccatcgcatcatcaaggacgtccagcagggggcgcgaatcatcatcaagcatatccggcgtatgagtaaaggcaagcttctgcccataatccgcatagtcgccgttcgccatggcaagcacaaattgcggaatcgatttcagcacatagctggacccattggaagccgagccgatcttgaactccacgctccacacgccgtcgatgaaactcaatatcgggacaagctgcacctgccccaag

SEQ ID NO: 2871 - DNA, 6305 bp, Unknown
  R36_18m  MAG No. k141_35888
ccgaagtccctgaaggcgctcgccgactacgtgcacgccaagggtatggaattcggcttgtggttcgagccggaaatggtcaactacgattccgatgtggcccgtaaccaccccgattggattctctcgcccaccgctggccgactgccgctgcagggccgcactcagcaggtgctcgatctgaccaatccggatgcgttcgactacatctacggctgcatggaccagcttgtcggcgagcttggtatcgactacatcaagtgggaccacaacaagttcgtcaccgagcccggttcccgccgctccggccgcccggccgtgcacgcgcagaccctcgccgtctacaacatcttcaagggcctcaagaccgcacatccgggccttgagatcgaaagctgctcctccggcggtggccgcgtggacctcggcatcctagagcacgctgaccgtatctgggtctccgactgcgtggacccggtcgagcgcgcggacatccagcgctacacctcgctgctggtgccgccggcgatgatgggcgagcacgtgggtgccagtcccgcgcactccacccagcgtgccaccagccaggaactgcgcatggccatggcgttcttcggccacatgggcatcgaatggaacctgttgaaggagccggacgaggcgctcgccaagctggccgtgtgggtggccgaattcaagaagcaccgcgactggttcgccatcgacacctgcgtgcacgccgactccaacgatccggccgtgcgcttggatggcatggtgatgccgaaccgcgacgccgccatctaccgcttcacccagctgaccaccagtcagacctatccggccgcgcccgtgcacctgcccggacttgaccccgagcgcacctaccgcgtcagcccgctcgacccgagcttggatttgaccggtctggccaacggccagagcactctcggctggtggaacgaggaaggcgtagtcctgaccggcgaagccctgcagcgttacggcatccgtcccccgtccctccacccccagcaggcagtattgctcaaggctgtggcgttaagctgacagcctagtaggctgtcagtagccacggcctgagcgaagcgacagctgagcgaaggtgggattgagccttgccgataggcaagtccgtaattgctggtcgtggcggagtaactgtggcgaagcaacgttcttggcttccctctctgaggggagccaagaacggcctacccaatatgcttcacgattacgcgactggcggcggctttggcccagagctgccagtcgtggtccataatcgtgaacttgaccggctgggtctggctgtgacggtagaaacgaatgccatcgcgcagcgaatcggtgccgagcttggccaaaaacgcggactccccggcaatcatcacatgtccgggcatcgcgatgttcgccaccgtagccaccagcgaacccaaccggaaacacgtccggttcaccaactgcgtggcctgcggcacgcgtcccttggcatcgcgcgcaaagtcctcaaaactgaccgcgcgacccacaatcgcagagtactgttcggcgatcgaatcgtcagtcaagcattgtgaacagccgatatgtccgctggtgcagcgcggcccctccggatcgataagcacgtggcccaccagaccatagctcttatccgggtactgcactggcttgccgttcacggccagcgaataaccaacacccacgccgatggtcaccacggcgaacatatccacgccgacacccggcccgaaccaggaggcatccaccagcagagaatcgatatcattgaacaccccgcacggcaggccggtcgcctctgtgaccatcgtccccaagtccgtggccccgtcccaatgcaggaacggcgcgaacgtcacaatcgaatcgtcgaccacatgcccacctaccgcaacgcccaccgcagtgggggagggcagtccggaagaggcgatatcggcggaacattcgcgcaccagccgcgtgatggctgacaccacatactcagccgactgatccgccccgatcggcacctcgtgccggccggacaccacctcgccatgcgcgttcaccgcagcggccacaatcgacatcccatgaaccttgacaccaatgaaggtgcgtgcgttcgaacacaacaccagcgaagtctgcgggcgtccgcgacgatccgaactttcccttggcgtgaatcgctcgggcagcttgcctgacgggccggcctcggccggaagctcctcgatcaccccggcgtagatcagatcgctggtgatgcgggacaaggccccttggctcagtcccagcatctgtgccaacgtagtgcgggctatcggcccgtattgggcaattgccgccgccacgcgatgcgtatgctcggatccggaaaaccactgtggaatcgcgttgacatcagacatgcaagccccttcgctgtatttattgcgttaatcacaaaataccgcgctttttgttgcttgcgcaagtgggctcgctggcgctgggaatgaaatggccgaaccgttaccttggaaagtggaagaaccgccggcaccgaagccggaggaaaagaaagataaaggagtcaacaattatgctgtccgattccccacatgcaacgcctagactgaagcgtctggccgtgcgcaccgccgccgtgatgtgcgcgatcgccgtcgggttcggcctggcaggctgcggctccagcaccgcaggcaccgtcacgctggatttcttccagttcaagtccgaggccgccgaccagttcaagtccatggtcgccgattttgaaaagcagaacccgaccatcaaggtcaatatcaacaattccgccaacgctcagaccgatctgcgcacccgtttcgtcaagaatcgtgtgccggacgtgatcaccttcaacggcgacatcagcttcggcaacttcgccgcctccggtgtgttctacgacttcaccgatgaacccattgtggacaccctcaaccccggcatggtgcagatcgccaagaatctggtgcagaccaccgattcctccaagaagcgcctgtatggcctgcccttcgcgggtaacgcctccggctacatctacaacaaggctctgttccgcaaggttggccttgacccggagaatccgccgaccacctggagcgagttcaccgatatgctcaacaccttcaaggacgccggcatcaacccgctgcagggttccgtggccgacgcctggaccacccaggcaccgctcgcctccctggccggcacgctggttcccgaatcgaagtacaccgagctcaagcaaggcaagaccacgttccaggaactgtggaagacctcagtcgagaaggaatccgagctcttcacctactccactgcggacaccggcgtcacctaccagcagggcacgcagaacttcgcccaaggcaaggccgcgatcatcccgctcggcacctacgccatcccgcagatcctgctgatcaaccccgatatcgaacttggtttcgcccagatgccggccaccgatgacgccagcgagcagatcctcaccgccggcgacgacgtgatgctcaccatcggtgcgaacaccaagcaccccaaggaagcgatgaagctcgtcgagttcctcatgcagaaggatcagcttgacgcctacgccgacgcccagtccgccatcacgccgctgaaggacacctacttcggcaacgatgcgctggaaaccgtgcgcccgttcttcgaggaaaaccgactggccgacttctgcgaccactacattccttcgtccatcaacatcggcggctacctgcagaccatggtgacctccggcaacaccgaccgcttcctgaaccagatgcagaccgaatgggacaaggtccaagccaggaccttcgagtgatcggtaggagaggagaacatcatgtcacacgcaaccgcaaccaagaccgctgccaagaaaccggccaagaagaaggtctccgccttctccacccgcaaggtggaccccgcctactactggatggtggttccggcggctatcattttcgccttcttcctgtacctgccatttcttgacggcgtaaagtattccttcaccaactcgcagggctacggcgattacaagttcatcggcctgaagaactacatcgccctcttccaagacaaccgcgtgggccacgcctacctgttcacgttcctcatcgccattctcatcacggtgctgattaatgtgatcgccctgttcctgtcggtgctgctgaactcgaagatcgccttcaagaatggcttccgagccgtcttcttcatcccctacaccctctccgtgctggtcatcggctacgtgttcaagtacatcttcatgaacccgctgcccgagctcggcaaggcgctgggcatcaagtggctgtccacctcgctgttgaccaatgagcaactcagctggatcccaatcgtcttcctcgccgtctggcagggcatcgcctactcggtactcatctacctcgccggcctgcagaccatcgacgacgaaatctacgaggccgccgccatcgacggcgtcaacgcctggcagaagttctggaagatcacattcccgctgatcggaccgttcttcaccatcaacctcgtgctgtccatgaagaacgcgctcggcaccttcgatcaggtcgtcgccttgaccgagggcggtccgaactcctccaccgaaaccgtcacctacctcatttggaagggtggcctgaccggtggcgagtacgcctaccagaccgcaaacgccgtgctcttcttcatcgtgctggcgatcatcgccttcgtacagctgcgcatctcccgcagccaggaacagatctgatttaggggaggataagaaatgactactgcaacagttaccccgtccaagtccggcaagcccgccaagttccgcagggaccacaagatcaactggtggctgaccgccgccgtggccgtgctgagcctgaccattctgatcccgctctacttcaccatcgtcaccgcgctgaagactccggccgaggccggcaccttcgccctgcccacctcgtggcagtggcataacttcgccgacgcctccgccaaggtcaactacccgaaggccgcgctcaactccgcgatcatcacggtggccgccgtggtgctcaccctgctgaccaacaccttcgtggcctacgccgtggcccgcaacatggacaagcgcttcttccgcttcctgtactacttcttcatcgccgccatgttcgtgccgttcccggtcgtcatgctgccgattgcgaagcagatgggctccctgcacctggacaaccaggtcggcctgatcatcctgtacacggtgctcggcctgggcacgaacctgttcatcgccactggcttcatccgttcgattccagtttcgctggaagaggcggcccgaatcgatggcgcatccacgtggcgcattttctggaccatcatcttcccgctgatgagcccgattaacgccaccatcgccatcctgaccgcactgtgggcctggaacgacttcctcctgccgttgatcatcctgaccgaccagtcgaaccagaccatcccgctcgcccagtacgtcttcagctcgcagttcgccaccaactacccgatggccttctccagctacctgatggccatggccccgatcctcatcgtctacatcttcgcccaaaagtgggtcgtcggtggtgtgatgaggggagcggtcaagtaaaacagcgcaggcgctgctttacttcaccgcgtcgagcgagacgagccgattaaggaaacagccccgtgggctgtttcccggcccgggcggccggataggtcgcgtactcgcgaggtcatgttgggtctggccgtaggccagtcctgaattgcaggactctgtgaagtaaaggtccgcttccacccaagcctcctccggctctcaccggaggaggctcttctgtcctgttgccatactggaaaccgccacaataaaggcgacggtcggttgatgtggcggtggcgcacaaaggtcatgtggttttgctcgttgtgcgaatgaaaaagtgacgaaaccgtacggcttacggtgcaattgagcgcatctgctgtgtcgccgtgccactggcttgtcccggtccacatatcaaccgtttgacgcgcgaaccgggccaacgccgaagtccggagcggttcccgaggcggggtttgcttgaaatccggtgtgccagcgaaatccccaccagattcccgcaggcgtgtcaactaaatcatctatccccgcaccagtgggttcaagcagg

SEQ ID NO: 2872 - DNA, 5862 bp, Unknown
  R36_18m  MAG No. k141_36230
cgaagcgatcgaatttaaggcgactgcgtataccatttcgccacggagggcaacttttctattagtatctatctccggccctgagcattgcttgcgggttgctgcgcttcgtgcagccgtcgcggcatagccgctcccttcgcctacaaacagcccagtgggctgtttgtagcagccggtagcgatagcgtcgccggcgtcgcatataacgcaaacagcccaccgggctgtttgcttaacggctcagcccgctggaggcacttaccacttacgctattgagccagcaaccggcgaccataatcgagcacaatgccgtccagcagaccgtgttcgctggcaacgaacgaatcgatggcttcaccatgatcggccttggcggcttcgctgacacgcgccagcacacggctccagaccacagcgccgccgccgaccacatcgatacggccggggtggatggtcttgtattcgcggcgctcggcgcgcgtcatcctaaggaacttgtcgtccacggcataggcgtcttcaaggctcaaccgatgcccgtcgaccacggtgtgatcgtattctttcaatcccatagccaaggcggtcatcgtggtcaccgtgccggacacaccgatgatggtacgggccttgcctgcgtccacggtgcggaaggcctcatcgatatgctcgtcgatgtccgcaacggcctcatcgatctgcgcctgggtcggcggatcgttggtcagatgacgttcggtcatgcgcacggaaccgacgttcatggagaatgcgccctgaacctgggtggtgggcgcactgacgccgtcgccaccgatgaccagctcggtggacccgccgccgaggtcaaccaccagatagggggcgggcagatcgtcgcgattgaccacggaagtggcgccgaggaagctcaggtcggcttcttcagtgccgggaatgacttcggggcgcacgccgaggatacgttcgatctcatcttcgaactcctcgcggttttccgcgtcacgagtggcggaggtggcaacgaaacgcaggccgtcgatgggatgctcggcaatcacaccggcgaattcccgagcggccacataggcgcgttccaacgcttcgtcggcaaaacgatgggtcttgtccacatcctggccgagacggatcacacgcaggatgcgcggcaccacctcatgcatgccatcggcatcgacacgtgcgattttcagtcgaatggagttcgtgccgcaatcaatgccggcgacggttacggattccttgctcattgccttctcctcgtatcccttagtgcgtatgaatggactgttcgcgctggctcatctgttgatcaatcgtccagcgtgcagcggcagacggtcggatcgaattcgtctttgacgcgttccagtaccaaatcgccaatggggttgacgcccggccccataaccaaggactgggccagcagggcatgcaggcacttgacgcgcaccggcatgccgccggccgaagtgccttcaatatgctcctcactgtcgccaagacgtcctgccagttcgtggcggaatgccagatacaggttatgggcctgctcatatgcggccttgagctcctcgtccgaggccaacatgtcgttgtattgctgcatcacgccggcggcctcgacatgggaggcggccttgacggcttccggaccggtcagatagcacgtggtggggaaagggattccgccgggcaacaccggacgggtgattacggcaagtggcctaccgcagacgcatcgcgcccccacggcgaccatgccgcgcgggtatcggccgagctgacgctgcacctggtcgatgtcatggtcgttggcgggctcggcaagcatggtgtcgacaagggccttggccttggcggcgatatcgatggtcactgttgggttccctcccctgtgttttgctgggtgttctgatcggattgagtgttctggtctgacttatcggactgcttggatgagtcgttggatgacgagtcagaggaaccggaagtatcggatttgccggactcgctatcggtcacaggctcatcggcctttttgagcgagtaagacagttcgctgtaccatggcaggacttttttgttgctgctactggaatcttccgttttctgggattcgctatcggagccggtcacggcttcgggatgcagcacacgcacggcctgttcgccggggaatacgaagccgaggcgttcacgggcctgggcggtgatgtaggccttgtcatcccaacgcttgatatcgttctccaactcctgcttttgggcgatcagcgaggcttcctcacgcttgaggccattgagctcggccaggttcagggcataggtgtggaaggtggagaccagctggatggtgccaagggcgataatgaacagggagacgaagaacgctatgggccccgccgacccttttttcctgacttgtgctttgccggttttgccaggtttgccggtacgggacgacttgctcatgtcacatgaaaatacccgccgcattcgacttgacgaacacgacgggtatcgagcttcagtggaaactcacgcctttacgggcgtttcagctcacttggccaagtacttcttgcaggccttgaaggcgctgtagccggcgtactgagcggtggagccgagctcctcctcgatctcgagcaggcggttgtacttggcaacgcgctcgccacgggccggggcaccggtcttgatctggcgggtgttcttagcaacagccaggtcggagatggtggtgtccggggtctcgccggagcggtgggaaaccatggaggtgtagccgttggcggtggccagctcgatggcgtcgagggtctcggtgacggaaccgatctggttcagcttgaccagcagggagttggcggcgccgaggtcgatggccttctgcagacgagccgggttggtgaccagcaggtcgtcgccgacgaactgcagacgatcgccgaggcgagcggtgatggcagcccagtcttcccagccttcctcgttgaacgggtcctcgatggagacgatcgggtactcgttgatgaggttctcgtagtagtcgagcatgtaggcggagtcgcgctcttcaccgtcgaagcggtacttgccggtctccttgttgtagaactcggaggaggcgacatccaggcagatgccgatctgcttgccaggctcgtagccggcggcggagatggcgtccatgatgtacttgagggagtcctcgttggacttcatcttcggggcgaagccaccctcgtcgccgaggccggtgttcaggccttccttcttcagaacgttcttcagggtgtggtaaacctcaacgccagcgcgcagagcctcggagtaggtgtcgaagccgtacggggagatcatgtactcctgaatgtcggtggcgaagtcagcgtgagcgccaccgttcatgatgttcatgttcgggaccggcaggatgtggccgttggtgccgccgatgtagcggtacagcggcaggccggcggactcggcggaagcgtacagagcagccagggagacgcccaggatggcgttggcgcccagcttgcccttgttcggggtgccgtcgagctcgatcatcaggtcgtccagagcgcgctggtcagcagcgtccatgccgatgaccttcggagcgatgacctcgttcacggccttgaccgcgttaagaacgcccttgccgccgtagacggacttgtcgccatcgcgacgctcccaagcctcagcttcaccggtggaggcgccggacggaaccagacccttgccctgagcgccgtcttcggtctccaggtagacctcaacggtcgggttgccacgggaatccagaatctgacgcgcgtacacgctttcaattactgccacaactactccttaaaacggttgtgtatcttgaatgacattcttaagagtagtgcgatttgtggacgttgtgaacaacacgcccaaaatttagtgttagcgctcacaatgccgatgcgccgcctgattgcaaggcagtacggacgaaatcgctcagtcgacgtccttgccattgaggtagtcgatttcactgtcggacaatttcagttcgctggctttgaacgagtcctgaatctcctgcgggtttctggccgagggaatcgtgaacagatattggtattgcgcaagttcccacgcgagcgtgacgcgctggtaggagcagtcgtgggacttcgcgacttcacggaaccggtcgaacagatgctcgttgaacgggtcaaggaatccaccgagcggcgaccagcagacgaaagccaaaccgagtttttcgcaggtctccaacgtgtgttcggggtcgcggtgaaccggggagaactggttctggacggccacgagacgatcgcccaaaatgttgtgggcggcttcgatgtccgcgttgtcgattctggagataccgaccgctttggccacaccttcgtccacgagctgcttgagtgcgcccatctggtcttcgtacggcacctgcggatcattgcagtgcgagtagagcagatcgagcgtatcgacaccgaggcggcgggctgattccttggcattggcgatcatggtttcaggtcgggcgtcggcctgccagccgtagttgccgttgccgtcaagcgtgcgcagccagccggttttggtggctacgagcacctgatctttggggccatgccacgagtgcagagcatcgcggaccagatattcgccatagcccatatcctccggttcgccggtgccgggtgcgctgggcagataataggaccaagccgtgtccaaataacggactccggcatcgagcgcggcatggatggtctcgatcgcctgatcacggttggaggggcgcccctcgatggcgagcgccattgtgcccatgccgaggcggggaatctcatagccggcaagtgttgccgcgtgttggtttttcatcgttgtggcctccatgccaagtcatcgaggagttggttagtccagaggactacctggtcggagctcatggggccttggcccagggaaccggtgaacggggtgggtacgatgagctggtgggtgaccgggcggtattgggcgcctttgtaaatacggcccatacgcatctggatggattcgggcgggtcgatacggccgatgcgcacgcggttggattgcgcgagaatctccgaaatgccgagcttgcgggccttgaacttcagacgggccacgtcgaacagggtctcgaattcgaccggcggcttgccgtaacggtcggtaagctcctcttccagatccttcaaatcggcctcgttgcgagcggaggcgagcttgcggtacgcttccagacgcagcttgtccgaatcgatgtactcgatcggaatcgacgcttcgatgggcaggtcgatggacacggccaccggctcgacgttctcctcaggctccttgtacttctccacggcttcggacaccatgcgtacgtacaggtcgaagcccacgccctcgatatggccggactgctcgtcgcccagaaggttaccggtgccgcgcaattccaagtccttcatggccacatcgaaaccggagccgagcgccgtgttctgcgcgatggtggcgagccggtcatgggactgctcggtcatcggcttggacgggtcgtacaggaagtaagcgtacgcgcgctcgcggccgcgaccgacgcggccacgcagctgatggagctggctcaagccgaaacggtcggcctgatcgacgatcaacgtattcgcattggaaatatcaagaccggtttcgatgatggtggtacacacgagcacgtcaatgtcgcgatgccagaagtctcggatcacaccgtcgagctgcttctcccc

SEQ ID NO: 2873 - DNA, 5179 bp, Unknown
  R36_18m  MAG No. k141_36322
gaatcattataaacgacgctggatacattgcgtgtcgagcatatgaattcaaaaaggttctggattctcttgatagcttatgagtgacatctttattcattgatgctctacaacgactaggtttggatctgcatcgatatccggcgcatccgctggactaacaaggaccgtgcaaacgatgtggcccccgacttcctgcgaggaagtcggggccacatcgtttgcacggtggactatcggatcaattctgatcagatcagctcgaggtcgacatcgaggctgatcggcttgtccgccgggatatggtactgggggtgcaccggcgacatccaggaatcatcgccgccgacgcccatctgtgcggcaaggacgcgcaggaacatgtgcttcggcttcggcagctcgtcctggtgctgagcctcctcaagcatgaagctggagtacggcaacaggcttaccgcgaacggcgcggcaccatcggcgcggctgacgcgcatgccgtggccgtgatcgtcggtaatctcggcccaacgcacatcctcatggttgcccgtctcctgcggcatgaggtacggcgcatgatccgcgaaagcgttggtgctccacacgccgagcttggcgtgtttgcggtccaggtacgtctcctccgggccggtgccgaagaacctcaggttcgtgtactgcacaggcagtgtccattcgatgccgaacgccgggatggtgggcaggtcaccctgctctccagggtattcgacgtgcaggttcacgcggccatcggtgtgggccgtgtaggagacggtcaccttggtgcgctgcgcggtggcgagctcatacgtgtacgtgcccttgagcgtgctgtcgtcgatctgctcgagcacgttgtccacgcagcgggcgtagcggccggcgcccagccactggacgcgctcgaagccatgaccggcaccgcgatcgttgtcggtcagcggacggaaggtggtgattgcgggacggcgcagcacgaactcgttgccggcgaaggtgtaggagaccatgccgccctgggtgcgcgaaagcaggacctcgcgtccggcgcctcgcacgccggcgttccaacggcccacggtgatggtcccatcggccggcttcgtgtcgggcgtcgcggtggcgtccgcggacaccacggcctgtccgaaggcgagctcgtagccgctctcggcccaatcggtcgccttggcgagacgctgcgaaacctgcagcaccagttcgcgggcgtcggcgcggtactccgccaccggccatgcgacatcgaacgtgcgggtctcaccggcgggcacgtcgaaacgccgggtggactgccagaccggcttgccgtcggcgagaacgctcaggacgaacacgtagtcgccggtggcggtgaacaggttgtcgttcttgacggacaccgagtccttcgtcacgtcgatgtggacgttcgagtacagctgcttgacttcctgggccttgggggaaggcttgcggtcggcgaacagcaggccgtcgccggagaactcgtagtcggacggacggtcgccgaagtctccgccgtagcgcaggctcctggtgccgtcgggctgggtggcgtagatggcctggtcgatgaagtcccagatgaagccgccctgatacttcgggtagcgttcgagcgccgtgtattcgtccatgttgcccacggagttgcccatggcgtgcatgtattcgcaggagaggtacggcttcttcgggtcgtccttcagatacttctcgatctcgtcggcatgcgagtacatacgggtctcgatgtcggtgacgtcatcgtagtcacggttgtgggtcacgccctcgtagtgcaccggacggttcgggtcgatgtcgtgcacgtgcttgtacatggcgcggaacacgtcgcccacgtaggattcgttgcccagcgaccagatcagcacgctcgggtggttgtagtcacggcgcatcatgctgttgacgcggtcgacgcaggcgccttcccattcgcgcttgctgcccggcacgatggtgtcctcggtgaggacgtctccgggcagggaccagctgccgtgggcttcgaggttggcttcgtcgatcaggtagatgccgtactcgtcgcacagttcgtaccagcgttcctggttcgggtagtgcgaggtgcggatggagttgatgttgtggcgcttgcagaagaccacgtcatcgatcatgtcctgctcggtgatggcgcggccgcgttcggcgtcgaactcgtggcggtcggcgcccttgaacacgatgcgcttgccgttgatggtcaggatgccgtcctcgatgcggaagcggcggaaaccgaccttctgggacgtgcattcgatgacgtcgcccgcttggtcgatgacgtcgacgtcaagttcgtacagcgtcgggctttcggcgctccaaggttcgatgccctgcagcggctcgctggagatcgcggtctgcgcctccgcgtcgcccgtcgtctgccacaccgtgttgccgtcggcgtccttcagggtcgcgcggaccgtggccgcgtcggccgcgttgagcacggtcagcgcggcatcgagggaggcggtgccggcctcgggatcccaatcggcttcgatctgcgtgttctcgatgtgcacatgcgggcgggcggcgagttcgacggagcggaacaggccgtgcagacgccagaagtcctgatcctcaagccaggaggcgctggagtattcgtagcaggcgacggccacgacgttctccccgtcgtgcagcagttcggtgatgtcgaactcattgggcgtgaagccgtcctcgccatagccgacgaacgcgccgttgacccacacgtagatcgccgtggccatgccgtggaacacgatcgacaccgatccgccggcctgcttggcgtttgccacgggggcggagacggtgaacttcctgcggtagagcgcgacgtgattgttctccgggatgttcggttccaacgggttctcgtggccgtcccacggatactggacgttcacgtacttgtggttcatcagaccggccgtctgcaggtggcccggaacctggatacgctcgaacgaggagtcgtcgaacgacacggccgtcgcgggttcctcttcgaggttgatgtcggcggcctgaacgacctcgacccgccactcgccgtcaaggctctgcttgagatcggaccattgtccgctctgggggtcgcgggtgtaccacttgtggctggaatgggccggagtccggttcacctcgaacaccgtcgggtcggtcagccaagcctgcgatgcgcgatcgacatgtgtgacgtctgtcatgctctcctgctttctgtcattacctcgttgtgaatgatattatggaggaggtcggggcctcctttaccgaaaagaataaacagtttttatataaaacgcaaatcctgtttaccgcttccaaatcactggcactgcttgccgtcgacactacgccgcgtccatgcaatgtctcggttcagctcatgttatcccatccttgcgacacgctgtttatctccttgtttactaatgctttttacttttggtgataaaacttgtatgcttactttacaaaatcaatgagtgattccatgctctgggttcttaaggagaagattaatgagcaacgaaaatgccgcggacggtgacgtccgcaggaagagtgggttaggccagcgcatcgcctacgcgttcggcaacctcggtcaggccgccttctacaacgcgatgagcacgtacttcatcgtgtatgtcaccagctgcctgttctcgggcgttgacaaggcgcttgcggccaagctgatcggcgtcatcaccagcctcgtggtgatcatccgcatcgccgagatcttcgtcgatccgttgctgggcaacctcgtggacaacaccaccaccaagtggggccgtttccgcccgtggcagttcttcggcggactggtctcctccgtgctgcttgccgtggttttcagcggcatgtttggcctggtgaacgttaactccacattgttcatcgtcgtgttcgtcatcacgttcatcgtgcttgacgtgttctactccctgcgtgacatctcctactggggcatgatcccggcattgtcctccgactcccacgaacgttccacctacaccgccctcggctccttcaccggctccatcggcggcaacgccatcaccatcctcgtgattccggtcgtcacctatttcagctgggtgttcaccggcgagaacgccgagcaccagtcgggttggaccgctttcggcatcatcgtcgcggtgctcggcatcatgaccgcctggaccgtcgccttcggcaccagggaaaaccaaagcgcccttcgcgccaacgccgaagacaacggtggtccgttgcaggcgttcaaggccgtgttccagaacgaccagctgctgtgggtcgccctgtcctacctgctgtacgccatcgcgaacgtgaccaccaccggtgtgcttctcttcctgttcaagttcgtccttgacaatcaggccgctttctccgcgaccggtgtcatcgccatgatcgcgggcctggtcatgtccccgctgtacccgattctgaacaggtacattccgcgccgctacctgtacatcggcggcatggtctccatgatcgtggcttatgtgatgctcgccctgttctccagcaacatcgtcctggtcttcatcgcgctggtgctcttctacgttcccggcacgctcatcatgatgacggtcatcctctccctgaccgactccatcgagtacggccagctgaagaacggcaagcgcaacgaggccgttacgctttccatccgcccgatgctcgataagatcggcggcgctctgtcgaacggcatcgtcggcttcatcgcccttgcggccggcatgacgggtgacgcaaccgccgccgatatgaccccgacgaatatccacgtcttcaagatctgcgcgttctatgccccgctcatcctgatcgtgctcagcctggtggtgttcgtctccaaggtcaagatcaccgagaagatgcacgcgcagatcgttgacgagctcgaagccaagctcgcttccggcgagatcgtcgacgatgaggcgcaggtcgtggaggccgtcgaggccgccggtgatgaggcgcaggcagttattaagaactgatctcccgttcc

SEQ ID NO: 2874 - DNA, 6005 bp, Unknown
  R36_18m  MAG No. k141_36932
cgattccttcgtctacacgatcgtaggctatctgcaaacccttggcgccactgttgatgtggtgcgtaacgacgctatcgacccagccgcgccgggtgtactggacggttacgatggcgtgctgatttctcccggccctggcgctccggccgaatccggtgccagtgaggatatgattcgcctgtgcgcggccagcggcgtgccgatgtttggtgtgtgcctgggcttgcaggcgctcgccgaggtgtacggctgcacggtgggccacgcgcccaccatcatgcacggcaagaccagcccggtggagcatgccgatgacgagattttcgagggcgtggccaatcccatgaccgccacccgctaccattcattggccgttgagcccgattcggtgccggatacgctggtggtcaccgcgtggacgcaggatgaccacaccattcagggcatcaaggtcaaggacaagccgatgtatgccgtccagttccatcccgagtcggtgatgacccaggacggctaccgtctattggccaactggcttaaggtctgcggccaagacaacgccgtggccaagtccgccggccttcagcccaaggttacgaagtagcttttccgcgcgcggcgacgctttcccgggaatgttgcgctgggatagctctttatacagcaaaggggaggggtgcagaagcccctcccctttgcgttgtgtgattgcgttgcgtgtttacgttgcgcatgtgttgcgcatgtgttgcgctatgtgcgttgcgtatgcgcaacacacacgcccggcgctcactcactcacgggttccgccccccgttgccgttgttggcaccgttgccattgccaccgtctccggtaccggtgtcgcctccggtgctgccggccttcgtggtaatggtgacggtcgatcccgcatctacttggctgccagcgccaggattgatgctgactaccacagcggtgctgtcggttgggccactggcctgagccttgaggcccacggccttgagcatgagttcggcggtggcgtagtcagtgccagcggtgatattcggtacagcgaccttttccttgcccgtggacacccagatggtgatggacccgccctgcgcgatggaagagcccgaatcggggcttacgcgggtaatcagaccggcctccaccgtatcggagctttcctgctccacggtgaagctgaacttgccctcatactgctgtagcacgctgtccttcgactgaccgaccaaattgctcggtacggtggtcatgccggaagaaacatatatggtgatggtggtgcccttgggaaccgactgaccggcggcaggatcggttctcgtcaccatatccttggcgatgtcggcgctgtcttcggttttgacggtggcgttcaccttgaacccggcgctttccagaatgctgcgcgcctcttcctggctgcgctccttgacatccggaacctgagtggactgcgggcctgcggagaaccacaccttcacggcagatcccctggccaccttggagccggcgtccgggctcatcttggtgcaggtgccttccggctcggtggagtcggtgtcttgcttttcggtcatcttcaagcccaatctctcaagcttgagcttgatgttgtccttggacgtggaagcgttgcacacttcagggatggtgacggtgtcttcagaggacttgttgtcggagccgttcatggcgaacatgatgcccacaatgacgagcaccgcgacaatcgccgcgatcgccgaaccgatgatgatcttcttgcgcttcttggccttggccgccgccgcacgctgctgcgcacgggactgcaacgccgctgagttggcaccattggccggtggaatctgctcgaactgaccggtcaccgggttgaatgcctgggtgggctgctgctgcggttccaccggcgtggtgggcaaatcacgttcggcttccttgcgggccttcatattcgacaggtccgtcaatgggttgaacgcggccgccaccggcacgccgccgttcatgtaggtcaggatgtcggtcttgaattcggaggccgtggcgtagcggttctggcggtccttggccatggccttggcgcagattgaatcccacatcttcggcagccccggcaccacggcggatggcggcgtggcgacttcggagacatgctggtaggcgatggccacagcggaatcgccggtaaacggcgggcgcccggtaagcatctcgtagagcacgcagccggcggaatacaggtcggaacgcatgtcgacggtctcgccgcgcgcctgctcgggagaaaggtactgtgcggtgcccaccacgccctgcgactgggtcatggtggttgcggaatcgtccagagcgcgggcgatgccgaagtccatgaccttgaccgcgccctgctcggaaatcatgatgttgccgggcttgatatcgcggtggataatgcccatgcgatgcgaatagtcgagcgcgttaagcacgcccaacatcacctgttcgcagtcgcgctggctgagtgcgccgttgaccttgatgatgtcgcgcagggtctggcccttgacgtattccatgacgatgtacggcaaacgctcggtatcgccgctttcggaagaaaccagttcttcgcccgaatcgtagatgttcacgatgttcgggttgttcatctgggccacggcgtgtgcttcgcggcggaaacgggccaggaagatgtcgtcgttggccagatcggcgcgcatgattttcacggccacggtacggcccagacgggtgtcaagagccacgtggacctcggccatgccgccacgaccgatgagctggccaagctggtagcgtccgccggccaatgcggtgggcatactggtgctcattgcttattccctcccaatcttgaggccggggcctccaaaacaatgcgtggcgtgctggtcactcggcgcggcagtcgattgccggacgtggccatggcggtgtcggccatttcggtctgctgatccagcagacggcgttcgatgcgtgccagcgtacgggacaccaccagcgcgtctttcgggcgatccaacgggtccttggccagcatcgacatgacaaattcgcgtaactggacgtccaccgagttcggcagcggaggcacgggattgttcacgtgcgctgcggcgatatcgaccggagtggtgccggtgaacggacgatgcccggcaaggccctcgtacgccactacgcccagtgaatagatgtccgattgcggcgtggcctgctggccctgcgcctgctcgggggagatgtattgtgcggtgcccaccaccatgccgtcctgggtgatctggccttggccggtggagtagctcacgccgaaatcggtgatcttcacttcgccggtgtcggaaaccatgatgttggccggcttgacgtcacgatgaatcacgccgtgcgagtgggccacgaacaggcctcgcgcggtctgaatcaggatgggcagcagttcgatgggatccatcgcgcccttgctatggaacaggtccgccaacgatttcgaggggacgtattccataatcagaaagccgatgccgtcatgctcgtagtattcgaacaacgcagcgatattcggatgcgccagattggcggaattatgggcttcggcacgcaggcggcgtagcttggcctcggcgttggtcacgtccgagcgcagcgccttgatggccacttcacggccgagctgaatatcgtagcctttccagacctcgcccataccgccttgcgcaagacgcgaatcaagacgatatcggcggtgaataagctgtccttcgataagtttcactgttgcaaagcctcctgcatcatcgcgcgcatgatcgggccagcggcgagcgaaccgtgtacatctgtgttatgcaccaacaccgcgacggcgatttgcggattgtccgccggcgcgaaaccgatcgcccagccgtcgatggcagagttgtcgataccgatttgtgcggtaccggttttggtcgccaccttgatgccgtcgatggccagctgcggattggcctcggtcatcacgctctccatcatcgtggtgagcttgtctgcggaatccttgctgaacgcgttggccatggtttgcggtttggtctgcgaaagtacggtgagatcggcggcgcgcacacgatcgaccagcgtgggctgcatcagtttgccattgttggcgattgcctgcgcgaccatcgccatctgcaacggcgtggccgtggtgtcgccttggccgatggatgccagcgcaagcttgtcgtcggtcggatcagaggggaatgtggacgcggtggccgtcatcggggtgcccgtggattcggtgccgtcaatggtgatggtgctgccgaacccgagcttggtggccatgtccgaaaccttgctcgcgccgagtttcacgccaagctgggcgaaagcggtgttggacgaccatgcgacggcctcttgcagggagatctgtccgttgacgccatcgccctgtgcctcgtcgttcggcagctgtgtggcggttcccggcaaggtatagctggagcctgcaggaatcttcgtgtccgtctgataatcgccggtttccagcgcagccaaggcgacgatggtcttgaacgtggaccctggcgggtacagctgcgaggtggcgcggttgattagcgggctattttgattttggcccgcagagagttcgttgtaggactgagacgcggctttggcgtcatgggtcgccagtttgttcggatcgtagctgggcgtgctcaccatggcgaggatacggccggtgttgacttcgatggccaccgccgcaccatcgcgcgtaccgagctgatcgtaggcaacctgctgcagcttggggtcgatggaggtttcgatggacgcgccctgattcgtagtgccggtgagcatggccttggcccgctgccagatcaatgaatcggcctcaccgttgagcagcatgctgcgggaggcttccaggccgcgatcggcggtctggttgatggagaagaagccggtgaccggagcatacagcggaccgttggaataggtgcgcaggtatttgaacgcgtcgttgaccggttcggatttggccatgaccgtgccgtccgaggccagaatggcaccgcggtaggcaccgagctggtggtacagcgaacgggcgttgcgcggatcgttgttcagcgcgttggcccgtaccgccatgatgatggtggacgacaggccgagaatcacgaacagcgcgaccacggcggtgaaaagctgacgaagatatttgttcatacgcgagtgcctccgttaacgggaggaagcgggggaatcgtaccggtaggcgtgtacggttcatcggcgccggcatacgccggagtggtggcatccacaatggggtcgtcaaacgattccgcctcggactgcgacgccgtagccgacgcgctgcgaggctgaacgatcggctcagtggcgcgggctcgggcctcaagttccttgttgcgcagcacggccaaagcctcgtactggaacgtatccgaggtcagctccggctcgggcgcattggccgagttcgagatgatgatgagcagggtcgcgagaatatagttggcgatcagactggagccgccggccgccatatagggcagggtcagaccggtcagaggaatcaccagcgtgatgccgccgaccacggtgaacacttggaaggccatggtgaacaccagtccggaagcgagcagcttgccgaagccatccttgattttcatggcggtgatgaagccggaggcaatgatgagcaggtagagcatcaaaatggccaggacgcccatcagaccgagttcctcgcccagagaggcgtagatgaaatcggagttcgcgaacgtaacgagcgaaggatggccttggccgagaccggtgccgagcatgccgcctgatgccaggccgaaaatgccggtgaccagctgccaggagccgccgggggtcttgttgtattgctc

SEQ ID NO: 2875 - DNA, 7027 bp, Unknown
  R36_18m  MAG No. k141_37840
atcacgacgtatatcaggaccaatccgacggccagcggcaccaaggccagcggaaacagcggttcttccatggcatctcatctcgaatgctgtggttcagatttttcgatgttcggtttttctgcgcttactgacaagagccatggagcagcatgccgatacgcacagattcactatgcaggtcgccgccggcagtagccgtatgaacggctgactgtagaaatcgaggacatctggatccatagatcctgagtatatttcaaaaaccggatatgatgcgagagccggcgccgaactcacgaggaacagtatccaaatgacgggcaatctcaggatggatactgttcggcctttccgatggacttctttcgagaacatgaaaagagcccaagaggtcactgcgattaatgcacccgcgcaatacaacagaccagagaactcgctacgcatgattccgtcctcacttcagtcgcaggtaatttggcttatcgatcttctggctggttcgagattaccatacctgacatggcagtcgaattgcccgttgtctattggcagagcatccgactgttaatcggacggtcgctggttcaagcccagccgcaggagccagacaaaaacccggaacttcggttccgggtttttgttacccgccccccgaaactcctttatcaaggaatcatccataagggatgccgcagcagacggtctccaaggcactgcaccgtgctcatccccatggacgacggcaactggcacgtcaccgtgtactgtcccgcctcgctggacagcccactgctcgacaaggattccaacgaattcgacacggacgacgtgaaacccggcgacaagtcgtacaccgttgccaatccattccacctggatcacgcacccggaacagacggtttcatcttcggccctgacaccctccgacgatagcgatggactaaccattcaaccgcacgcgtaggaggagcgcattccaaccatgaatgaatgacatatagacgtcaagggcttgcggacatcgtgtccgcaagcccttgacgtctcaatccaacgaaatatcgacttttacccgtttgtcggattcaggctttcgcgcaagtccggcgatgaggagggccaccagcagggggatcgttgtcagtgtaccccaggaaatcgagaacgtgtcggcgatgtagccgcacagcggggtgacgaccgcggtgaaggccatcaatacgagcgatcccacggagaacgcggtcgcgcggatcgaatcgtcaatgctctcgtgcaagctgctggagatcatgttcgccacgtacatctgcgcgcaggagaacacgaagaacgccaggatcctcaccgccggcatcagcgtggccgcaagcaccaccgccgacacgatgagcacgaggatcgcaatgtcgccggaacgtggatgcagccgtagcatacccagacgactgccgacgatctgcgcgatattagtgaacactaggccggcgaactgccaccagaccccggtctggtggcccatcagcagcagctgccagaacgtcagcaccgacaacgtacccagattgaacaccaccatattccatatctccggcttccgcagcagcacggccgcggccgccacggtctgcctgacatgatccaacaccgtcagcgaggtcccggactcgcccggctcggcggatccatcggattcgacggacgcctcggcctgccgttccgtcgtcccgctcccatccgtcgctgcggccttggtgcgcgacccggccctcatcagaccgagaagcgggatgatcgccaatacgtagaacaccgtcgcgcccagccagatcagctgggagtcaagcaggaacagcacggcaccgaccgcaccgccgcatatcgtgcacacagcgatcatcgccgacagtcttgacaccaaggtcttcatacccagcgagggatcgtgcttgcgggcgtattcgatgtacagcgaggacgccgcgccgctttcgaccgcggccccgatgccggccagcacgttggccaggcacagcacggcgaagttcgcggaccagaacagcatcaatatgaatcccgcgacgcggcacaacacgccgatgatcagcgtccgttcccgggaccaccggtcgaacagcacggacgtgggcagctcgctggccgattcgctgacgtcgaacaccacattgacgatggagatcagcagcaccgacaggcccacatcatgataggccaccatatagtagaccgaaaaacatccggcaccaagataaataagcgcattatacaaacaggcaaaccgaaccatcaatcattcccttacataaacaaagaaccggtatacgtgggactgtctctcgaagtgtgtaactggccttaactggccggtcgtgtggccggtcggaaaggctggtggacgatgtctgctgggacaaggggaaacatgacaccgacgaagaagccggacgcggaaaaacgcaacgccgagcgggaggcagcgctcacattcgtgcgcatggccaaggaaaaaggactggacctgacagggcccgacggactgctcaaacagttcaccaaaagcgtgctggagacggccctggacgaggagatgaccgagcacctgggccgcgccaagcacaagaaatccaaggacggcagggccgcgaacacgcgcaacggcaccaccgccaagaccgtggtcaccgattcggtaggtccggtcaggatcgaggtgccgcgagaccgcgatggctcgttcgagccggtcgtcgtcaggaaacggcagcggcggctgcccggggtggacgaggtggtgctgtccctgtatgccaggggcctgaccaccggcgagatcagcgcccacttccaggagatctacggggcggacgtgtccagggagaccgtcagtcgcatcaccgagcgggtcatggccgagaaggacgaatggtgctcgcgtcccctggatcgtgtgtacgcggccgtgttcatcgacgcgaccgtcgtcaaggtgcgcgacgggcaggtcgccaaccgcgcgttctacgtggccgttggcgtggatctggagggcgaccgcgacgtgctgggcatctgggcgtcgcccgccgcggagggcgcacgctattggctgtcggtgctcaccgagatgaagaaccggggcgtggacgatgtgttcttcctgatctgcgacgggctcaaaggcctgcccgacgcggtgggcgcggtatggcctctggccatcgtgcagacctgcgtggtgcatctgctgcgcaacacgttccgctacgcgtcgaagaaggactgggacgccatcaaacgcgatgtcaaacccatctacaccgcgccgagcgccgccgccgcggcggcggcccgcgacgcgatgctggacaagtgggaggcgagatatcccgcgatccgcaggctgtggatggacgcgtgggaacggttcataccgttcctggactatgacgtggagatccggcgcgtgatctgcacgaccaacgccatcgaatcgctcaacgcgagattcaagcgctccatccgcgcccgcggccacttccccgacgagcaggccgcgctcaagtgcatgtacctgaccgtccgctcgctggaccccaccggcaagggacggatacgatggagcgcgcgctggaagcccgcgctcaacgcctttgccatcaccttcgccgaccgctggccaagcgagggaacacaacaatgaaaacgccagttacacacttaacgagacaggcccgcgtctgggccggtggccggcgatccgctggtgccgctggtgccggtgctggttgaagtcgattccgacggatctttttgcgtcgagccggtgccggtgccgttcgaaccggtctggctgccgccgacgccttggctggtcgggtcttcggtggtcggattctttgaggtgccggtgccgttcgaaccgttggcggtgccgtcggttttcgaatccgaggcgccggcgccggtcgaacccgaggtgccgttggcgtcgaggtcggtggagggggcgtcggttttcgaatccttgctggttcccttcgaatcatcgccggtgcccgtctggggcagagcgttgttctgatcgggggtgcccgttcgcgtgccggtgtcgttgcgcgcgggcgtggtcgtggtgggggatacgagattgtccgtgccgcgtccctgcgtggccagcatcacgacgccggccgtcaccgccacggcgagcaggccggacaccaaggtgacgatcatggcggtgtgcttcgaagcgcggaagcgggacttgcgcagctcatcgaccgagtacgtcctgccgttcgcccggctgaacacgatttcacgcggtctgcgtgtggaggaagcatcatcggcggtcacgcccgtcgccgtatcgggctcgtcccgaacgtcggtccggctgccggccgttcggggggtgccgccatcggcatcgccgttctcggcgtccttcgtgatcccgttgccggaggacgaggccgattggagtttttcgccggaggcggtgagcacgttctggtagatcttggtggccacggcggagacgacgtaactggccgccgctccgatcactgaaccgccgatgccgatcttcgatgcgagcaggaacgaggtgacggcggcaagggtgcccgccacgatggatgagagggagattccttcaaaaaacttcttcacaatgcacgaccgtagggtgtcgggctgacaggttgcctgagactcgatggaagcggggcgaggcctacacgagaccttcaaaatcggccttcgtacaggtcggacacgccctgcggcgcacacacgtgcgtttcgcgtcgccgcaggccgcgggacatcgtcaattacgatgcagcgactgcccggtcggtctgattaccgacatcagcacggcgacgaagatcagcgcaaagcccaccagcgaagtccacatgattgtctcgccccagaacaacgcggagaacgtgacggcgaacagactttccgtacacatgatgattgacgcctgcgaggcaggcacgtgagccagaccgatgttctgcatgatctgggcactcatcgtggcgccgaggaacagatagagcacgctggccactactgagggtgccagccagctggcgttcggcatgggttcggtgaacaacgcgccgatgatgaacaatacgccggcaacgccgaactgcacaaaagtgacggcgatagggtcgaagcgtttggtgtagacaccaaggcaggtcagattgaacgagaagatgacggcggttgcgatggtcagccagtcgccggcgctcagagacagcgaaccgcccggcttcagcgagacgaagccgacgccgatcagacagatcacgccggcgaccagattgatggccttcgggcgggttttcgaaatgatccacgtggcgaacggggtgagtacgcagtaggcggccgtcaggaacgcgctgcggcccggttcaatggtctgcaggccgatggtctgggtgaccatcgtgccccagtaggtcagacccaccacgagcgccggcacaatgatcttcggcgtcagatacggcacgatgtgcttatggaacaaggccagcatgcacaggcaggcgcctatcatgcgcagacccatcagccattggggcggaatcgcctccatggcgaatttggcgagcagataactgccaccccataatgcggcgcagcccagcaacatgagtcgggcgagattcgggggaaagctgcgggaccagcggctgcgcagcttgctgaaacgttcgaccaaacccatggtgcacctcaggacagttaggaaaacttgtggctctctcggctcacagattacgggaactaccggccaaaatcgaccggtcgatgggcgtcgggtgtgtgacaggtgtgtggctggtgcgcggccggggcgcggcatcgccaagcaggtaagaaccggatgaaagctgtgcgaaggtgaggttactcacagcgaacatccgggctagtcgcgttcgaaaccggtactctggaaagagtaaggatacgttatccgtagcaatcatgaaaggattcgacatggcagtcattactccggaaatcaaggaattcatcaagaacaacctcggttggatcaccaccgtctccaaggacggcgaactggacctcggcccgaagatgtccctgttcgtgctggacgacacgcacatcgcctaccacgagcgcaccgccggccagcactatgagaacctcaagaacggttccccgctggtcatcgctttcgccaacctcgagaagaagcagggctaccgcttccgcggcaacgtggtgctgcacgttgacgacgacatctacaacgagcaggtcaagatcgccgaggaaaagggcaccaagaagccggccgtgattccggttctcgaagtcaccgaaatccagaaccttgcctccggtccgaccgccggcaagaccatcgccaaggactgattagctgacgtattggtggcttcctcgtcagagggagccactttttcgctttttagtgcgcagtactaggtgacggccttgggcgtcggtggtggcgaagaggtaggtgctaccaccgtccttgagtttgagttttttgcgcagctgggccacggttagggggaaattgcgtacggcgatgttggcgtgcgtgaggccggccaatagctgtttcagttctttcttgttcatggtggcgatggattcgatggcgaatgacctgcctggaaaatcggcaataggttcggccgccacgaacaggtggctattcgggctgatgtgatgcacgacgaagcgctgttcgagaacatcaaagcatccggccttcatgattgaggcgttgggctcgtaaaggtacttccaatgcgaggaatcgaagtcgttcgcgctttcctcagacagggaatcttcggtattgcaagtattgcgtgcagccaaggcagaatcgctgatagtggtgtgattgtcgctgttatcgccggccttgtacgacagcacctgc

SEQ ID NO: 2876 - DNA, 2572 bp, Unknown
  R36_18m  MAG No. k141_37851
ctgaacgccatgcgcgagtatgacgccgacctcgtgatgttccagttcgacaccatctccgagaacaacaagccgctgctgtccaactatcgccacaacgacttcaccgaggtgcagatcctgaccccggtcgaggccatcaaaaagcaggtcaaggctgagatcgacggctatttctgggccttcctggcacccgcctccacctatcagggcaccggattctccttcccggtggggcgcaaaatcgaggatctctcccgtatctgcaacgtgatcggcgaggccacgcgcgtggtccgtctgcccaaggcgctgtaccactaccgcatgcgcgagggatcgattaccgccaactgggatccgcagctcacccgcgactggacccgcgccgccgacgaccgcgaggaatacatcgtccaccgattccccgagctcaagggcttcatgacgctgcaacagctgaatttctttgccaacctcgattacgagaccatgcgccagtcgctgatcgccggactcaagatcgatcccgaggacgccgacgcgcttcgtcgtcgcatcgagggcctgacccagtccgccgatgagggcgatgagcccgtaccggaaacgttgcgtgagttgctcggactgctcaagctgggcatcaccaaggtggccgatggcacgttcggtaaggccgatggcagcggtactgatgacgatgccgagaacgatgacgtaacgctggccgaccgtttccgcgacatgcgcgaggactggcgccagctgcgcatccagcgcatcgaaaacgccgaggagcgcaaggccgagcgcaaagccgcccgcaacggcgtcaccttcgagtctgtgttgcattagtcggcgactgatggaatccgtcagttcgggaagagcaggcctgctctacgccgggcgtgccggttcgcacgttcgagaaacaggcgtgtcatgggccgaaccacacaacacccccagaaacgcccataaagttaactacattttcagacacgccacttgccttggtccacggtccgtgtatagtagttctcggctcaacgaagagaaccttcactgaaccggaaaaaagtaaacgctgaagcttgcagtttccgaaagcaaagttgtacgtcggtggcgagggcggaagcgcagtaaagaacaaatccctttacaacggatcgtgaggcacgtacctgcctctgaaaggattagtaattatggcagaagtcgttttcgaccacgtcactcgtatctacccgggcaacgataagccctccgtggatgatctgaatcttgatatcaaggatggcgagttcctcgtcctcgttggcccttctggctgtggtaagtctacgacccttcgtatgctcgccggcctggaggaggtcaacaagggccgcatcctcattggtggcaaggatgtcaccacgatgcagccgaaggaccgcgacatcgcaatggtgttccagaactacgccctgtacccgcacatgaccgtggccgacaatatgggcttcgctctgaagatcgccggcactccgaaggaagagatccgcaagcgcgtcgagaaggccgctgagatcctcgacctgaccgagtacctcgatcgtaagccgaaggctctgtccggtggtcagcgtcagcgtgtggccatgggtcgtgcaatcgtccgtgagccgaaggtcttcctcatggatgagccgctgtccaacctcgacgccaagctccgtgtccagacccgtacccagatcgctgccctgcagcgccagctgggtgtcaccaccctgtacgtgacccacgatcagaccgaggccctgacgatgggcgatcgcatcgccgtcatcaagctcggtatcctgcagcaggtcggcgccccgaccgagctgtacgatcgcccggccaacgtcttcgtcgccggcttcatcggctccccgtcgatgaacctgaacacccacccggtggtcaacggcaaggcgaagatcggtgaggacaccgtggacctgccggctgaggccgtcaacaagctcaccgccgaagacaacggccagatcgtggtcggcttccgtcctgaggacgctggtctggccccggctgacgacccgaacgccttctccctgaaggttgtgaacgtcgaggatctgggctccgatggctacatctacggcaacatcatcaccgatggctccgcagctgaggctgcccaggtcatgtccgaccagaacaagctcaccacgattcgtgtgaatccgcgtgcgctgccgaaggttggcgcgaccgtcaagatcaagatcgacccggccaagatgcacctgttcgctccgtcgactgagctgcgtctgaactaatagatacttggcgaggtctaatcgcttcgtcacccattaaacgaggttattctcttcctctcttatgacctcgttggaaaagccctgcatagctgcggggcttttctttttgcccagaaagacatacgctaaccggcccccgcaaatgagcgttttttgttcttttgtccccactgtatgattgtatgcagtaacaacctcccgaaaaggggattgcgaatcta

SEQ ID NO: 2877 - DNA, 18943 bp, Unknown
  R36_18m  MAG No. k141_38044
ccacgagcatacactcactgccacctgaagacagcgcgtctaccattccgccacactcgcagacaatcgactaacttacacccggctgggtaatcatgcaatcttcggcgtgtcgcatgtgcggcagggatatatcgctcgtgggtcttctgcgggtgccgtgatctttgacggtggcgacactcccctcagtcacttcgtggcagcacaagccgcaacgaaggagaaaaactcacaaccctggccggcgctcgccgttgccgtagaagtgggccagcgcttcgtcgcggaactcatcaaagtatccgccgtcgatcgaggcgcggatgtcgtctagcagcttcacgaagaaatgctcgttgtggatcgtggccaacgtaaacccgttgaactcgcgggcgcgcagcaggtggtcgacgtacgcgcgcgaataatgctggcatgtgtagcagtcgcatccctcctccagcggcccgaaatcgaacttatgctgggcgcgcttgatgttgtaccggccggcgcgcgtgtagatcgcgccgttgcgggcgcagcgcgcgggggccacgcagtcgaaggtgtcgccgccgttctccacgcacgcgaagatatcgtccacggaggcgatgcccagcacatggcgcgggcggttctccggcatcgcgtcgcagatccacgcgcaggtgtctccaatgatgcgcttctcgattgcgccgccgattcccacgccgtcgaagtccagcgaggcgatctgcgaggccgcgcgccggcgtagatcctcgtaattcgcgccctgcaccacgccatacagcgcctgatagggcttgctcagccgctcagccgtcagccgctggtgctcgtccacgcatcggcgggcccagcggaaggtgcgctccaccgagtcctcctggtaggagcgggtgttcatcagcgtggtgagttcgtcgaacgcgaacatgatgtctgcgccgattttgtgctggatgcccatcgaaatctcagcggagaaacgatgtgcgtcaccattcaaaggcgacttgaacgtcacgccgtcctcatccacccaggccatgcgctccttgcccttggcgatgatgtcgtccgacttcatgccggtcacgtccattgccagcgtcttcttgaagccgacgcccagcgacatcacttggaaaccgccagaatcggtgaacgtgggcccatcccagttcatgaaacgcgccaagccgccggccgcgtccagcacgtcctcgcccgggcgctcgaacaggtggaaggcgttggccagcaggcattgtgcacctagatccttcatctgctcgggcaacacggccttcatcgcggcttgcgtgcccaccggcacgaaggcaggcgtgcgaatatcgccgtggggcgtgtgaatgatgccggtgcggccgtatcgggcaccgtctcgcccaagcccgctggccgtggatggcaggcgggtgatcgtttcgaaatggaaggcgctgcggtcgccgggctgtccgggctgtgcgcccaacggatgttcaagaaggctgatcgtcatatgttcactttaggcagaagggccagaaaagggccggaaattgtgaagaactcggtttcgaggggcggatttcgccgctcccgaacgtctacttccgcttcaaggggctcccggtcaagtaggccggctgcaaaaatggcggaatggcgttaaatgagggcccttgatactcggaattgaccgcgcgaacagccccttgaagtgcaagtagatgttcccgaaacaggaaatcagcccctcgaagccgagatgcccataagactctgcgatgattacgcatagactttcaatcaacgttcagaaaacctccagattgactgcctttactactgaggtagcacacgagaagtggcaatgggcaagtgcccgaatagccgccgaacagacgtgataggaatttaggaaaaggagcagcaatggctgacgaatttaacccgcagggcgtcgaccagaccccgcggaataacgaaaaccccaatagtactgccgataccggcaacgccgagccgaagaacccgtttgtgggtggcgactcggttgatgccggcaacgccagcgattccagcgagcagcaagccccggtttcctcggccgccctcgctgccgatcagcagcctacgcaagccgctaccgacactgccgccaccgagcccatcccggactacgcctccgccaagggcgagagcacggtggtctcctcctcgccggcttctccggcagcgccggccgcagaccagacctcggccacaactccgctgtatcgtccggccccggaatatggcgcttatggtccgaccccgactcaggcacagggccagcagggcggccaggccggcagcaatgcccagcccacgcagcaattcccgttcggtcagcctgcacagcaaaccccacagggccagcagggcaaccgcaatccctactacaccaataacccgcagccgcagggcaacggcaatccgttcaatccgcccacgcagccgcagcagaacaacggcaacccgtttgccagccagtccggtcagaatggccggaatggccagcagccccagcagggcggtctgttcggtttcggcactcccggtaccggtacgccgaacggtcaaggcccggcccagccgggacagcccggtcagcccggccccgccaagcagggcatgtccaagacggcgagcaacatcctcatcgccgtggtcgccgccgttctggctgcgggcctctgcctgggcctcggttacggcgccctcaccagcggcctgatcaccttgccgaccagcaattcgctgtccaacgtcagctcgaataagtccggctccgggtccgccaccgccaagagcggcgaagcccccgactggcagactgtcgccagcgatgtctccggctccgtggtctccatccagaccgcgttgagcaacggcaccgccaagggctccggcgccatcatcgacaccgaaggccacatcatcaccaacaaccacgtgatctccggtgcccagcagattcaggtgacgcttgccaacggcaacatgtattccgccacgctcgtcggcaccgacaccaccaccgatcttgcggtcatcaagctcgacaacccgccgagcgacctcaaggccgtgaaattcgccgattccgacaagctcgccgtcggcgagaacgtgatggccatcggcaacccgctcggctacgacgacaccgccaccaccggcatcgtctccgccctgaaccgcccggtgaccgtgaccgacgacaacaacaacgagatcgtcaccaacgccgtccagatcgacgcggccatcaaccccggcaactccggcggcccgaccttcaacgcggccggccaggtgatcggcatcaactcgtccatcgcctcgaccgccacctcatccgactccgcgggttcgatcggcatcggcttcgccatcccgtccaacctcgtcaagcgtgtggccgacgaaatcatcaaggacggtaaggtcaagcacgttgccctcggcgtggtcatcaagtccgacacggttgaagccgacggtgtgacccgcggcggcgcgaccatcaccaagtccagcgccactggcagcgcggtcgtctccggcggcccggccgacaaggccggcctcaaggagggcgacaccatcgtggccttcaacggcaacgcggtgaacaacaactactcgctgcttggttacgttcgtgccgcggctttgggagacaaggtgacgctgaccatcgtgcgcgacggcaagaccatggatgtggacgtgacgctcgatcaggaggagtcgtcggtgaacggttcgtccagctccgattccaacggcaacagccagaataagcagaacaaccagaacggcaacggccggaatggttacggcaatggcaacggcaacaacgatggcggcaccggtgatggcggcggcttctccgacccgttcggcctgtggtaaagctggttcagcgcgtcacacggcgttgagcggtaaccgttgaacgccgtgtcagataggcaaaggtccgcagcagtgagcaactcctgctgcgggcctttcgtatacgctatggtgccctgcgcccatgccgccaacgtagtttcgatatccggcatgtcgcgcaacgctcgttgatagggtaggtcaagcactgagttcgggcggcgctccgaacaaagcgcataattcactacaaaactgaacatttctttacgccgtgtatcggaaggtcgcgcgggagccgagcaaagcgaagccccaggcaaagccgccggtgggttaacaaggcgtgaccgcagcgccgattgcgcgggccacgcttgccgtaccgcaatcgactccgtatacgagcgtaaggagcaatgatgggcgcactcatcagattcttcaccaaaattctcgacatctgcaagcttgtgccgatgcttccggtcgtcgtcatcgccgcaattccgctggctttactgggcgattggcgtccgtggggcaatgcgatggcgattccggtactcggcaatccgggtttcggccagtggctggttatcgcactggtgctggttattgtgattgacactgtgcgcggcatgattgacgatttgcgtcatgggcaggttggagtcgatgtgctggccgtggtcgcgatcctctccaccgtggccgtcgccgaatactgggcaagttgggcggtgacgctgatgattacgtccggcgaggccattgaggaatacgcccaagccaaggccgagcacagtttgaccgcgcttatggaagccgcgccgcagaccgcacacgtcgtcaacctgcctggtgtggggtgtgggtttgctaccgataagggcgattcgtccgatggcttccggcgtgtgggcttggcgtcggctgcggccgccgcgcaccgcttcgacacggtgccggtcgagcaggtgcagctgggcgatgtactcatggtgctgccgggcgaaactgtgccggttgacggtgagctgctgtccggcacggccacgctcgacctgagcaatatcaacggtgagccggtgccgcgtgaagtgttcgccggcgcccgcgtgatgtccggcgcggtgaacggctcgactgcattgaccatgcgtgccacccaggtggccgccgattcgcagtaccagcgcatcctcgagctcgtggcctccgcgcaggagtcgcgcccggccgtggtaaaaaccgccgaccgcttggctgtgccctttaccgtgctctcgctgatgattgccggcatcgcatgggcgatgtccggggtgccgacgcgattcgcccaggtgctggtgctggccacgccctgcccgctgctcatcgccgcaccggtggcgtacatcgccggaaccggacgcctcgccgcagccggcgtgcttatcaaagcgcaggacgtgttggaaaaccttggccgcgtcacgcaggtgttcttcgacaaaaccggtacgctcaccgtcaagcagccgcaggtcgtgcgcgtcgagatgctgcccggcgccgcaacccgtctcaacgaagaccatgtgctgatgatggccggcgtggtggaaagctactcggtgcacatcctgtccaaaggcattgccaaggctggcgtggaggcgatggcccgactgcgccagcggttcgaggatggtcagcgcctatgccccgagccggaggccagctggcccggccatggacgggagtatccggtcgtcaagaacatcaatgaagacgccggcaaaggcgtttccggcgaggtgaacggccacgcggtgcgcgttggccggctgtctttcgcggccgccggggaggatggattcctggcggtcggcgaggctgcccccctcagcccgcgaagcggccagctccccctaagagggggagctcagcaaaaagatgacctgcgcactcgctttggcctgctgcagccggatgagatggcgtcgtatgtgtccgttgacggccggctgatcgcgcgcatcgtgctgcgcgacgtgccgcgcgccaacgccaaggcagtgctcgccaaactgcatgagttgggcgtcaccgagctcgccatgcttaccggtgacaagcgggcttccgccaatatcattgccagcgaagtcggcattgacgaggttcacgccgaactgttcccggaggataaggtagccgcagtcagggccgctacaggagccggcaaaaccgtcacgatgatggttggtgacggtgtgaatgatgccccggtgctcgctgttgccgatatcggcgtggccatgaccgatggcacgtccaccgccgcttccgaaagcgctcaggtggtcattatgaatgacaatatcgccgccgtgccgcgcgccatcgccattgcacgccgcaccaagcgcgtgatgcttcaagccgtaatcgcgggccttgtgcttgccaccatcggcatgattgccgccgcgttcaaccttatcccggtcgtcgtcggtgccttcctccaggaggccatcgacgtggtgagcatcctctgggccctcactgccctaattgatcgggactgattaagaatatgaggcttctgctgtttttgtaggtcagttgactgaccgggatggtcgtatgtcgagtccaccgcatcgaaacataatcggggcgatacggttggtgacgtggcggaaacggaaatcccacccacgaaagcagcaatagcatcggagttattcattaggtcgatttgacgtttattaggtcggtccttggtcggagcggcccttgaaaccccgccgttccaagggatggcttcagcactctccgacctaatgaacgaagaaatgacctaatgaatgcaatcgaggtcgtaaagagccgttggaggtgacgtctttaatgcctcaagggattcactgattgcacagaattcctactgctctgcggcggctctttaccgtcggccttctagccaatcgaggggcggaggtgacgcggattccttgtgagacataactatgctcaacccgactggttacgtactgttgctcacacggtataccgagaacattgccaattaaagtgagatggcgggcgaaccggtcatgataggtttgtccggatttgatttctatgagcatacggttgttaggatcggtgaaatccaacaaatccacctcgaccttgctggcatcgcggtagaagaataattgtggctcctgattggcgttcaaatgctgtttcatggtttccgcaatgatgaggttttcaaatatatcgccgaacttgggatgcgcaaccagtgcttcgaccgtccgaatgcccaagagatgacacagcaagccagtgtcataaaaatagagtttcggcgttttgaccacctgtttgcgtgcgttcgtgtagaacggcatgagatggaatgcgatgtaacttgattccagaatcgacatccatgcctttacggttcgcggacttacatcaagttcattggcgatgttggtgtagtttatgagtgctccggaactgagtgcgcaaagagtcaagaatcggcggaattcagccaaattgcgtacatcaagatattcggaaacatcacgttcgatataagtgtcgatgtagttcgagaagaacagattgagcggcattctcgtgtcataaatgcgtggataaccgccttgcagcataaacgtatccgaagtaagggcctgatccgcctcgcatgcttcttggaatgagaacggcaataacttgaccaatagggaaacccataatctgacattagcagtgctcgtaggtttcccaaacgcacaaactatggcctaatacacagaattcccaccactcgccctctgttgcaacggaaggctttgcgttaggctagagcgcgtgactgaatctgtgaacactgaacttcgtattgctgtaatcggcgctggcccggccggcgtctattcctccgacatcttcctgcgccagctcaagaaactgggcgaagaactcggcctcggcaccaaggcccgcatcgacctgttcgagaagctgccggtaccgttcggtctggtgcgttacggtgtggccccggaccacccgtccatcaagttcatcgcctccgcgcttgagaagacgctcgacaacccgaacatccacctctattgcgacgtggaattcggcaaggacgtgactcttgacgacctgctcgcccgctacgacgccgtgctgttcgccaccggcgcggtcaaggacaagccgctgaacctgcccggtgctgaccttgaaggtgtgtacggtgccgccaagttcgtcgaatggtatgacggttaccccaccggtgcccgcgaatggccgcttacggccgagaacgtcgccgtgatcggcggcggcaacgtggccatggacgtggcccgcgaactcatgcgcaacgccgacgacctcaaggccaagaccgacattccggacaacgtgtacgagggcatcggccagaacaaggccaaggtgctgcacctgttcatccgccgtggcgtggcccaggccaagttcagcgtgcaggaactgcgcgagatggagaagctgcccggcgtgcagctcatcatcaacgaggacgacttcgacctggacgacgagaccatcgaggtggccggcaaggacaagctcacccgccagatggtcgaggaactgttcgccatccgcgagatggccgaagacatggaagatgacggcgacgtcgacttcgaaggcaatccggccgaccgcaagtattacgtgcacttcaactccgcacccacggaaatcctcggcgaggacggcaaggtcaaggccatccgcgtggaacgcaccgaaaccagtgccgacggcaagatgagccgcaccggcgagttcaccgactacccggttgaggccgtctaccacgccatcggctacaagccggccgaggctcccggcatcacctacgacgagcacggcgctcacctggccaacgccaatggcgatggccgcatcaccaccgaagcggacggcggcgaagtgcgcgaccgtctgtacgccactggctgggccaagcgcggcccggtgggcctgatcggctccaccaagtccgacgcacttgccatcgtgaccaacatgcttgaggatctggccaaggccgccgaaggtggtcgcgtggccgaggatcgcgaccccgaatccatcgaccgactgctggaaagccgcggcgtcaagccgattgacttcgctggctggaagaaggtcgacgccttcgagcgcgccgaaggcgccaaggagggccgcgagcacaagaaggtcatcgagcccgaccagatgcgtgagctcgctctggcctgattgactatcagctcatcgcaccggcaactgcaccagcagcaatcggcgcgattgatacatcgataaataagaacgccggttatacgccagcgttcttatttatataaaagccagtgtcatgccagtcgagcaggccgatgggccaaacgatccaagcagccaaagcaggccaaacaagcaaagcgtcccgatcagaccaaccggtaaagcggtaaagcggtaaaacaggccaagcaaccgcactgtcaagcatcgtcaatctcatgtaaacaggctattccgatccccgccaaccgcaccgtaagcaccgccaacccccatccgattcacccctcggcgcacatccagccaatattcaggcagtgattttagtgtgagcctcatggatgccaaagtacgggtgcacggccatttcaacggcctgaagactacgctgctgttcgccttgatgtgggccatcatcatgctgatatggtgggccacgggcggcaggcagcagacgctgggcatctacgtcattatcgggttggccaccacgttcggctcatactggttctccgacaaactcgccatcgcatccatgggagccagggaggtcagcgagcaggaagcccccgaaatctaccagatcgtgcgcgagctgagtgccaaggccggcaagccgatgcctcgcatctacatcgcgcccaccatgagccccaacgcctttgccactggtcgcaacgaacgtcacgctgccgtatgctgcacgcagggcatcctgcagattctgaacgcccgcgagttgcgcggcgtgctgggtcatgaactgatgcacgtgtacaaccgcgacattctgacctccgccatcgcctctgccatggccaccgtcatcacgtacctcggttattctctgatgtatttcggcggcggcaactcgcgcgacgaccgcgataattcaggcggtctcggcttgatcggcgtgctcctcagcgtgattctcgcgccgattgccgcatcactgattcagatggccatctcccgtactcgcgaatacgacgccgacgaagacggcagtctgctgaccggcgaccccgaggccctggcctccgcgctcaacaagatctcctatggtgcccagaccacgcccatgcgcaaaacggccggcacccagtccgtctccgcgatgatgattgccaatccgttctccgcggtcggtttctccaaactgttctccacgcatccgccgactgatcagcgcatcgcacgcctgatgcaaatggccaatgaaatgaacggcactccggtggccgcatccacgtattccacgcgcgcaattcactagtccagcacagaactcaaaccggcacatggcgcaaggtgccgcataggtgatacacttgcctctcgtgcgtggaagcgcacatgcggacgtagttcatcggtagaatgaaagcttcccaagctttagaggcgggttcgactcccgtcgtccgctccatcgattttccttgaaatttcaacggttttccctcttttgagagcttattttcctgccgtatgaccgctatatgagaacaattcacgtcgtccgcgtatcgtgatgggcgatgtgtgaacccaagaccgctgcaaccaatggccaaccaacgccaaccctcgaacgcaccccgcacgacatcttcgtcggtgccggactggcgctcgccggaggcgtcttctggggcgtcaacgccaccgtctccaaactcctgatgaacgactatcacgccgatccgctgtggatcgcctgcgtgcgcgagctattggccggtgtcatctttctggtttgcgcaggaatcttcacgcctgacaagttcatcaactcgcttaaggactaccgttcctacccgagactcctgctgtgcgcgttcttctgcgtgctcatggtgcaggtctcctacttgaaggccattgactggaccaattccggcacggccacagtgctgcagacgctcaatctgctggttgtactcgtattcgtatgtattatgggcaaacggctgcccggcaaacgcgaaagcatcggtgtggtactcgcttttgtgggcacggtgctcatcgctacaggcggcgatctcagccagctcagtctgccgctgcccggtctgctgtggggtctgaccgatgccgtatgcacgtcactgcttgcgattctgcccatcgcattaatggccaaatggggcaacttcatggccagcggcgtcatgttcatcgtttccggtctaatgctgctgccgctcgtgcgtccgtggaccaccgcccccgcgttggactggttcggcattggtctgatggtattcaccgtggtgttcggcacattcggtgcctattggctattcctcggcggcacccagcgctgcggtgcaatgcgcgccaccatgctcggcaccagtgaacccgtaaccgccactatcaccggtgtcctattcgccggcgcggtctttaccccgaccgatttggtcggcttcgccatgattatcatcatggtgttcctcgtgagatagttcacagctcgcctggctccagaacctagtctggcgggcacaccccgagcgataatgaagccatgacaatcgcaacaccggaacgttatgccgaaatgctagacgccgcacgacgcggcggctacgcttaccctgccatcaacgtgaccagctcgcagacgctgaacgccgcgctgaaggggttcgcggatgccgaatccgacggcatcatccaggtgtccgtcggcgcagccgcatacctttccggcatcggcgtcaacgaccgtgtcaccggatcgctggccttggccgcttttgcacacgaggtcgccgcgaagtacccgaacatcaccatcgccctgcacaccgatcactgcgccaagcagtatctggacgaatgggtgcgaccgctgctcgcacatgaggccgatcaggtggcgcatggtcaggagcccacattccagtcgcatatgtgggacggctccaccgtgtcgctcaaggaaaatctggacatcgccgaggagctgctcgataagtcgcaggccgcgcacacggtgctggagatcgagatcggcgcggtcggcggcgaggaagacggctattccgccaaaatcgacgaacgcctctattccacgccggccgatggccttgaagtggcccgtcgccttggtttgggcgagcgtggccgatacatggccgccttcacgttcggtaatgtgcacggctcctacaagcccggcgtggtcaagctgcgtcccgccctgctcggtgatattcagtcccgtgtggcgcgcgcggtggtcgagggtgagctgcccagcgccgccggcatagtcgactttcccaacggcaagccgttcgaattggtgttccacggcggttcgggctcccgtccggaagagattgcagaagccgtgagccatggcgtgatcaagatgaacatcgacaccgacacgcaatactcgttcacgcgcccgattgccgaccatgtgttcgagaactatgacaaggtcctcaagatcgacggtgaagtgggcgaaaagaagttctacgatccgcgttcctggggccgcaaggccgaggaatccatgtccgcccgcgtggctgaggcatgcaagcaactcggctcggccggcaaagcactcagataacacccaaataaactgtcattcgccgtggcggcgcatcggtgtcggcccgcctcgcgcaacgcgcggcaaagacaccagaagcccgattgcgtgagatggccgcgccccgagtagagggtgtaaggtagtctgtttccggcggaatcgtgcgaatgcggaggtgtgttatgcctggaattgttcttatcggtgctcagtggggcgacgagggtaaaggcaaggctaccgatctgatcggcaccaaggtcgattacgtcgcgcgcttcaacggcggcaacaacgcaggccatagcgtggtggtcggtgacgagtcgtacgccctgcacctgctgccctccggcatcatcaacccgaacctgaccccggtgatcggcaacggcgtggtcgtggacccggaagtgctcttcgaggagatcgacggcttggaatcccgcggcatcgattgctcccacctcaaggtgagcgaggccgcacacatcatcgcgccctaccaccgcacactcgacaaggtgactgaacgcttccttggcaagcacaagatcggcaccaccggccgtggcatcggcccagcctacgcggacaagatcaaccgtgtcggcatccgcgtgcatgacctgttcaacgccgaccatctgcacgacaaggtggaggccagcctgcaccagaagaaccagatgctggtcaagctctacaaccgtcgtccgatcgacgtggaccagaccaccgaggagctgctgaagctcggcgaacgcctcaagccgtacgtggccaacaccggcctgattctcaacaaggcgcttgacgaaggcaagaccgtactgtttgaaggcgctcaggccaccatgcttgacgtggaccacggcacctacccgttcgtcacctcttccaacccgaccgccggcggcgcctgcaccggcaccggcgtgggccccaccaagatcacccgcgtaatcggcgtctccaaggcctacgtcacccgcgtgggcgaaggcccattccccaccgaactgctggacgagtccggcgaatggctgcgtcagcagggccacgagttcggcgtgaccaccggccgcccgcgtcgctgtggttggttcgatgcggtcgtcaaccgttacgcctcccaggtcaacggcctgaccgacatcgtgctcaccaagctcgacgtgctcaccggcctgaaggagattccgatctgcgtggcctacgacgtggacggcgaacgtcacgacgatatgccgaccgatcaggccgctttcgccgccgccaagccgatttacgagaccatgcccggctgggacgaagacatctccgactgccactccttcgacgagctgcccgccacctgccaggcctacgtcaagcgtttggaagagctgagcggttgccgtatctccgcgatcggcaccggtccgcagcgcgatcatgtcatccagatcaattcgctggtcgactgaccgtctgcaacgaatttcccggcttgactggtaacgacgcggcacatgatatccgccggctgattccgcgattcgaccacttgaagtggaagatggcggcggccggcatagtcattggtctggtttcaggattgctggttgtcgtataccgtctcggcatcgaatacggcacggatgcgtcccgttggatatatgcgcggattcgcgagaccccgtggctgattgcgccgtgggcggttgccgcggtggcggccgcgctggcaatcgcgtggatggtcggcaaggagccgatggctggtggcagcggcatcccgcagaccaacggcgtggtgatatgcggcttgaagatgcgttggcagacgattctgccagtccgtttcgtcggtggactgttgggcgcgttgtttggtctgtcgctcggccgtgaggggccgtccattcagattggtgcgtcgggcgcgcagtgtgtgtcccaccgtttgcgcggccgccgccgtgaggacatgcaggagcattatctggtcaccgccggtgccgcggccggcttgtccgccgcgttcagcgcgccgctgtccggcatgatgttcgctttggaaggggtgcatcggagtttttcccctgcgattctgatgggcgccaccgccgcatcgctgaccgccgatttcgtctcaaaatactgtttcggtctgcgtccggttttggatttcggtgatatcggtcagctgtcgttggaagagtatgtgtggctgattccgttgggattggtggccggtttggttggttcgctgatgaaccgctcgttgcttggcttccagacgctgtacggcaaactgccggcatggagccgcccgatgattgcgattgcgatcgcgttgcctgtcggcatctggttgcccgatgtgctcggcggcggctcgaatctgattgataccgccgaacatgcgcgcgtcggcttgggaatgctgtgtctgctgttcgtggcgaagatgctgttcacatccacgagtttcggctcaggcgcgcctggcggtattttcatgccgattcttgcggtcggttcgttggccggcggcatctgcggtgaagtgttgcatcgattcggtgatctgccatccgacgcagtggcggtgtttgcggtgtgcgtgatgacgggcacgctcgccgcgtccgtgaaaacgccgatcacgtcgattctgttggctgtggagatgtctggaacgttgacgcacatgctgccggtcgcggccgtcgctttcatcgcgctgttggtgtccgatttgctgcgcaccaaaccgatttatggggagttgctggagcggtacgtgcgcgcgcaaggcatgcagatggcgatcgcaagccatgtgggcagcggcattatggaactgccattggaaatgggagcgattgcggacggcaagcgggtgcgtgacgtgcgttggccgtctgggtgcctgatcatcggcctgcgtcgcggcgaaagcgagatcgtgccgcgcggcgatacacggctgcgtgccggcgactatctggtggtgctgttcagtggcgaggaggagcgcgaggtgcgacctgcgatgcggcggctgtgtgatgcccggcttgactgagcctggctgaattcggctggactctggatgtacgaatctgcggaatcggacatccagggtgcatacgttggcgctccgtgtaaactcatatgcgttaggaaggtggcaaccgcggcccagctcgttgttgcacggcctatgggcggaacaacgctgtccgcggaaggccagtacagggggagcgcaatggaatcgcaagaacaatcgccgggagacgtggtgactgcgggtgaggactcacatcccatcacgcaggcaatcgacactgttgaggtgacgcatgctggtgcaaccgcgcccgccgctaacaccatggatccgcctacgattcccctggcgccgatgaaacgtatgcaggcgcggttcaatccgctcgccgacggactgatgtatgttgtggtgttcgtcggtggatttgttggagtcggctgtcggcatgcgttggatatgctcctgccgtcggtcagcgggacgccgttcgttgtgggcacgtttgtgtcgaatatggtcgcctgcttcctgttcgcgatgctgaccgaattcatggcgaccgcttcgtggctgcgtcgccgggtgcggcaggttgtcagccgtggcgttgggctcggcttgctcggcgggctttcgacgatgtccggcgtgatgctggaaacggtggaaggtctgcacgagcggcatatcgccagtgcgtttggctatcttgcgggaaattttgcaggcggtttgctcactgccgccgccggcgtggttctgatgcaggcactgctgtcacggagtactcgaaagcgggttcggggtgcgttttcagctgtttccgtgtccgattctgccgaatcggacacgcagggcgtacgccatgtgaaagtggccgacgtggcgcgttctgccgcgcaggccgcaatggaagccgcgcagacggcccagcagattgcacagacgggacaggttccgcgagtcgaaacaccaaccgtgccgccgaccgccagccagcctatgcagacaggccgcgttccgcagattcctccgctggccgttcctcagctgacgcagccggcgcatccgttgctgcgcgagccggatactccagacttggggcagctgcccgagattcagcagtcgcagccaatccagcagccggccaacccgcttccacccagcttcgagcccaaaccgatcactgcggagatttcgcttgtcgccgacccgactaccggggaggtgcgctgatgatgtggatgatctgtctgttcggcggtctgggagccatggcccgttacgtgctcgacgtgtcaattcaacaaggctggaaccgcgagaatcgaagaacgaaccgcaacttcccgctatccacgctcgtcatcaacggcgtcgcctcgctatgcgcgggcatcgccatgatgtcctactattcgcaatcggtggatatggacacggtcatgatgttcgttgtcggatttctcggtggtttctcaacattctccacggcgctcaacgaagtggtttcattgattcgccagcgtcgttttacgctggctctgggctatggaatagcaaccgtcgcggtgcctctcatttgcgtggccgccggtttcggcattgcgttgcttgccaatccggcgtaattttcacgttacacggacggtcgctgagtaacgtgaaagagactgagcgcaaccgccatcaaggccgccagtccggatgcaacgctggtgattgcattcgaccagaccaagccgctgctgaaggccttcgcctccgcaggagtcgacactaagaagctgtatttcgttgccggactgtcgaacaggttcgagagaatgtaaatgaatgtaatattagcggtaagcacgtgagaatacggcgatagaacagtgatgacggggaaggtgcgatcatggtcggcatgcgcgatgtggcgaagaaggccggggtgtctctgagcaccgtctcgctggtggtgaacggcaacgggtacgtgtctgatgacatgcgcgaacgtgtgcgcaaagccatgcaactgctcaattatgtgccgaacgagcttgcccgcaatctgtatcatgatcgtacgaatctggtcggcgtcatcgtgcccaccatccgccacccgttctttgcaacgtttaccgcacatctgcagcatgcgctcgccgcgcaaggattacgcactatgttgtgctctaccgcagatgaggcggagggcgaaatccagtatgtcgacatgttgcgtcggcacatgatggacggcatcgtcatgtgtgcgcacacttcgcatcccggcgattattggacgtcgattcatcgcccgatcgtcgcgttcgaccgtgtgcttggagacggtatttcgtcgattggatccgaccacgagcagggtgggcgattgattgcgcagatgctgatccgcaatggtgccaaacatgtggtgatgattggcggtccgcgagatcaattcttcgatttggctgcgcgcggagaagtcgaggaaggatcgttcgatttgggaaagaccacgttcccgacggtgcgctattacctcacgttggaacaggaattgacctccgcaggcgtgaaatacgagtatgttgaagctggcgaagtgatggattttgccggctgtcatcgtgcggtcagcaatgcgctcgacaaggtggcgaccgacggcgtcgatgccgtggtcagttccgacattggtgcgtcgttctgcgtgcgcgaagcgttgagccgcggaatttccattcctgacgagctgcagatcgttgcctacgatggtacgtatttgactgatttggctggcatgaagctgaccgcggtcgcgcaggatttctcggcgatcgcacagtcggcggccgaccatatcgtgcaggctattgccaatgaggaagtggccgcggctaacgcttcacgca

SEQ ID NO: 2878 - DNA, 5610 bp, Unknown
  R36_18m  MAG No. k141_38464
gcgaaactacgcttcgttttgcgggcacgaacgatgacgatcgaggcaccgccgatgcacagtaccgccacgacgccgaggatggccatgcccatggcaccggtcagcggcagctgggtgatgcttttgatgttgcggtacacgtaaccgttaccgccatcgctgagcagcccactggcgggaacgctcatgtcggtgatcgactccagcttaatcgtcccgttgtcgttcttcatcttgacctgcagtttggccgcggagccggaccaatagccattcggcaccttggtctccttgaggtaataggtgccggtattcagcttgaagctactaaaatcgacgagaccggcaccgccggatgtggctgtgacattcttaccattggcgtcctgcagaaccgttgtgaagtctttgtcagagtacacggtgaattcggcacccgacaagccggtcctgtcgttttctacacctaccttggtgaactggaagccgccgcgattggtcgtcgtggaaccggtcttggcgtttgcattggacgtcagatccacggtgcccgtgctgttcgacacgttgcagccggcggtaagcggagtgccgacgagcatattgttgaagcctgcatactcaacggtggtatcgcccgtgtccttggtctgcttcttgggctgtgtagcatcgaagatcacatacaggccgggttcggtcatagtgagcgtcatggtattgttcgtgtcgtcgacactcaccttattcgcttcaagcacggtgccgatgactcccggattatccgcgtacttacggattaacgaatcctgcccagtgttggcaagccagttcattggatcaccttgaagatccttattttgatacagtggcgtaccatcattggatttcagttcttgcatcgcctgaagaatgctcgtctccgaggccgccaccgtctcaagatgcaccgagccgccggacgtgtcatcaccgatcttgtagttggcgactttcgccactttgaacgtgcggttgctcgaagaggtctttccgttccatgtcttgaacgcgtccgcatccgtgcccttcaccgtgatggtgttgccgttggtcgcgcaagtcgtggaagtttgcgagactcccggcgcacccgactcttcggccatggcgctggccggtgcggtcatggccgcgaacagtgtggccgccgcagcgactcccgccatccatgattttgctttcattgttctcctccttatggaatatatggatgaatccatgttggtcatacggaacggttcccgtatgaacgttttctgatatgcgcggcgattgccaacaccgccaacgcccctccggacgccaccatgccgacaatcgtcaccacccacgcggcacgacgccccgcggagggcagcgcggaaactggttgcggccgattggtcagacgattgtccgtaacgccggcccaatcaccccgtccgtgcagtacggctttcgccttgggatcctcctggcgaatcgtgaattcggcccaggtacggtcgctgtcgggcaaccggtatccgccgggcgcggtgatctccgtcagccggtaggtgccccagtcgagattgtcgatggtcagtttgccgacggctggatccttgtctccggtgccggcacaggcggcatcaccgtcgcccacgcaatcggcgaagttatagagggaatcgttgaccttgttccacgtaccgttatcgttgcgtcgttcaagtcgccacgtggtgccggacaggtattcctcgtgatgatcggcgtccaccttgctccacgacaccgagccggtgatcttcttgtctcgaatcgtcaccgtatagccaccggtccattgatgcaccgacgcatgcggactgccatccgcgttcgtcgggccgaaatacgcgcctccgccgcaattcgtcagatagaaatcggtctgctcgtcgttgatctcatagccgagcggcgcttggagctctttgatccgatacgccgtgccgcactgcaacccttgggttttgccgacgacgatcatgcctttctcgtccgtcaccgctgtaatgggcgtgggcttgctcgacgcatagtcatggccgtcccattcgagcagttcgaatttggcgccggccagatcccggtagccggacgcatcatcatcggttttatgcaacagcatcgtcgatgtctgcacgatgacgccgctactgctgatggccgcgccgttcgtattggccgcgccggcatcggaccatggcgagttggcgaattgcgcggtgttcgccacgtcgaatccggcggagcctttgaacccgtactggtagctgatggtcaccggcgtggaatcgggaacgtacaccgtcaatacgccgccgagtttggcatcgttttcctgatatacgatcgcatccgaggatggttggtacgttttgccggccgggcaggactgtccgttgcctatccaggcgaggcacacggtcacgttgcccaggaacgtgacctgcggattgctgccttccggtatggcgggcacggtcagcgtgtctttgatgggcagcatgtcggtatcggggacatcatcctgtttcgcatgcgtggcatcgatgttcagtccataccggttggcgcgcacataataggttcgggtgaagcttttgccgtcggaggaccagccgctgtcgacgttctgcttgtcttcgacgccggtattggttttctggaaattatcgacgaaggtttccgacgtggacacggaaggtatgctgccggagcccatggaaaccgtattacggtatttggccgtcaggcaatcgccggcaccgtttttcagcgcgggatcggcgacgcaaccccgtttgccgtcgtatttgccttccgcccagtacttgccgtcgttgatgtcaggagtgcgtgcggccacatacagatacacgttgccgtcgttcatgagatcggtcgcctgttgggggatggtgatctggtacgtgcggtcgccggtctgcttgacggtaacgacatattgcacaccctgggtattggtgaaccgcgtctcccccacggtaagccactgtttgcggtcgccatgatcggagaacgcgaacttcacgtcgtgcaggccctccggcagggtttccgtgaagacgagcggcgcgcgacgccaattgtcggtcacgtgcgcgctgatacgccatcccacttgcctcacggacaccggatcgggggtggcggtacgtgtgtagtcggcaccgttggccgagcaggaggtgaatttggggttcccctgtccgtcgaccggatcgccgcaaccgtctttgaccaaagaggcgacttgcacactggaggtgacgggtttgacgaacgctccaccgacgccggttcccgcggtggctgaattcttacgcacggtcgtttcactggaatcgaacaggctttgataggtgatcgccgcggttttgccggtggcaagcgcgttgtcggccacgaaccggaaggacgtgtatcgctgtgattcctgcgccttgttaaggtctatccaggtcctgccgttgtcggaggacacttgcgtcgctccggccagctgcttaccgtcgacggtcacgcgcagactgtcctgcagcagttgcttcgtgtaccagacgccgctgccggtgtcctgcatgacccatcccgccggcagttggcccttgccgtcattgcgcaccgagacattccacgacgcaaggccgcaatggccttccgccacgcccatggtctggcactgctccgccgagggggtctgctgcccgcccgccgttttggtgagtgagatccttggccgcagcggattccaagcgactgcgttgttggtgaaatagtcgcctccgttattggaacggacgaaccgcgaaatgtttttcgaagcgggatacagcacgtcattggcgaacgtcgaatcgtattgcaacgtcaacgtctgccctgcgggaatcgaatacgaatccggctggaaaacccatttccaataggttcccgtggccaatcctccggccggccatgtgacggcgggtccgcccttgtagctcggcagcgtgaccgtatataccgtcaacgtgccgtgccccatcgttgtggtcaacgtttggtacagatcgttgatgttctcagccgtgtaccatcctcggcttgacgaggtggaaccgttctgttccgcaacgttctcatacgccatccaatcctcgatcttcacgattggctggtcgatggttcccgtgttgacgtattgcgcctgccatctggtactgagcgttccgtccggttgcagcgtcggcgtgccgacgacctgcttggaggtgctgccgcttctgcggtacatggtgatggtggtggtatggccgttgccgaaatccaatacggtctgccctggattattgccggtcaccttgttgcgatcggcttcgatgtacaatcggccattgtccagtggggcggcggcgttcttgctgatggcgtgctcactgaagacgatggtcaccaatccgtctggagcgatcgtgtacgtgccgagatcgtcgttgagcgtgcccgacatggcggtaccggtgccgttgaatcccgcgatgtggtatcggaacacgtggttgtcttcggtgatgcttcctttgggtatgacgaattgcgcgtcaaaacggaattgggctattttcgtgctgtaatcgaacgagacattgccgtgttcatccacgggaacgttctgccattgcgtcgaattctgcaatcgatattgcactgcggcattgctgatgcagccgaccaatcggccggaaggctggctagaatcaacgacggtgccttgctcgtcctgattccaaggacgtccgcacgccggcgtctgttgcgcggcatcgacaacccccccccccgtcgacggcggcggccgtggcgaccggtacgatcatgccgacgaccagcgcgacagccgtcgccaaccgcgttaaacgtgtgaccataccagaactccgcacatactgacggttcatcgcttcgcgcgaaccatcgtgagatagtgaccgcaagggatgcgcttgtttgaatgcgcgccgaagcacacgtccctaaacgcgaaaacgtaaccctttattcaacaaatgttatcacttgtatcatatgtcggcatatctttgtgccgggatatggaaccggtatacggccgcgcctccggccgcgcgcgtatacgaatacttcgcgccgctttccgcttctatcaggaacagttacctgaataaaccgggttacctgaataaaccggacagttggctccatagcgacggcttgcgcagcaaatcatcaccctcgccctcgccaggcgcggtttggttcaccgcataggtgtaggcgcgtttggaactgggcttgcccaccagttcgccaaactccagcaattgcgtacgcggctcgtaagggtgacggatatcaaattcgatcaatcgcgtggcacgtttggccggagccggtccgtacgtattgaatccgcaggttggcgtagcgataagcaacagaccctcatgttcgccgacgaaaccgttgcgatgatcatgaccagctacgacgccgaaatacccctcgcgcagc

SEQ ID NO: 2879 - DNA, 6409 bp, Unknown
  R36_18m  MAG No. k141_38767
acgactttgataacctgaccgatcgacatgactacctcccgacatcggaaaacgattcgagcgcctcgctgtgcgcttgctgattccattctaagggcatggcccgttcgccaagcgcgggtacaacaaaccgttgttcgcacttgcatcccggaggaagaaacggctcggtcgaacctatttcctctccgcacccttcaatgctcccggttcctctgactcctttgcgagcgccgcggatgggatgagcacgcttacgtatggggttgcgccagacaggacgtcgtcgtagaagcgctgtttggcgtcgatgaagtcgatggaatcctggatttccgcgagctgctcgaccagccgcgcccgcttgccggcgagcatctacttgcgttcggggatgctcggctcgtggaggagcgtaaggggcgcgagtaggggttcgcggctttgctgcggtctctccctcacccggctatactgggagctccctcgtcagagggagcttaaattcggtctggttataggcccatgggcttcttgggctttttgtcgctcatgagcatgaggaagctgcgggactgggcggtgatcatgaagcccgcctcatagctcagttccggcccatccgggttgtgcgtatccacgaccagctgccatttgcggccgtatcgctcatccggcagggtgaacataatcggctcgtaatgcgcgttgaagatcaggatgaagtcattgtcgaccatccggttgccgtaccagtctacctccggaatatccgaaccgttcagatagatcatcatggagaacgcatgcgtgttctgccagtcgtccatatccatgatcgaaccggtgtggtcgaaccattcgacctgcggaatcatgttcgaatcgtcgccgggctcacggcctgtgaagaagcgacggcggtgcaacaccggatgatccaaacgcagatgaatgagtttggaaacgaaggcgagcagttccttgcgtcccttgtcaagatgccagttggtccaggagatctcgttgtcctgacagtaggcgttgttgttgccctgctgggtgcgggccacttcgtcgccaccgcaaatcatcgggataccctggctgaacagcaacgtggcgaacatgttgcgcatctgacgctgacgcaagtcgttgacgtccggaatattggtcgggccttcaacgccgcaattccaagagcgattgttgctctcgccgtcgcgattgccctcgccattggcttcgttgtgcttttcgttgtagctgaccaggtcgttcattgtgaaaccgtcatgcgcggtgatgaagttcacggacgccaccggtcgacggccgttgacctgatacagatcggagctgcccatgaggcgtgatgcgaattcgggcaacgtggagggctgtgagcgccagaagtcgcgcaccgtgtcgcggtagcggccattccattcggaccagctggacgggaagccgcccacctgatagccgccggagcccagatcccacggttcggcaatcagcttcacgcgcgagatgatcgggtcctgctccacgatgtcgaagaacgcggacagcttgtcgacctcctggaactggcgtgccagcgtggcggccagatcgaagcggaagccgtcgacgtgcatttcggtaacccagtagcgcagcgaatcggtaatcaactgcagcgcgtgcggcgagcgcataagcagcgagttgccggtaccggtggtgtcgaagtagtgctgctggtcgccttccaccagtcggtagtaggaggcgttgtcgatgcccttgaagctcagggtggggcccatatggttgccttcggcggtgtggttgtacaccacgtcgaggatgacctccatgccggcgtgatggtaggccttgaccatggacttgaattcgttgacctgctcgccgcgctctccggaggaggagtaggcgttgtgcggcgcgaagaagccgatggtgttgtagccccagtagttcgacaggcccttctcctgcaggaaggagtcgttgacgaactggtggatcggcatgagttcgatggcggtgacgccgagcttcttcaggtattcgatgacgctcggataggccaggccggcgtaggtgccgcggatgtccggcggcacgtccatgttgaggttggtcatgccgcgcacgtgcgcctcgtagatcaccgaatcgtggtacgagatgtaggggtgctggtcgttgccccagtcgaaatacggattgatgacggccgacttcatggtgtgggcggccgagtcaaggtcgttcatcgccgaggtgtcgtccgggcttttgaaccagtaggagaacaggctttcgtcgccgtcgatgttgccttcgatggccttggcatacgggtcgagcagcagtttgttggggttgcatctgaggccgtgcatcgggtcatagggaccgtagacgcggtagccgtagcgttggccgggctggaggccggggatgtagttatgccatacgtatgagttctgttcggtcatttcgatgcgcgtttccgcatcgtgctcgtcgaacaggcatagctcgactttctgcgcaacctgtgagtacagcgcgaagttcacaccggcgccgtcatagctggcgcccagcggatacattgatccaggtctgatctgcatagttttcagtatcccactttcttgtgtcactgatgtgccggggagttgaacgtcaggagaacagcgacggcttgtctttgtcggagttcctggcgatgagtctgcgtaacgcctcatgctggatggcgatcatcgaattggatgaggtgatgcgcgtggcggcaaggtcgctccacggaatccacgcggattccacgtgctcgtccgcgtcgaaatggcgctgctcccgtctgaacgggcccaaatgcaacaccatgatgtgggccagttcgtcggtcatgccttcggacgagtagaaatcgcccacgaagtcaacacccatggtgtcacggtccggcaccacgccggtttcctcggccagttccctcagggccgcgtccatgatgtcctcgccctcgtccatgagaccggcgggaagcccgtaggcgaacatgtccgatccggcacggtattcgcgttcgatgaggtaacggtcggtggacatgtcgtgcacgagcatgaccacacagggggcgtgacgcagcacctggcggccgatctcgtgttccttgccctgcttgtcggtcagagcgatgcgcatgtcgtccacgtggaagatgcgcccggtataaacggtttcgctactgatcactttggcgggcacgtccatgtcgatgccatccgaggaggcgttcagcttatggtcgagccgatgctccagttgttcctgcttgcttcccccaaacatgtcatctcctcggaaaaaacgttttcgccacgtcactatagcgccttaatcccgatgcgcggtaatggacagcgtccatggatcggtcgtgtcgtggaaccactcgacttcaggccttgctccggtcgcttgttcgatggcggctggcacgtcatcgatcgcgtagttgaaccacatggattcgatggcggcatgaggggtgttgatgaagcagggacgcacatggctctcccccgccattccatggccgatcatgatgccttgggccctcatacgggcttcataccgggcttgttcgatggcgtcggtcaccgggtggtgacgcaaatcgctggttacgtacacgtccgcaccggtggcacgcacctcgttgaacagggagtcaccggagccaggcagaatggccacatactgaacagaagtgtccgaatcgccgcatacctggatgccgagcgcggtggtcatgccatgatcggacacttcgtcgaatacacgctgagcgaaatccttcagggcaacaggcttcggcaaacgacccacacgccccaagccgaccggatgagaggcgttggcatcgtcaatcggcacgagtggtttctggtcgatgagtccgaagtagtcggccgcagcctgccccacgccgcgatacgcagcgtcggcattggtgtgccctacccacagcccgcagccgtgctggtagagcctgcggacgatgtcgccccggaaaccgagtccgctcgtctcgtgtacggaacggaagaacaacgggtgatgggtgatgagcaggtccgcgccggtggcgatggccttgtcaatgatggcggaggtcgggtcggcggcgaacacgatgcggtgcacgtcgtggctcagatcgccgacgatgagacccggctcatcccattcctcggcgtagcgcaatgggtacagggtctcgagaacgtcgatgacttgcttgagattcggcatatgtcccattgtagtgggctattgcggcaagggactcattctgcaattgcggacaagccatgctcgtgctcttcattgctcgactatcggctcgccttcgcctacaaacaatccactggactgtttgctcaacggctcagcctcctcacccgaggggagctagaaattgtcagtgtgcggcgagctgccagtcggaaccgataccgcacgatacgtccagcggcacggcaaggtcgacggcgtgttccatggcgttgcgcaccagttcggtgacctggtcgccttctcccggcgcgatttccactaccagttcatcgtgaatctgcagaatgatacggctcttgacgtgggcctctgccaaggtctgctcggcgcgaatcatcgcgatcttcatgatgtcggcggcagatccctgaatcggtgcgttgagtgccgcacgttcggcggcctcacgcgcaacacgattggtcgaatgcagggccgggaagtagcgacgccgtccgaaaatggtttccgtataccccttctctcgggcattggccaccagcgattcaaggtaatcgtgcaccttgccgaaggtatcgaaataccggtttttcaacgcttccgcttcacgtggcgcgatcttgagctgctgggcgagaccatacgtgctcagaccataggccaatccgtagctcatggcttttacgtggctgcgctggtcgccggtgatctggtcgaccggcagcttgtagaccatcgaggccacgtatttgtggaagtcggctccggagcggaacgcttcgatcagcgcctcatcaccggacagatcggccatgatgcgcagctcgacctgtgagtaatcgcagctcatcagggcctcgtacccctcccccggcacgaacacgccacgaatctcacggccggcggcgttccgattggggatgttctgcaggttcggatccacggagctcaatcggccggtggcggcaacggtttgctcgaaagtggtgtggatgcgctcatctgatgtgctggtggcatcgatcagcgtttggacgatctgcttgagcttgttgatctctcgatggcgcagcaacgccccgaggaaaccgttggcccgctcattgtccactgatttgacatacagatcctgcaatgcggccgcattcgtggtgtatgagccggacttggtgcgtttggtgggtttcaaacccatatcttcgaacagcaccttctgcagctgcttggggctttgcaggttgatttcggtgccggcatactcccaagccatttcctgcgcttggcgagcctcggcggcaaactggtcacgcatggaaacgagtcgaacgctatcgactttggctcctgtgtgctccatgccgtgcagcacgcgggaaacaggaagttcaatcgcgcgcatcagccagcattgttcacgctcgtcgataatcggcccgagcgtgacggcgaggctgcggataatggccaaatcgcgcagacgatgttcgttcggatcttcttcgacctgatcgtcatcgaagtccaacgtgccttgcgaaggctgttcggtttcggtgaagtggatgtcgaggaagtgctcggccgcctgcttgaggctatcggcgtggaaatccggttgggtcagatacccggcaagcttggtgtcgaacatcggcaggtccatgtcaagatctaccgcgcccagaagatgcagcaattctttatacccatgcacgatggtgcgggagtgttcgctttccaggaaccgcgcaagctgtgctcgcagggtatcggtgattggaaggggcactatggccgctgatgttgccgtggccacggcaatggcttgtgccgtggcacgccccggcctttcgtcgccccatgcggccacggtccaagcgtggccgaccgcgtcgccgcagatggcatgccgctgcgagccatcgccatagtcggaaaccgtgaaatcggcgatttcaccgggaaccttgacttcgacgcgatgggccttgacccattcgtcgaactgctccggagcagtgatgctcgtgggttccggcaggttcagatcgag

SEQ ID NO: 2880 - DNA, 7227 bp, Unknown
  R36_18m  MAG No. k141_39015
cgcgtataccagcgtcatcgccgaatacgggctgatcgggctggccatgctggtcggagcctcgatggtctgcatgacgcgcgggaggacggtatgccgtggaggtgcggatggcgcatcgtccgacgggctggcgcacggtgtttgtgtcaccgacgttgccgacgttactgatgttgccgggggcaatagtggtgatggcgttgccgacgcgggttcgggcgaatccggcgtctggcacaagaccgtcatctgctggctcgtcctggtcgcatacctgtacatccaatgcgagaactatgcgttcgccgctctgccgctcctcgtgttcgccgcctcgaaggtgaggcgcgagcgctgattcctctcgggccgacgcatcgacgcggcccgagatggaccaaaatccagaataaacgacattcgccgctgttccgtttttcgcccaaggcgtatctcttcccgtatcttgaggtgcatcatgtattgtcgcggctaactaaccggcgaaacgcggcatgtttcgcattttgggcgaaaagcccaaggcccacaggaggtattgatgacgttcgttgcacggtcggtgcgctatgtgctcagaaaacgagtacgaaccatagtgctccttatagtattgaccatcataacggcgagcatgctatccacgatcgcggtttctcgggcagctcaacaggccgccggacgaatcgagaaggaagcggtcggcgggttcgtgctggccagcaacctgcagggcagcatgctcacgcctcgcggaggtggcatggtgcgtcccgccgacgtgcgcaggatcgcccaactgcccggggtcgattcgtatatggtccgtcagaacgccaccgctgatctcgtgggggcgaatgtggcgaaggtccccggcggcgatgattacgatgcgaccaaggagcagcaattcggcaacgccgccaacgtcataggcacgaatgattcgtcgaaactcaacgtgttcacgtcgcgcacgctcggcatggccgaaggacggcatctgaaggcctccgacaagtacacgtcgatgatccatgaggatctcgccaaagccaacgggctcaaagtcggagacacgctcacgctcaaggccaacgcctacgacgccgacaacgaatcacattcgacggcgaccgtcaagaccaccatcgtgggcatattcaagggcgacagcgccagaaaggtatccagccgagcggaactcaccgccaacaccatctacaccgatctggataccacacgcgatctgtaccagtacaaggacggcaaggaaatataccaggacgccaccttcgtgctgtccaagggcgttgacgtggagaagaccatggacgccgcaaagaaactcccggtggattggaacaactatcagatcacgcgcaacgaccagtattcgtcgagcatgctgcatgccgcccgcggcgtgcgctccatgatgcgcggcgccctgattggcgttaccgtctcggccgtgctcgtgctcagtctcatgctgctgctgtggatgaacgaccgccgtcaggagatgggcatactggtgtcccttggcgtcggcaagccctccctggtcgcccaatacctcaccgagatggtgctgatcggtctgccgtccctcgtcctcggctggctgtgcgcgcagggaatggcccaatggctcggcaccacggcgctccattccgtgaacgcctccgcggcgaaggagctgagcagcatggggcaggtcggcggcgatcttgaatccagcatgtcggtgcgcaccctggattcgctcacggtgtcggtcgacgggaccgccatgctgtacgtggcgctcggattgttggcggtgatgctggtgtgcgtcgcggtggcgtgcatgccgatgctgcgcaaatcgccgcgagacctgtcggagattcgatgatgagcatgaatgtgtggaagcgtgccacgttggcgatcgtacgcaagccggtacgcagcggcatcatcggtctgctgatgctgatggtcttcacgagcctggtggcgcaggtcggagtctcgacggccctgcgtaccatgtccgacagcatcggcgcgggcatgggcatagggtttaccgtcagcgccggcgagaatcccatcagcgccgaggaggcgagccggttctcgcgtatccccggtgtgacgaagaccgcctatgcgacgaagaccttggcgcaggtggatggcgcgcgcccggtcatgccccggcagggcccccggctggactccgatctggccatgcaggtcagcgtgctgggcaccaccgattcctcattgtcagaggaattccagagcggcctgtaccgcctggagcagggccgccatatctcgggcgacggcgacgatgtgctggtccaccgcgacttcgcgctgcagaacggcctatcgatcggctcgacattccgtctccggcaggaggggcgcaacgccacggtgcgtgtggccgggatcttctccggcaacgtgcaggcccaaagccccctgccctcggacacttccgagaacctcatctattcgggcaggcgagtgacctccgctctgaccggaaacgaccggatcggcatgatccgatgcctgtcggataatccgcaggacctgtccgcggcggtcagtcaggccaagaccatggccggtggcaagtacgacgtcaccgacgattcggcccggctctccggcgtcctgcaatccgtgcagacggtgcgtgatctggtgcgcatggtgctgctgtccgtctgcctcgcggacgtactggtgctggcgatggcgctggtcttctggattcgctcacgcatccatgagataggcacgcttctggccctcggcatcgacaagatgcggatagtcgcacaactcgccatcgaaaccggactcatggcggcggtcgccgccctgtgttcgctgggcaccggcgccatgctgtcgggatacgtgtcttcccgactgttgcgcgattcgggcgtcgcgccattggaatcgttgcacgtggaggccttgccgcctgagcagacggtgctcatcctgctgctcggatgcgcggtcatcgccgtggcccttgccgtgtcatgcgccgccgtgctgtccaaatccccgaaatccattctttcctctatgcgttaggagtcaccaatcatgtctaactgtctgcaactggaccatgtcgattacgcctacggcgcggcgaagatccttgttctctcggatgtcagcgcggatttcgaatccgggaagatgtatgcgatcaccggcccgtccggcgccggcaagagcacgctgctgtcgctgctggccggcctggacgccccctcccggggagtggtccgcttcgagggggaggacatcgccgcatcgggctatgcgaagcaccgtcgggagcacgtgtccctggtgttccaggaccataacctgatcgactacctcacccccgaagagaacctgcggctggtcagcaccaaggccgatatgaagatcctcgaggaactgggtttgagccgtgaggaatccaagcgcaacatcatgcacctgtcgggcggccagcgtcaacgggtggcggtcggccgcgcgctggtcgccccgggccgcgcgatcctcgcggacgagccgacgggcagcctcgacccggagatgaccgacgaggtgattcatctgctgcagcatgccgcccatcagctcggcaaatgcgtaatcgtggtgacgcattccaagcgtgtcgccgactccgccgatgtcgtgctgcgtctcaggagcaagaaactgacccgggcgtgacccacctgggccgggcggcacccatacaccgcttcggcatttcggcaccccggcgaccgggcactccggtatcccggcccttcggcattctggcacccccgcgctccggcaccccggcgacccactcgcgttgccggggtgccgtattcgctctgcgccataatgtgcgtgataatggaaccatgccagtgatgaatgatgaagtgcccggcgaggttgaaccgcaccccgattgttggactggagtaatccagattcgatgatcggaggtgcggttcaaaaggcccttttttgtgtcggattacgaaccgcgcgtttcaccgcttgccgttgtagatctcgttgtcgatcacatcggcgaacacgcggttgacggccgggcgcactaccttcagcgacggcgtcaggcacttgttctcctgcgtgaactgcgtgcccagcacggcgaacttgcgcacggattcggcacgcgagaccgtcgcattcgccttgtccacgtactgctggatctcctcgcgcaccgcggcgttcgtggcgagccggtcgaccggcgtctccgtggacagtccgtgtgcgggcagccagatggccagcgactccgggtcaagtgtcaccagcgcgccgatgaacgggcgctggtcgcccaccaccacgcagtgctccacgatcgggcacttggcgatctcctcctccagcggaatgggggagacgttcttgccgccggcggtaataataatgtccttgattcgaccggtgatgatgatgcggccggcgtcatcgatctcggccaagtcgccggtcctgagccagccgtcggcggtgaacgcctcggccgtcttctccggcagattgtggtagccgcggaacacgttcgggcccttgacctgcagttcgccttcgtcggaaatgcgaatcgaggagccgggcgcgggctggcctacggtgccgatcacattgtcggtcacgcgcgtggcggcgaacggggcggcggtttcggtcatgccataaccctgaatcatcggcagtccgatgccgttgtagaaatgcgccagatcgagcgacagtggtgcgccgccgcaggccacgtacttgatcttcgggcccagagcaccgcgcaccgtgcggtagacgagcgtttcgtacttggcgcgctcggcgatttcggcaaacgtgtgctgctcgccggcctgctccttgcggctccagacgcgcgcggcctcggcggctttgacaaacaggcggcccttccagccggcaccggccttatgcgaggcggcgttgtacaccttctcgaacacgcgcggcacgcccagcaggtaggtcggttcaaacgaacgcaggtccggcagcagggttttggtgtccggcagatagccgaccacgccgtcatcggaggcgatggaggcgtactggataaatcgtgcgaagcagtgggccagcggcaggaagagcagcaggcgtggatggtcgtcaagcaccacctcatgcaacgcctgcgaagcggtgatggtgatggacacgaagttcttatgggtcagttcggcacccttcgggttgccggtggagcccgaggtgtagacgatggtggccagatcgtcggcgcgcacggtggccacgcgctcgttcagttcctcgtccgaaacggtcacgcctaggccttccaaagcgcccagcgcgttgccctcgatcatgagaatctgcttcaaggcagggcagtggtccttgaccgagtcgagccggtcgaagcgctcgcggttgtcggcaaaggccagcttgaccgccgaatcgttcatgatgcgctgggcttgcggggcggagtcggtgtcgtagatcggcacgcttaccgcgcccactgcggccagtgcgaaatcgagaatgccccattccagacgggtggaggaaaagatggtcaccgcgtcgcccttggcgatgccgagcgcgatcaggcccttggcggccgagaccacgcgctcgtggaattcgccggtggtgacgttctgccagcggccggggccgattttcttggcggcgattaccgtgtccgcgccggtgcgggcaaggcgatcggtaagtagggagtagatggtctggttgtcgcggatttcgatggattcgccaggcgtggtgtagtggtcaagcataagcgggccgtgtccttacgtgcgttgcgtgatggctgttgacaaaatcgagccattctgacaagttaggttacgctggcgtaaggttgcgcgcgttgtgggcaatggagaagttgtctgtctggttttgtggattgtatacaacgccgtgtctaaccggtttgctctacggttatgacaccgtgtccatttcgggagccatcgacttcctgcaggacaagtacgcgctgagcccggccctgcagggtctggtcatcagctccatcatgatcggcggcgtgatcggcgccggcttctccggcttcctgtccgataagtacggccgccgccgaagcactggtcgccgcgcaaaaagcagcactaggccgcgtttgctgcgtctattggcgaattgatcatatgggtcgtctgcgtgcagacgacccttttgcgttccgtcggcttctgacaccgtagaaacgtgctttctcggcttcgaggggctgattttgccttatctggaagtctacttccacttcgaggggctgatgcccaagtagacacggccctaaaacggcggaatgacgttgacgtgtagccgtttatacttccgattacatggatgaggagcccctcgaagcggagatagacttccggcaaatgcgaaatcagccccttgaaacggaagtaggcctccggcaaacgcaaaaattagcctcctcgaaacggataaatgcacgtattgggtgtagtggatgcttcagcccctgatatcgaagcatattttttctggttggcgcgtctagcatgcgcactccgcaatcgataattctgtggcctctctcactttaaaagtctggtgtgtgcgagggcgttcgcttaaggtgaatgggattgcgcggaatgtggagcgcagggtcatgaccatgcgcgtgctgcagatccagctgcgctcgctgaccgccatggatatcgtggcctacggcggtgcggcggccggcattggtgtggctctatggcagtatgcgcataccaccgcagccgccgcaggagccagcaccgccggctggtcgccgatcatgctcgccgcccacctgcccggcgcattcgcctacctggcctacggcctgcaatacctgatgccgttcggtgcgggcttcccgctcaccctcgccggactgctgctgattgtgctgctgtccgccgaattctttattcccatgcgtcagcttggctcgttcttccacgtggcgatgaacggcatgacctccaccaagcgcatcttcgctctgctggacaccctgga

SEQ ID NO: 2881 - DNA, 2550 bp, Unknown
  R36_18m  MAG No. k141_29077
catggtttaactgtacgctgtatgatgcacgaatatttcaattagcttgggcgtagccctaggccacggacctggaccaccctcagtctcgctttgcgagccagctcccgccagcgggaccccaatggttttcatatcactatgcttcgcgcagttttgcgagctgtgttttggccttgtggagcttggcatagatttcattgcgctgaacaggattcttgacgcgctgatggtcgcgggtgagcttgtccacttcggattcgagccgagcaatttcagtatggcgaatgatgcgcgcatccagattttcgatctccggcgtgcccagaatggtctgtgagcacagcgaggcccacagctcatcaatagtagagccggccagctccagctgggcctcccccgccggctgccaatcgccggcatatacccgatagatcggcgtgtggccggcacgccccggtatcgcccgacgcacggcgaacgcacattcctcacgtgtgctgccctcgaacggcacgtcgcgtacgcacacgaacacgatgcccgatttacgctgcccggcaatcaaatcgatgacctcgttcggtatgccagtggctttggccgtaagcttcagtccgatgaccagcacttccggaaccagtttgccgtccgcaagcccagtgttaatcgaccggaccaacgccagcatggtaatggattcgatttcgttcaccaatcgctgcttgagtttgcctgaaatcggtgccttgcccacgaacaaggctttcggcagtgtgcctttggcttcgggaatcgccgtggagacgggcagtcccagtgaaagcgcggatacggaaccacagtgtgcggcttgcgaaccagtcatcatcgaccttctttcccggcctgccatcagtgtcataccctcgcagtgcagcagtccgtttatctattggaaagcaacactagcgcatccaggccggaagtcgtggtacatatccatatcctgctgcggttatagaaaatcccctccgagtttcctcgaaggggatttcctataacgctagttcaagcgaagattcttgtctgatgaaaatcaggcgaggatcttggtcacacgaccggagccaacggtgtggccgccttcacgcacagcgaaggtcaggccctcctccatggcgatgggctgaatcagctcaacggtgaaggtggcgtggtcgcccggctgaaccatctcgacgccttccggcagctcgatgacgccggtgacgtcggtggtgcggaagtagaactgcggacggtagttggagaagaacggcgagtgacggccgccttcgtccttggtcagcacgtagacttcgccctcgaacttggtgtgcggggtgacggagcccggcttggccacgacctggccacgctcgacatcctcacggccgaggccacgcagcagcagaccggtgttgtcgccagcctcgcaggcgtccatggtcttgtggaaggtctcgatggaggtgacggtggtctgctgggtcggacggataccaacgatctcgaccggggtgttgacggccagctggccacgctcgacacgaccggtgacgacggtaccacggccggagatggtgaagacgtcctcgatcggcatcaggaacggcttgtccaggtcgtgaaccggggtcgggatgtagtcgtcgacagcgtccatgaggtccttaacggactggacccacttctcgtggtccggagcgtcgtcgtgcagagcaccgtaagcggaggtgtggatgaccgggcagtcacggtcgaagccgttctcgtcgaggaggtcgcggacctcttcttcgacgagctcgatgagctcttcatcgtcgaccatgtcgcacttgttcagggcgacgaggatcttcggaacgccaacctgacgggcgagcagcacgtgctcgcgagtctgggccatcgggccgtcggtggcggccacaacgaggatagcgccatccatctgggcagcaccggtaatcatgttcttcacgaagtcggcgtggcccgggcagtcgacgtgagcgtagtgacgcttctcggtctggtactcgatgtgggcgatgttgatggtgataccgcgggcggcctcttccggagcggagtcgatctggttgaagtcgtactccgggttgacatccgggaactcctcgtgcagcaccttggagatggcggcagtcagggtagtcttaccgtggtcgacgtggccgatggtaccgatgttaacgtgcggcttagtacgctcgtacttttcctttgccattacttttgtcctcctggacgtctcgtgagtttcctgcaccctttcgcacaggaactcgcttattctactgggtttctgggttatgtgccactttgaagagccagaacccagtcagcggtatacgatactaccgctgactggcgacaccggccacttcatgatgtggcgcgtgtcactcgccgcgctgggccttgatgatctcgtcggagacgctcttcggcccctcggcgtaggagtccatctgcatagtgaccatggcgcggccctgggtc

SEQ ID NO: 2882 - DNA, 2683 bp, Unknown
  R36_18m  MAG No. k141_39155
cccgtaaacagaaacgcgtcaaaccgttcggcacattgcgcaagaatgtcggcgtcatcggtcagcggcaacatgacgggcgtaccgccggcccgcattatcgcctccatatatccgggcagcatccacagactatcgcgcccgtaatccatcagcggagtcaccgcaatgagcggtcgattcgtagtcatgcctgcctcttttcgcccaagtgtcgctttcgtcgttctgccgcaaatcgcttgatccagtggccaataatgccgtcactgtaccgaaccaatgtaaccggtcggccaacattatttcgtcagccagccgcgacgagatcgcacaatgtgccaatgatgggggcattcggtgcggccttgtcaatgttcgggccattgcacgttcggcggggaaagcatgccccgtccgcgcatcgtgatgaacgagtaaggttgacggggagggagaatcacatgaaccaggcatgcgtacgcaacgacaccatcgacgcgggcaaccatcatggccgaccgcaataccggtcgttcctgcgatttctgacatcgcaggaacgcaacgtcatttggctgttgctggccgtcgcttttcttccggtggacggcaccacgcttggcctgtacgcgccgttctggtcgccaatcagtccggcgctgttcgccgtgtactgcctatgcaattggcggcaactgcgcatcgcagccaaccggtacctgccgatgttcctcctaccggtggtctgtataatcctgtccatcccgggatggctgaagttcggcatccacctcaacgccgcgttcatgagcatcaccggattgctgggcgtgctcgccactttgggtgcgatcgcccttgcgttcgacatcaaacgcattccgtggcgtacgccattgcggattctcatcgcatcatactgggtttccttcggagtgggcgtcgtgcaatggctgtccatccgtctgcgcgccaaaccgttgaccgactatttctcgcacctcatgtaccggcaatacatcagcgacaactcggtgtggggcggcggccgtccgcagttcctgttcgccgagcccagctatatcggcatgcacctgttcggcatactgcttccgctcatgtggctcatgcgcgggcgcgaccgcatctacgccaaacggctgcgtgacctcatcgtcacgtatgccgtcggcgcggtgctcatgcaagccggcaccagaatcgtcatcgattccgtcgtggcgttgctgatcgcccttgtggcgcgcaccgattggcatgacggcgcacgccgcgtccggggcatgctgcagattctcggcgcatgcgcactgggcctgctgggtgtgctggcggattccagactctccgccatcgcggagaacggggccgagggagacggctcgttcttcgcgcggatctaccaaagcctcgatccgatatgcggattgctcacccatccgtggacgctgctcaccggttatggcgcgggcaacatcatcaatgcggtgtgggccggcgcggccaaagccggacggctgctggacggtcttggtatgaacggcggcgcggccacgggattcgcggccggcgtgaacgcggacacggtgtggacgatgtgcgcgtataccagcgtcatcgccgaatacgggctgatcgggctggccatgctggtcggagcctcgatggtctgcatgacgcgcgggaggacggtatgccgtggcggtgcggatggcgcatcgtccgacgggccggcgcacggtgtctgtgtcgccgacgttgccgacgttgctgatgttgccggggggggtaatagtggtgatggcgttgccggcgcgggttcgggcgaatccggtgtctggcacaagaccgtcatctgctggctcgtcctggtcgcatacctgtacatccaatgcgagaactatgcgttcgccgctctgccgcttcttgtgttcgccgcctcgaaggtgaggcgcgagcctgatttctcgcgggccgacgcatcgacgcggcccgagatggaccaaaatccagaataaccgacattcgccgctgttccgtttttcgctcaaggcgtatatctcccgtatcttgaggtgcatcatgtatcgtcgcggctaactaatcggcgaaacgcggcatgtttcgcattttgggcgaaaagcccaaggcccacaggaggtattgatgacgttcgttgcacggtcggtgcgctatgtgctcagaaaacgagtgcgaaccatagtgctccttataatactgaccatcataacggcgagcatgctatccacgatcgcggtttctcgggcagctcaacaggccgccggacgaatcgagaaggaagcggtcggtggattcgtgctgtccagcaacatgcagggcagcatgctcacgcctcgcggaggcggcatggtgcgccccgccgacgtgcgcaggatcgcccaactgcccggggtcgattcgtatatggtccgtcagaacgccaccgccgatctcgtgggggcgaatgtggcgaaggtccccggcggcgatgattacgatgcgacccaggagcagcagtttggcaacgccgccaacgtcatgggcacgaatgattcgtcgaaactcaacgtgttcacgtcgcgcacgctcggcatggccgaaggacgacatctgaaggcctccgacaagtacacgtcga

SEQ ID NO: 2883 - DNA, 5278 bp, Unknown
  R36_18m  MAG No. k141_39249
cagatcgaagccgtggtgtacggcggtactggccgctgagccgcgaattccgcgcctaatacgatgaaagccctccttgcggagggcttttgcgattttaacgagattcaactacttcttagtgatgtagcctagagccttgagcatttcggcgcattcgagggcaccgccggctgcaccacgcagggtgttgtgggccagacccacgaacttccaatcgaagatggaatcctcacgcagacggccgatggaaacgcccatgccaccctcgtagtccacgtcgagcttgacctgcgggcggtcatcctcggtgaggtactggatgaagtgcttcggcgcgtgcggcagctccagctcggaagccttggacgtgtagttcaccagacggtcgataagctcttccttggtggccttcttgccgaagttcaggaacacggtggcggtgtgaccgttgagcacgggcacgcggatgcattgcgaagtgatcttgaggtcgccgtcgaacggcacgatctcgcccttttcggcgtccacatggccgaacaccttgagcggttccttctcggacttcgcttcttcaccagagatgaacgggatgatgttgcccaccatctcaggccaatccttgaaggtcttgcctgcgccggaaatcgcctgataggtgctcacaaccacctcacgcggctcgaattccttccatgcggccagtgccggcgtgtaggcctgaatcgagcagttcggcttgacggcgatgaaaccacgagtggtgcccaggcgcttgcgctggtgctcgatcacctcgaagtgctccgggttgatctccggcaccaccatcggcacgtccggggtccaacggtgagcgctgttgttggagaccaccggggtctcggtcttggcataacgctcttcaatggcgcgaatctggtccttcggcatgtttaccgcagagaacatgaaatcaacgccagaggccacggactcggcatcgtcgccatcgacgaccaccatgttcttgacgtattcgggcatcggggtttccatcttccaacggtctccgaccgcctcggcatacgtcttgccggcgctgtgcgcggaagcggcaagggtgaccacctcgaaccacgggtgattctcaagcagcgtgataaaacgctgaccgaccataccggtggcgccgagaatgccgactttcaacttttcggacataacaaccttctgggtttgacggattgatttcacgttcgggcagccgtagcgaaatggccacacgtatccatcaatcttacgaatcgggcggaacaagaagaaccgggtgcccgtatgctgggccggatcgccggtgcgacgggacgccggaaccggctggaacgtcacggcgccgccccgccgcgatgctctgcactgggagtcatgtcgaaggcgtcggtggaagcgcagcgccagttggaccgcatcgtggcattggggtacccggacgtggcggatgtgagcgccgcggcgttccgctccctggcccgtccgctgatcgaggcgctggagcataccgattttgacgagcgcatcctgctggcgcccacgcgcgagctggtgtcgcccgaatcgctgatttcccgtacgtcgatcaaccgcatggccggtttcgccacgatgccgccgcgcgacatcgcgagctttttgccgcaggacggctccgagccgcccgagggaccgttctacatcgtcgtggaaccgcgcaccggtaccaagtacacacaaaccgcgagcccgacgtggcccgcaagctcattgactccgacgagcgcattccgctcacgctcgaggagggactggccatcgccacgcagcatccgggctggcttcaggagaaaaacgggttcaacctgctgggctcgcgcagcgccgacggccgcgtgcccagcatctggctgagccagaacgccccgaggctcggtgcggtgtggccgaattccaagcacacgtggcttggcaacgcattctgcatggcccgcaggggcgtctcgctgttccgttagtgagcggattgcgcggcttgtcggggccgtgccgcttgcccgctgacttgttgccgcacggagtccacatacgatttcaccggctggctgcggctaagacggtgaaatcgtatgaccgtatacggaaactccggctgggcgcccgtcagccggtgaaatcgtacagggccatacgaaaactccgccgtagcgggcgccagccggtgaaaccgtataagcgcatgccatttcaccggctggccgcggttagcatcccatgtcactatttgttgataatttctggttcccctccaggggggcaagcatagtaagcgaatgcatgatgctaaggtcggcaggccgagagaagacacgccgaagtaatctgcctttaacagattagatatcagatgtctgatgatagtacgataggaatgctcagcgaacccgcatcgggcatttcaaggaggaaagcgatgccatcattcgtcgtcggcgcgtacgcgtcattgccgcaggggcgcgaagcccaggaagcctattacgatctgctgggcggtcagccctggatcgacggcaccgagatccccttcccgggggaccttgccgaaaccgccgaccgcatctggcttgccggccaactgcccaggcattggaagaacaatacggtcactgccattccgggcaccatgcagcacgtatggaaggacccgaacttcggactggccagcccggacgaggacggacgccggttcgctctggcgttcttcaagcagctgcgcgacgcgctcgccgactttgcacagtggcggggcagccaggacgtcaagttcgtcgaaatccacacggcgcccacgcgcattgccagccgcgacgcgatgaccgcctcgttgcaggccctcgcgcagctggactggtccggcgccaagctggtcatcgagcactgcgacaagtacgtcgaggggcagaagccggaaaagggcttcctgccgattgaggacgagatcgcgctgtgcgggtcggccggcatcgggctcaccgtcaactggggacgctcggtggtggaggggcgcacacccgaaaccgccgtggcgcacgtggaggccgccgcgaaggccggcgtactgagcggcctcatgttctccggcgccggcccggaggagacccagtacggctacggctggatcgacggccacctgcccatgaacccggacgagccgacctcgctcatggacgccgccgccatcaaggccgccgtgcgcgccgccgggacgcaggagcgcccgctcgactatctgggcgccaaggtgtgcgtgcccaaggccgcgacggtcgaggagcgcctcgactatctcgcgcgcatccacgaggcggtcgtcgcatgagcgcgggggcggcgcccacctacctcgccttcgacatcggcggtaccaaggtcgcctcgggattcgtgacgttgcccgcaagcgcaaacgcaaacgcgggcgcggacggcaggcccgaggtgacggcccgctgcgaaatcccgaccgaggccgcgcgcggcggcgaggacctgaagaaccgcatcgtcgccttcgccgtccgccagcttgagcgcgccgaggccgagggcgtggcgatcgccggcgtcggcattgcggcggccggcgtgccggacagtgaaaccggcgagatcgtctccgccacggacatcctgcccggctggcgcggccagcgcatctacgacgcattcgcggccgtgaccgacctgccggtgcacatgatcggcgacgtgggcgcgcacggtctgggcgaggcgacgtacggcgccggacgcggcaggggcgtggtgctctcgatcggcgtgggcaccggcatcggcggcgcgatcgtggtggatggcgccctgttcaccggcgcgcacggcgtggccggccacgcggggcacgtgccgagcgcgctgggccgcggattcctatgctcgtgcggcaccctcgaggggcacatcgagccggtcgcgtccggcacggggctgaaggacctctacaacgcccgttgcgatgccgaagagggcgaaccggtggcggacggctcccaggttgcggcgcgcgcggccgctggggagcccctggccgtcggcgtgatcgaggacagcgcccgtgcgctgggcgagtgcatcggcggcatgggcaatctcatcgacccggacgtcatcgtcgtttccgggtcggtggtcaaggccggccccctgtggtggaacgccctgcgcgcgggattcgaggattccgcattgcagctggtcaggtctgcgccgctggtggagggcgaactgggcggcgccgctccgctgatcggcgccgcggtggccgtgcgcaggcatgtcgcgcagggccgcccgtgatccgccgccgggctgggactcccctcgggaggaccccgagccggcgctctccggcaattcgtcgcgcaatcgtcaacacccatatgaagcaatgtcaaggcatgaggaaaggaagcgcatcatgcatcaggtaatcgaaaagatcaggggcgggcttgtcgtcagctgccaggcgtatccgggcgagccgctgcgccaccccgagacgatggcccaaatggccatggccgcggtggagggtggcgcggtgggcatccgctgtcagggacttgccgacatcgctgccatcaaggggcaggtgaaggtgccggtgatcggcatctggaaggagggcgacgagggcgtctatatcaccccgacgctgcgccacgcccgttgctgcgcggccgcgggcgccgacatcgtggcgatcgacgccaccggcaggcctcgcccggacggtctgagctacgccgacaccgtgcacgcactgcacgacgagggcgtgatcacgatggccgactgcggcagtttcgccgacgccgagcgtgcggtcgaggccggcaccgacatcatctccaccacgctgtccggctacaccggtgagcgtctcaagaccgacggcccggacttcgaactgctcgagcggatggtcaaggcgttcccggacatgccggtgctgtgcgaggggcgcatccacacgcccgaccagctgcaccgcgtgatggaatgcggcgcgtgggccgccgtggtgggcaccgcgatcacgcatccgacgacgatcacgcgctggttcgccgcgaagctgtgatgcctcgcggcatgcggccgtgacgctgcatgcccggtgccgcagccggaatgccggtgcggtggcatcccgtggcatgggccgccgtggtcc

SEQ ID NO: 2884 - DNA, 3129 bp, Unknown
  R36_18m  MAG No. k141_39252
attgcttctttggcagattgccatatccaaatcacgcatgcgacggcggtcagggcgtacagcatcatccgggagcggtcgttcatagaagaatctccagacttgttcaaacgacttgattatagccgtatttgtggattgcgaggggaaatgaaaaagccgccatgtgtgcttcggcgaggagcgcggcatggaaagcggctcttcgcgatgcacgccatggcggcattggtcgggaatcgttattcagttgttatctcatggattgtgctggcagcgtatcagccgcgcgccttggcgtatgcctcgtacacggcttcggtgggctcgccggtctccacgccctcgatggtgagttgccaggtcagcggttcggcctcgccggacagcacccaggcggcctgacgggcggcgccgatggccacatattcgtcggtggccggacgggtcacgtccatgccgaggattgagggggccagcgtgcggatggccacggacttcgcgccaccgccaatgagcaggatgcggttgatctcggcacccagcgaacgaatcagctcgaggcagtcgcgctgggaacacagcaggccttcgacgaacgcacgagccagattctccttggtggtgttgtgcagggtcaggccagtcagcgaggcggtggcgtccggacggttcggcgtacgctcgccgtcgaagtacggcaccagggtgatgccgccggcacccggctcggccttaaaggccagttcggccagctcgtcgtagtccacgccaagggcggcgcgaccggcgtccagaatgcgcgaaccgttgatggtgcaggcaagcggcagataatgaccggtgcagtcggcaaagccagaaatcgctccggtcaggtcgtacaccgggttttcagcgatggccgcggccacgccggaggtgccgagcgatacggacacatcgcccacggccatgccgaggcccagcgaggccatggcattgtctccgccgccggggccgatgatgcagccgccttcaacgtccttgccggcaatggcggggtcggccttgacggcggctgcctcacgcgggcccagcacggtgggcagcacaatggcgtcggcgtgggccttggcggcttcctcgccctcggcgggggtcagcaccatggcgatgagatcgcggcggtactcgtcatgcgcggcatcgtagtaaatggtgccggaagcgtcggaacggtcggtgaacagggcttcgagatgagcgtcctcgccctcggtcaccgggccatagccggcgatacgccagctcagccaatcgtgcggcagacagacggcggcaatcttcttggcgttctcaggctcgttctcggccacccacgccaccttggtcagcgtgtaggaggcgacgggggaggatccgacggccttgacccagcgctgcttgccgcgggcggtcacgtcgtccggttcgtcgccctcggccggagttgcaccgagcttgtcgatcagggcggcggcctgcggggcggaactggtgtcattccagagcatcgcatcgcgaatcacgttgccctgcttgtcgagaatgaccatgccatgctgctggccgccaaccgcgagggccgcgacatcgtcaagcccgccggcctgctcggcggccttggtgaaggcctcccaccagaattccgggttgaccgaggtgccatccgggtgcttggcctgcccgaaccgaacctgttcgccggtggcggcgtccgtaatgcggacctttgttgattgagttgacgtatctacgccggcaaccagtactctcgtcatgcattcctcctcgatgagggtcgcgcttgcaagtttcggcgcgccacaaccaataagttagacgattaaactatactgtattgcagtgtatgattgcaaacggaaacacgcgagggtgcgtatctggttcaatcgtttgacgcacaatatcattgtgcgatagacggatgtgagcgcctgtgcggcgttcgagactaggggtgcaaggaggtaggagcctatggcaagtctacgcaggatcaatcaggaggatctgcgcaaccataatttgtcggtggttctcgacactttgttgcgcgcggagaaacccatgagcagggccgacttggccaaggaaacgggcctgaccaaggccacgctttcgctgttggcctcgatgctgatcgatagtggcgtggtgcaggaaggcgagccggtcgtctccaccacatatgggcggcccagcacgccgctggagattcatggcgggtccatcgccggcatcggcctgcagatcaacaccgatggctacggttgcctggcactcgatctgaacggcgacactctcggtcaggagtgggtgagtgaggatatgaccggcactgacccgtacgagatcttcgccaagctcgatgcgatgaccttcccgttggaaagccgactcaaacgacgtggctgcaaagtggtgggagccgggcttgcgctgccgggcatcgtcaccgacgacatgtggctgttggtggcccgcaatctgggttgggaaaacgtcaacctcacccggttcaacgtggtgcgccggctggatgtggtggccggcaatgaggcgaagatggccgccatcgctcagattccggggtatgccaccgaacgtgcgtccttcctgaatgtggtggatcgcacggattcctttatttacctgtctaccgatatcggcatcggcggcgcggtggtgcgtgacggcgaagtggtgatgggctcgcacggattcgccggcgagatcggccatctgtccgtggcgatggatgggccgttgtgcagctgcgggcgccacgggtgccttgaggcgtttgcgggccgtcgcgccttggtcgaggctgccggcattgccgaagatggggatgccaccagcagcgaggccatcgatacattcctccagcgttggcgtgcgggggatccagacgtggccaaagtggtcgatcaggccgctgatgcgctggtttccgccatcgcttccgccgtgaatctggtggatgtcgatacggtgctgttgggcggactgtggacgcacttcggcgacgagctggccaccgtgcttgaaggccggctgcgttcggaaattctgggatac

SEQ ID NO: 2885 - DNA, 13510 bp, Unknown
  R36_18m  MAG No. k141_39300
ggagtcggccagggatgcgcacacgtcgtccaccggaatctcatggccggcggcctgctcgctttccacccaacgggccacggcggtcttgacaccggagaaactgaaatcatacgggtgcgcggcaccggccttgccttgggtcagacccatcggcaccttgatggcgtgcgggtcgccgttctgtccgtggcggtcgatgtgcgggccgcccggatacgggaagccgagcagacgggcgactttgtcgaagcactcccccgccgcgtcatccagcgtggtgcccaccacatcgatcttgcgcggcatgtcctccacatgcagcagcgaggtgtggccgccggagacaatcagagccagcgtgtccttggggaacgggccgaactgcagctgagtgacggcgatgtgcccgatcacatggttgatgccgtaaatcggcttgttcgcagcccaggccagcgccttggcgccggacacgcccacggccaggcaaccggccagtccaggaccggcggacacggcgatggcgtccacgtccgccaacgtcatgttcgcgtcggcgagcgccttggacacgcatggcacgaaggcctcagcgtgcgcacgggaggcgatttcggggatcacgccgccgtatcgcgcgtgttcctccatggatgaggccacgacgttggagagcagttcgcggccgcgtacgatggcagtcgcggtttcgtcgcaggtggattcaatgcccagtacaaccggttcgctcatcgtgcttctccgttcttctccgtttgcttgccagtgatgtcttcagtgtccgccgatgccgtctgcggggcggcaaagcccacgaccctaggtttcaggtccaagctcatggtgtatgcgtcgatgccttcaggctggtagtagcgtttgcgcaatccaatgcgttcgaatccgaaccggtgatacagggccagcgcagggtcgttatccacacgcacttcgagcagcatgcgcgaggcgccctgacgcttcgcctcgtcgaccagtgcctgaagcaacgcagcggcgatgccttgccgctggtatgccttgcccacgccgatggtcatgagctcggcgtcctcgccgtcataccagaagccggcgtagccgcggacaaccgcctgttccacctctcccagcacatccagcagatacgtgcgggccggtgcgtccagttcctctcgcaccatgttcgcattccatgcgccgcggccgaacagttcgccttccaactgtgcgatggagcgaaccgcaagatcacgacttacggcagtgatgtcaacaatcatcgaatcaacccgtctcacgccttatcggcaccggcatggccgagcacgtgcttcagcgggttcggcacttcggcgtccggccggcgcaggtacaacggttcgaccggcgtatcgtgattacggttggcaaccagttccgcatcagtggcaaagatagcgagaccttgctccccttggtccaatacggattcatcggtgatgtcgccaagctgctcgattgcacccagcgcatccgcatatttgcgggccccatgacccacaacatccacgaccacatccacattgctgtcttctggtctaagtccgtcgcggtacgtatgaacggcatcattcacgcgctgcgcgatggatgcagggtaatcgatatccatgtcaatcagagccgtcgccacggtttcgccatcgggatcgccaacgagcgggtccgagtacaacgcaaaatagagttgcttgcggcgtgcgtcgtttacggcaagagtgagcacatggcatttatgagtatcgccgagagtgccggctttgccacggcgaatgagattccattgcacctgaggctcaagaacattatggccgataagcgtcgctcccgttgcgaaagccagtgccttggccgtaacgataccggcacgcagaccagtaaagggggctggaccggtacccacaatgactgttgcaatgtcagatgctgggaacccggcctcctcgaccgcgcgcgcgatattgacctgcagtttctccacatgggtgcgcgaatcggtctctacaatgggatcgcgccccacaatgccgaccgtcgagccgaatgaggtgtcaatcaccaacgtgcaacccatgaatcctcctagtcgtaaagcctctagagagtgtacatcgaggagtctataggcgcatggcttactgcagatcgaacgcggcccatcgcttgccgactgggacgaatgcgacggtacgagtgccgttgctggtgagttcgccgtctgatccagcggatgcggcatcggaggaatcgagaggtcgatcgatatggatttcaagtcgttctggcgccaaggcggtggccatttgttcgccccactccataagcaccaccgtgttctcgccggggtcttcaagttcttcgtccaatcccagcgattccagctcgtccaacaaacgcccgatggcgtcctgccccggcgcataggctgagccgcccagacggtaggcatccacatgcaccagatgagacggagtgccgtcggcgaaatgcccgtcgagttcgcgggcaatggtgaatgtaggagacacgatgggttcggtaatgcccagccccgccccgaagccctgggcgaatgtggttttgccggcaccaagagggcctgagagcagcaatacatcgccgccgtgtaccattccggccacgcggcggccgagctcctgcatggcctcgctggtgggagccgcaatagtgtgttcgctcataaatacccctttatcgacttttaccgacctttatgactgatgtcttcaatgcagcgttccagcgcatataccgggtcgccaccgtttgttttgctttgctcatccgcccaggcgagcatacggatgcaatgcgcgagtcctgccgaagtccagccgccaagttggcgcatcgcattcttcagcacccacggattggttttcgcttcggcctgggaaatcgtgccggcccgtaccgccgaggctttggcaatggtacggagcttcatggccaacgcgccgatcagcgcgatgggatcggtcccttgttccacagctgcacgcatcatgacgatggcttctgcggttttgccttccacggccttgtctgccacggcaaaaccggtgacctgcggattggcggtcaaatactggttgacacggtcgaggcccatcggattatcgtcaaagtcgaaacacagttgctcgcacatggcggcaagttcgccggttttgccgccgagtacggataccagctgctgtgcggccatcggttcgactctacgaccacgtttctcgaattctccgagcacgaaattgagctgtgcatccggtttcttcaaatccggcacgtcctctttgcgagcgccggctttcaccagttggtcgatgattttgcgccctttgacgccgccctcgtgttggcagatcaccacgctggagccgttcggatccttggcggcctgcttggtgtacgccaccagagcttcggcgagcttgtcgtcggcattctgcaggttgacgagtttgaccacggcaacgtcggaaagcaacgatgggctgacggcttcatcgaaggcatactggtcggccgatgtggcgtcgagttcgatgaggtcggcgtcgggccgcgccttcaacgcctgcgcgcacagtgccttggtgcgcgcgtcgttcaaatacgagtcgcctccgggcaccacggttaccggtgcattcgctgctgttttcgccatgccaccatctcgccacacaggttggacaatgacctgccggcatcacgattttgccggtgccgtcgagatagtggtattcggctgggattgcgatggttgctgcaccggataccgcattggctattcggcttgccgccgcgtaaagaggcgtctcgtctcctcacaccagagactgaggcggacgcgccaagcggaaccgaagcgcacgccagacattccggcctcataacgacggacatgctggaggcaacggctgacgaacaccagtagcatgccgataccgatttccgccgtcacaatcagcacggcgcccgtaacgccgtctttccatgggatgacggccatcgtgctgccgcccagccacaacgccacccgttccatcaccagcgtgccccatgacgatatccacgcgaatacgccggccagccatggcgtgcaccatgcgcacgtcagtgccatcaatcccgccatcgtggccaattccacgaacggtgacaccagcaggttcgccggcacggacagcaacggcaattccggttccatcaacacctgaatcggcagggtgaacaattgcgcggccacggtcatcgccatcatttcggcgatgctgtgcggcatcgctcgctcaaagacaccggccagccgccccgcaaacagcacgatacccagtacggcggccgaagacaaggcgaatccgtagctggccgacatatccgggttcaccgccaatacaccgattatcgtccagcacagggcgctcaacgcttgcgtacgccgtcccatcgcatacgccaacgcacctatcaatcccatgatgaacgcgcgggtgaccgaatcactggggaacatcgccaatgccagcagcgcatatactccagagaccagcaacgccgtcagccgccgatcaagcagcatccacatgcataaccgacgcaccagtcctgccaccagtacgaagtggccgccggatacggccatgaggtgcatgatgccggaccggcggaactgattttccaacgtttgcgcatacgtgctgttgaccggcatcggaccggcatcgccgccgatataatcctggccaagcacacccatcgtcaatcccggcaccaacacacgcccctgatcggacaattgtccggtcacggtgaaaaacgcctcctgcatatgtgcgatcgcggcgagatgccacggcggagcccgcacctgcgctaccggctgttttccttccaagagcagccatagcggtatgcgtccatatcgcgcttgctgcaatacgcccgtcaacagatagaccgcgcctcgacgcaactgcccacaatacgattcatcggcgtatacgcgcacggcgaccgtggaacgtacgtccgcgccatccacagtgatgccgctcagccgtatgtccgtctgacaatcgtatgtgcgttggtccgaagcgatcacgggcgtcgtcaccgtggccatgacttcgtggtatgaactggattggcgagcttgtgcggaggcaggatcatgccaggcaatggtgtccgacgcgattgccgccatactgccgatgcacgccaccgcaacgcatacggtcaatgttcccgtccacctgatccgcaggcggaaagacaccacgatcatcgccgccacggcagcacatgacgccactgttataggcaatattcgtgtgacaggccattccatgccgattatggtggcgtcaatgccagctccggcatcggcctttgcctgacctgtgccgagtccatcagacatcctccatgcgaataatgcgtgcgctcccagactcgccgcccacatcactatggcgatcggcagcatcctccaatcgcggctcccctgctcgcgcagtatccgatccctgctcatccgaccgtcacctgccctcgcatggtctccaacgtcttggagccgatgcctttgacatccagcagctgatcgactgatgcatacccgccaatcgccgtgcgatgatcgatgatccgctgagcggtaaccggcccaatacctttgatggattgcaattcctcaacggtggccgtgttgaggttgatgagaccatgcgtggaagcgccggcatcgctgccgtccgtctgcatgtgcggagattgcgtggtatccgattcggggttcgctgtggcatcggaatgctccgactgctgcggatccgtgcgtttctcgtccgtggtgttctgcgatggcatcgtctgatctccagcggagccgcccgtggtctgcatggcggtcggttgagacagcatggccatattcatcgactgctggaccagcaatgccaagctgatgccaagggcgacgatcagcagcaatatcacggccaaggcatgcccaatggtgaacgacaatcgcggctgatcccgggtgagtctggctgattctccgacggcatcggcggaacgtacgccaatcagatccgataacgcacgtttgtcacgggtcgcctgccgcaggccgctctgcgccctttggggcgggtggccggccggacgaatccgtgcatggccgggaggcggcggaggcgtcgtgggccgttccactcgcggttggggcatggcttcgctctgcctgctgaatgcgcgcaaacggttggcggcatggtctgcgcgatggttatgagaaacgcccatgcatccacgctgatggattcatgggcgtttgtccagctgaaacggggtatgtggttctagcttatgaagttatccacaattgaggtggggcggttgacgctcccctcagtctcgcgacgcgagcggctcccctcaaagaggggagcctaacccgcaacaagtcactccgcggggacgatggagacgatcttcggggccttgacgatcaccttgcgcggctccttgccgccgagacggtcggcgacggcggccagcgcctgccgttcgaggtcggccggatcgatgtcgaccggcacttcgagcttggcgcgcaccttgcccttgatctgcaccacggcggtcacggtgtcgtggcccacgtaacgctcgtcggccaccggccacggctcggcggacagggactcggggtggcccagcttgctccacatctcctcgcagatatgcggggcgatcggggcgagcatcaggaccaacggctccactgcggcacgcggcacggccttcagacctgtcagatggttgttgagcacgatgagcttggcaatggcggtgttcggacgcatgccttccatttccgcggtcacttcggcgatcgtgttgttgagcagtttcagtgtcttctcatcgggcgcgtcctcggtcacgtgggcctggccggtggtctcgtccaccacgttgcgccacagacgctgcaggaagcgcatgccgccgaccacgttgcgggtgttccacgggcgggattcgtccagcgggcccatgctcatctcgtacaggcggaaggtgtcggcgccatagttctcgtacatgtagtccggagtcacgatgttcttgagggacttgcccatcttgccgaattcgcggttggcgtgttcgccgttccaggtgaacgtcggctcgccggaggcgtcggccggcccttccacgacctcgtccgccggcacgtactggccgcggtcgtcggtataggcgtaggcctggatcatgccctggttgaacagcttgtggaacggctcggccgaatccacatagcccagatcgaagagcaccttgtgccagaaacgggagtagagcaggtggagcacggcgtgttcgacgccgccgatgtacaggtccacaccgccttcgtcacccgagtacttgttgtggttcgggcccatccagtagtcgaactcgtccttctccaccatgtgcttggtgtcggtcgggtcgatgtaacgcatgtagtaccagcaggagccggcccagttcggcatggtgttggtgtcgcggtagtaggtcttcttgccgtcgcccaagtcgagctcgaccttgacccagtcctcgttgcggctcagcggcgcctccgggttggactcggcgtccatcgggtcgaaggtgcgcggctcgtagtcgggcacgtcgggcaggttgatcggcaaagccgagtccggcagcaggtgcggggtgccgtcctcgccatagacgatcgggaagggctcgccccagtagcgctggcgggagaacagccagtcgcgcagacggtagcttacggtgcccttgcccacgccggcggattcgagccaggcgttgaccttggcgatggcatcgtccacgcgcaggccgtcgagcgacagcgcgtcgcccttggcgtacgtggattcgacgtgggagttgatcacgatgccgtcatgggagacgaacggcgccttgccttcgtagttggccaagtcgtcgccggaatccggcagaggcttgacggtgtagatgaccggcagaccgaacttcacggcaaagtcgtaatcgcgctggtcgccaccaggcacggccataatggcaccggtgccgtagtccatcagcacgtagtcggcagtgaacagcgggagcttcgcgccggtgatcgggttggtggcgtacaggccggtgaacagacctgtcttctcaccgccctcgtccacgcggtccttggcggtcttggcttcggcggcgagcctgtaggccttcaccgcctcgaccgggttggcatagccgcccttccagtcttcgggtacatcggccggccattcggcgggcacgttctccagcaggtgatgttccggggaaacaacggcgaacgtggtgccgaacagcgtgtcgggacgggtggtgtagatttccatgtccttgtcaccgtcggcagtggccacggtgaagtgcacggaggcaccatgggattcaccgatccagttgcgctgcatgagcttgaccttctcaggccagttgatgccgtcgaggtcggcgatgaggcggtggccgtacttggtgatgcgcatggaccactggcgtagctcacgctggaagaccgggaagttgccacgctcggacttgccttcggcggtgacctcctcgttggccagcacggtgcccagacccgggcaccagttgaccggggacttggagatgtaggccaggcggaagtcgttcaagatatcctgctgctcggcgtcagtgaggtcggaccactgcttgccatcggactcgtggcccggaatggccttttcgccggattcgaacttggccacgagctcggcgatcgggcgtgcggagcccttggagccggacgggttggtggcgtcctcgtcgtaccaggaatcgtagatgcgcgagaagatccattgggtccagcgcacgtagccggggtcgatggtggcgaacgtacgacggttgtcaaagctcaggcccatacggtgcagctggcggctcatgttggcgatattcgcctcggtggtcacgcgcgggtgctggccggtctggactgcgtactgttcggcaggcaggccgaaggcgtcgtaacccatggcgtgcaggacgttctcgcccttcatgcggtggtagcggctcgtcacgtcggaggccaggtagcccagcgggtggcccacatgcagacccttgccggaggggtacgggaacatgtccatggcgaagtaggcggtgcgcccctcggcgttgcggcccttgccgtccttcaaatcgccgttgacgttggccgcccagaaggtgccttgctcatcccagatcttctgccacttgttttcgatgtcctgcgccagtgcggcgttgtagcggaagttgggctcttcggtttgcgtgctcttctcgttgtcactcataaatcagcaaggtagcctcgcaactggacacgtcgtcaatcgttattcagtatccgagacgatggctttggggtcgccgttcagcgaaaccgtgagctttgtttggcttgtgaacgtatccttggcggccgtccagctgccatcctcaaccatgtcttccaatgcttccgcgattttctgcgccaattggctggtgccttgactcacggcgatgccataactgacctcgcccttgtccgcaatcacgtccatatactggggcccgttggccgcttgaagaccggaaagcaccgccgtatcggaggctatggcatccgccgaccctacttgcacggccgtgacgcactgcgcataactgctacgctcctgaatccgagcctgcgggtggttgccgcggaagatgccgactgtctcgtcacctttcactgcgcacaccgtgccgtcgcctacgtcgcccaccgaacctgcgtcattggtgaatcggccacgctcatccgacctgaccagcaaaccgacgctggtcgtgaggtatggtccggcaaaatcaacgatcgcgctggacccatcggtgataggccaagaggcgacgaccatgtcgacctgtccattgtccagcatggagcgccggttttcggggcgaacctgcttgaagacgatctgcttgttcgcatagccgagtttggcggccacgtatttggcgatggtgatgtcgaagccctggtatgtgccgtcatgccatgctcccaccgatggttcgtcggctgcgaccccaatggcgatggtgggcccctccggcgctccggagacggtggtgacttgaatttggccgcaaccggccagaccagataatggcaatatcacgccaaaggccgcggcgaatcctgccatcagccgggagcgaaatccgcgccgcatcgggcggcgagcgcggagcatgctacggctgacgaacgatgaccagtggtgcataaccgtcaaacgccttacttgaacatgcgcgaacgtgtgaggaaccaggcgaccacaccggaaagcaccatggagatcacgatgatgagcaggaagccccaaggcttgtcggtgaacggcatgcccatcatgccgccgtcgaagttcatgccgtacatcgagaaaatcagcgtcgggatggacagggtgatggagatgatggtgaagatgcgcatcacgttgttcaggttgttggacacgatcgaggcgaaggcgtcggtcatgttcgcaagaacgccgctgtagatgttggccatctcgatggcctgcttgttttcggtgatgacgtcgtcgagcagatcctcatcgtccggatactgcttgatgcgctgcagggtggtgagcttctccatcacgatctcgttcgatttcagcgatgtggtgaagtacaccaaggtcttgctcagttccatgagcatcacgatctcgcggttctgcatggagtggcgcagcttcagttcaagcttgtcgctttcgcggtcgatgatgcgcaggtaacgcaggtacatcgtggcgttgcggtacaggatctgcaggatgaagcgcgaacgcatgaaggtgttgaagcctcggatcgtgccttccatgaacgggtggagcacgggcgtgtcctgcatgcagacggtgatgatgaggttttcggtgacgatgatcgacagcgggatggtctcgtaccagtcgcgtccgccacgctcttccacggtgggaatgtcgacgatgatcatcgtgtaatcgtcttcgacgtctacacgtgaacgttcctcgtcatccaaaggggcacgcaggtcggccaggtcgatgccggtttgcgaggcgacggtggcgagctccacatcagtgggttcgctcaaacataaccaggagccgttttccggtttctcgatctgctccacttggccattgattgagctgaagattctcagcatgtcgcctcacccgccttccgcgctttcctactgttctatcgctgtacggttccaaaccgagattagtctagacccaccgttcgaatttgcgagcggggtttcgcatagcgaccgtcaccagacgattggctgccaactcggcatgtgcggtcctcgcagatcggtcggcccgttctcccagtcggcgctgtcggcgatggcgggagccttgttgtattcctccaactcccacaggggctgttcggcggggatgccgttgacgctgtggcgcactttgagccggcaccagcaggcgttgcgcatgccgccgagtgcgttcatgccgtccgggtcgagttcgagcaggttggagatggtggcggtaatccatgagccatgggtgacgagcatcagcgtggtgggcatgctgtctgaataggcggagtcgatgaccagtgcgcgcacggcatcggcacctcgctggcccacggcggcacggctttccacaccatgcttggtttcgcccccggtgtgctgtttccaagaggcgtagtcgtcggctgccacggctttgatttcggcgcgggtcatgccttcccactcgccgaagctgcgttcacgcagtcgttggtcacaggtgaccggcaatcccaaaatatcggcgaaggcgtgtgcggtctgttgggcacggaacaggtcggaggtcatcaccaccatgcgccggccggcggcgggggcctcctcgaactggcgcgtatcagtgcgttcggcggcgtcaggaccgggctgggcgatggcttcgggatgctcggcaagccggttcaccttggcccagtagtaccgtgaagcgagcgcgaatccggtctggtcgacctgccattggcctacgatgtcgagcggcacatcgatctggccttgcaagcgatgttcgagattgtattgcgtacggccatggcgcagcatcatcacttcatcgatcatcggttttcgccacctcgttctcttgcggttttttcatactcatctcagcacaacccctagaatggcggcatggagatttctgagtcgacttgggcgttcatcgccaaacaccgccgtgaagatgtgcgtgatgtggccttgcacgccaagcatgatggcgacgtggatgtgccgttcgcgctggagcaaattgccggctggcagcgcgcttcgctcaagctacctgactgggcgtcccatgatgggctgattttcccgccgcaagtcccaatggaacaatgttccagccagttcacggctcaatacaaagcccggttagcacagcgattgttggacggggaagcagtcgacgacgccgacgattccccgacatccctagtcgatctgaccggcggtttcggcgtcgacttttcttacatgtcccgagtgtttgaccatgccatatatgtggaacaacaatccattttatgtggtatcgctcgccataatttcccgatactcggccttggccacgccgaagtcatcaatgatgattcaacagcagtgcttgacacgcttggccgagtctccatgatcttcctcgatccggcccgccgtgacgatcatggctcgcgtacctacgcgattgccgattgcacgccggatgtgctgaccctgaaggatacgctgctggccaaggcaccgacggtcatggtcaagctctcccccatgctcgactggcataagaccgtcgccgatttcgccggcgcggtgcatgaggtgcatatcgtctccaccgggaatgaatgcaaggaattgttgttggtgttggggcgcggccgttgcgcctcaccgctcgtggtatgcgtcaatgacgggcaggtgctgtcgtacaaggccggcgataacagcgacaatcacacccctatcagcgattctgccttagttgcatgcaatacctgtaataccgaggatctcccggctgaggaaagcgcgaacggcttcgattcctcgcattggaagtacctttacgaacccaacgcctcaatcatgaaggccgggtgctttgatgttctcgaacagcgcttcgtcgtgcatcac

SEQ ID NO: 2886 - DNA, 3972 bp, Unknown
  R36_18m  MAG No. k141_39567
catggtgtcggcgaggaacacgcgatcggccaccggggtgtgcgggttgccggccacagcctccaaaagtgcggtggcgcgggagaacgccgcctgatcggcacggtcaggcaacggccgacgggcgaattcggacagttcagccgggtcggtggaatggcgcagacgctcgtatgtagcggtcagcggttcgaaatccaccggagcggcggactcggctgcggactgcgcgccttggtcctgctgctgggcgtccgtgtcggttgcagtctcggccgcggcctcggttgcggcctcggtgggctgggtccgctggctggtggtgttctcgtcggtcatgatgcccagcttagtcatacaggcgtcacgcgagcggaaccggaatgttgaccatgtcaatcggagccggcaccacagcggcattgaacgcttcccgcacacgctcctcgaatcgcgcgcaatcatcctgcggcaccaccgcggtcaactcgacgttcaccgcatacgattcatcctcctgactgccaccaagctgcgccaggatctgctggaatcgggccaactgcgggtattcgaggcgaacccggtatcgcttggcggtcatgatgcgggcggcgcgggcggctttcatcgccaatgatgcggcggatgagtacgcgcggaccagaccaccggagcccagcagaataccaccgaaatatctggtgacggcaaccacgcaatcggtggtgccggactgcttgagtacgtcgagaatcggcttgccggcggtaccggacggctcgccgtcatcgctcatgcgttcggacagtcgcccatccgcgcctccgcacacggcggcatacgccacgtgtcgggctttcggatgctgctcgcggatcgcggccacgaacgcgagcgcctcgtcgagcgtatcgacatgggcagcgtcgccgatgaattcggactttttttcgacgagcgaatcgtgggcgggatcgtcggacgtgttgagaatcgtctgcataagcgtgttccggtggtcggctgactgggtgttcgattgagcgcgaggctagacaggactatcagtgttcggagacgacgacgttatagtcctcgccggcgaagtaggcggtcaggcaggcgatcatctggcgggtgagctccttgaacgcgccgtcggtacgccagccgacgtgcggggtcaggacgatgccgggcacatggcagatggcgtcgtcggcggtcagcggctcgtggtcgaacacgtcgagtgcggcgggaacatcgcccttttgcagtcgggcaagcagcgcaccggattcgatgacttcggagcgggcggtgttgatgaacagggtgccgggcttcacatgcgcaaggttctcggcggtgacgatgccgcgagtggcgttgttgagcggcagatggacggagatgacgtcgctggtttcgatgagctcgttgagatcgtcgaccggagtggcgccggagcgttcgaaatgctcgggcggcacatgcgaattccatgcggcgacctccatgccgaaggcgcgggcgatgccggccacggtggcgccgatgccgcccagtccgatgatgcccatgcgacggccggcgagttgcagtccatcgccgccggcccacgcccagttgccggccttgacatccttatcgagttggccaacgcggcggatgagctcgaacaggagggcgaaggtgtgctcggccacggcgtgatcgccataatgttcggcgttgcagacgcggatcttcagctcgcgcgccttatcgagattgatgtagctggcgacgccggtaccgcagaacacgatgcacttgacgtgcccctgctcgctgatggtgcgcagcagatcatccgaaatgtggtagccgcccaccagcagggcgtcggcatccttcagacgctcggctatggtcgcctcgtcggacgtgaattcctcgaacatacgcacgcgggcaacgtcgtggagcgcggggaactgggccttgatgggctcgatcatcgcgtcgagcacggacggcatcacgacgaggggcagatcggtgcgttcgctttgggtttcgtaaatctcggtcatgggctccacattaggaggccgacgggaaaagcgtcaccttgcggcttcccctccttgagaccaagccgagcaactattgctttgccgcctgctcctgcgtgatgttccattccttgacgacgttctggtccgcgcccatcgaatagatgacatcccagatgcgttggcgtatctgagcgtcgtaggcttcgtcccaacatgtgcctatgggatggtcgctggatatcgggcaccattggtagttgccttgatgcacgttggcggtaggcacccagtcgatgcggttgacgcgccacgaccccttgacgcccttcttgccggcgaactggatgcgtgcggtcacaccctggttgttgaccaaggtttccggcgtgttcgccgactcggtgacggtgttgcccagaccgtagacaatccacgtgccgttatagttctcgatgggctgcgcacaatggcagccggcaccgtagataacgtcgaaggcaccagtgtcggcaagctcatgggcttccgaaatctgccaggaatcggcgtaatcaaggtattcctgcaccgagtgcatggcgatggccaccacatcggcaccttgctcgcgggccttgttggccttgtctaccgcgcgctggatgtcgctgccgtgattcgggtcgccgtcttcgcgcagacgatccacctgccagtcctcgtcggcggtcatgccgttgagggagaccgtgccggtgaccagacccagcttgccgccgccggtcggggaatcgatgactaacggtttggtggagtcggcttcggttttgtacgagccggtctgggcgatgccatcggcctcaagcgtgtcccacagacgggcgatgccatccgccccctgatcccaggaatggttggtggcgtgtgtgcaggcgttgtatcccacgttgcgggcggcatccgccacttccggcggaatgttgaagatcgggtacgcggcatatgggccgccgcgctgggcgatcggggtttcgaattcgcacacggcgatgtccgaagcctgaatgtactgcttcatcggcgcgaacagcgggtcgaagttgaaggcggtgccatccgtggcgttggggttcgggccttggaaatggctccacaatccctcatggaacaacaaatcgccgttgaccagcatggcgatgcagtccgtatccgggcaatccggtgaattgccgtgatgttcggtcaccggtttgggcgtgttcttcgctttattcaacgcgacgtccgacactccggcgcgtgcggggccattgccgtccgtgcgatgggttgcgaaccatgcgccgatgcccagcgtaacggcgagcgtgatcacgaacacgataatcagcgccgcacggttggttcgtgtcgagttggagcgatgttgcccctgcccagcgatatggctcatctttgcccgcccttcggaactcttcttctctctctagtgtaccgcccatctcagtcaaacactgcggggaggaaggcgatgggcaagcgattggacaagcgacataaaccggttaatcttcaatcaccattcacgaacaccacgcaaaagtctcacttagtggacattcttctttcgtttgttagcctttccccgaggtgccgcactcgttcacccgctaaaatggcggtttggaggcggacggacaatggcgtacctccgactccgcttaccacaagcggagcccgaccgtcctcggttatttcggttatttctagcgacacattccccggaaagtttcgcaaaacagacccccaagcaacccactagaaacacattcccaggaatgcgtcgcaaaacagatatccggacaacccaccagaaccgtattcccggggttcgaatccctctgactccgcgaagtgcgaacag

SEQ ID NO: 2887 - DNA, 3744 bp, Unknown
  R36_18m  MAG No. k141_39901
cgttggcgctacctcaaggatctgaccggcattaccgatgagaaaagtctgctgaagtcctatgacaagcgcacccagtggagcgtgaagcgtgcccaatcgatgggtgtgcacgtgcgtgagctgtcggacgacgagctgggggtattcgcacgaatcgagcagcaaaccgctgaacgccgtagcttcgaataccgtggcgaagcatatttccaccgtttcaaggaagcgttcggcagcaaagcgcattttatggttgccgagatccacatcgacgaatatgtagcggacatgacggccaagcgtgaagcgctttcggccaaggtggcggcattgaccgccaaaaacgccgaacaccccaccaccaaaaccgaacgtcagctgggggaggagacccgcaatctggcggcagccgaaaagcgcctgaacgaggcggccgagttcgccaaagacggggatgtgctgccggctgcggcatcactattcgtggagcatccgcgcgaggtcatctacctgttctccggtagcgtcgagcagtacaagcccttctacgcctccgcgctgattcagcatgaagcgatgctgcatttctgcgtggaacacgggctgtctcgctacaacttctacggcatcgacggcgtctttgatgatcccgatgacgaggggcgtggtgtactggagttcaagcagggcttcaacggatatgtcgaggaacttccgggcgagttcgtgctgccggtcaaaccggtcgcctatgccatgaagcaatttgcgcacaagctgctgtcgcggtaaacggacgcagcacacaggccattccagagcccagagtaacgatcagagtaacgacaagtaagaaggttcgattatgacgcaatccgatgcaggcgtcgcctcgctcacccctaccaagatcactcctgccgagctggatgcgttctccgcagctcaagtgcaaggtagtttccagcagacctcgcagatggccgccatgggtgcgttcaacggtccggtggactatgtgggtgtcaagcgcggtgacaagctgattgccgcctgctacgtggtgtacacgcggtcccgtttcggtttggaaggctcggtctggtgcggaccgctgtgcgattatgacaatccacaggtggttgaggcgatgaccgaagccttgcgtcgttcggccaaggcccatcacgccatcagcgtatcctgctggccggccgcagtctaccgtctgcatgatctggacggcaagccgaccagcgacccggacaccacgatgatggacaacatggcccgcttcggttggaaacatggcggcttcaccgtgggctacgaatccgtggtgaaccgctggaacttcgtcaaggggcttgacggcattcatgacgagaaggaactgctggcctcgttctccaagtaccgccgtaagaacatccgcatcgcccaggattccggtctgcgcgtgcgccggctggaacgcggcgaactgagcactttcgtcaagctgtgcgatatgagcgccgcacgtcaaggcttcaagagccgcgatctggcctactatgagcgtctgttcgataccttcggcgacctgatcgagttcaaggtggtcgaaacccatttcgacgaatatctggacaccctgcaatccaagctgaatgcggcctccaaagacaagcgcaacctcgaacgcctgctccagcgcgcgcaacagcagccggaaggcacggccaagaagggtgcttccgacccggcaacgctggaaaagcgcatcgccaccgcagacaagaagatcacggcgctggaaaagaccatcggcgaagtcaatggcatcatcgcctcggacggcccggtcattccggtggaagccggtgtctacttctggcatccgaacgaggtcgtctgcctgtccagcggcgaggacgatcgtttcatggattactacccgtcttccctaatccacttcgaggcgatgcttgactgcatcgcccgtggcgtggagcgcttcaacttctacggcatttccggcattttcgacgccaacgatccttcctacggcgtctggcagttcaagactcgcttcggcggattcgtggaagagcttccgggcaagttcacgctgccggtggacggactgcgcttcggtgtatccgaagccgcacacaagctgctgcatcgctgacaaacagtggcgagcacggacacagaaataaggcacaggtgacgacgagatgagcgcgactgtgaatcgaacagatacgacgtatacgtttggcgtgattacgcccgaagagttcgaccggctttccgaagccacaagccagggcagctttcagcaatggtccgggcaggtccgtcttgccaagattcgtgggcatgaagccgaatgcgttggcgtgtgcgacgcatccggcaatctggtaaccggctgcgtgattctgtacctcaatggtcgtttcggtgcagatggctccgtatatttcggccccatcggcattagcgatgatccggctctgctatggaccatgaccgaggcgattcgtgaatcggcccgtcgccaccatgctgtttccgtggcatgctggcctaacgtcgcctaccgtctgtattcctcggacggacagcccgacggcgagccgaacgatgcactgctgaccggattcgccgatgcaggctgggcgcatggcggattccataccggttatgacgtggtctgccagtggatgtacgtcaaggatctcaccggcatcaccaacggcaaggaactgctggcatcattcggcaaacgcgctcaatggagcgtcaagcgggcgcagtcgatgggtgtgcacgttcgcgaaatcggccccgacgagttcgacgtgttcgccgatatcgaacggcggaccggtgaacgccgcgggttcgcgacgcgcggcgcggactatttccgccagttcaagcaggcgtatggcgcggatgcgcatttcatgctcgcggaaatccacatcgccgaatatgtggcggatatgaccgccaagcgcgaggcattgcagactaaggtcgcacagctgcaggcgaaatacgatgaacgtccgaccacgcgcatcgaacgtcagctgggggaggaatcgcgcaatctcgcggccgccgacaagcgtctggctgaggtggagggatatgccaagaagggcgatgtgctgccggcagcggcttcaatgttcgtcagtcaccccaatgaggtggtctatcagtattccggttcgttggaggagtacaagccgttctacgcctcggcgctgattcagtacgaagcgatgctgcacctgtgtgtggaacagggtgtgagccgctacaacttctacggcatttccggcgtgttcgacgatccgaacgacgagggccgcggcgtgctggaattcaagcagggcttcaacggctacgtcgagcagatggtaggcaaattcacgttgccggtggacaagttccgcttcggcgtgagcaatctggcgcacaagctgctgcgccggtagcagctggcggtcgggggacgagcctatgtgggctgcgtctcgtttgaccgtgcacccgccgtgtgcctactcgcgcatttgctcacacgcccaacagcacgtgagcaaatgccatcatcaccagtgaaatcatcgcggtgattgccagcgagaagccggccagtttggcgttgccgagtactttgtcggtgaacagcgtggagaaaatggcgattggagccaacgcgcagatcac

SEQ ID NO: 2888 - DNA, 5404 bp, Unknown
  R36_18m  MAG No. k141_40069
cgaaccgttcacgattcatgccggccgctgggttctcgaatcccgtctcctccgccgggaatttcgcgaacaagtcaaacgcgcgttcctggtccgccagccatgtctcaatcagccgcattggtcacactcctcctgttggcacagcaaaccacactactactgctcggccaacggccgcaagccttatctaattggccattcctcgacagtaatgcgacgtacgagctcatcacgatatacgggttataggaactaaacgtggtgtttatgttccgggtttggccttgtggcagtaggcgtgtcggggtgcttttaatgtggcgtcgcattaaagggccgtggtttggccgtccctcgcctgttccgcagacgcatccaatggtgctggaacatccggcccgagatcccgcctgtcactgcgaggcatcggactgtctaataccttatacattgtagccaatccaacacgagcgtggaacagctgcgctcggacgtcaaccggtacgtctggtggtacaaccaccaacggctccactcgacccttgattacatgagtcccgtggagttcgccaaacaaggaaagaccctctagaaacagtccaacacaccgttgccaatccactgttatccgacgtcgggaccggcagcatatcgtcatggaaccgttccgacaacgccgatgattacgagcaggtcatcggttttctccaactcggcgtcaccgtcaccgcgatattactgttgtcggtatccgccatcggcatgatcgacatcggattggccggcatcgagcaacgctcgcacgagctgctcatccgccgcgcactgggcgcgaccagagccagcatagccatacaggtcatcggctcgtccgtgctgctcggcctcatcatcgccttcgccgcggtgctcatctccgcggtgctggtctgggcaattccgtggatgatgcccgccgactcgccgctggaaccgcccgcatacccatatacggcggcgatgattgcggcctgtgcgtccatcgtcacctcgcttgtcggctctcttgccccggccatcaaagccatacggctgcaacccgcgctggcgttgcgatgaaccagaagccattctgaacaagcccgccgacagctggatggtcggcattccgatcatcgattgcatccggtaaacaatccgcttgcgggatgtgtaccatggtcgagatgccgcaaccgcagaatgttgactattagcatacaaatacatactattgtcttacgtaatgatgttggaggttaatgtgagcatggcatccgtcacagtccgcgtggatgcggacaccaagcagaaagccgcaaacattgccgaggatctcggtctggacttgtcttcggtcacccgcgccttctacaagcagattgtccgggagaggcgcattcccctaaacctttcctatacgaccgtgccgcctgaaaccatggaggcccttgacgaggcgaagaacaggctcgccgacggcaaacctcgtttcaacagtgccgatgagatgttcgattcgttgggaatctgatcaatgctcaaaccggattacacagcggcattccagcgagatatcaagaaactcaaacgcaagcacactgatttacgcccgctgaaagaagtcattcgtctggttcttgaggacacggcggactccaaggaagtattgaggcgtaggcatcgcgcccacacacttaccggtgatttaaacggcgtattggaatgccacatcggcaatgccggcgactggctgcttctatggattcgcgatgatggtaccgccatgttcatgcgaaccggcagccatgacgaactgttgggcaaatagcgggtttacatcctgctttgaaccggccgatggcgatttgagtgcggcagtcggcccgtgcccgcagaagccggcatcgcctcgcagcgtgccggtctgcaatcgctgatcgacgaggaggagtccaggctcgaagccccgggagtcaccggcgacaacctgctcgccgaaccacaccggccgctcacgccggagaccatgcgactgctgtcgggcttgccggcggaactgtacgcgaacatcgccgaacacgccgaccggggcgaatggtacgccatctgcgtcaccttcgacacggacgccatccacgtctccgccagcgacaccaccacacccgccgacatgggactcggcctgggcagcggcctcgaccgctaccggaccatcatcgaaacacacggcggcaccttccaaacccacaccgaacaagcccactggcagctggatgtcagcattcctgccaagaactagccaggcttgggactcggtaatgcacgcgcgcaacgatttcttctgtgagtttctgttcttctacacaacttaatccgatatgccttccgggcgtgtcgttgctcgtgtcgtgaaccgtcggttcgtttctagctacatacatcaatgaacgtttgtttacgatgtgccgtggaaggagccgcatacgcaggatgacatgacctcgcccggtggggcggtgatgcgcgacgaggatctgctcgcgcgggtcgcctccggggacgaacgcgccttcgagaccctgtatgggcgtcacgctgcggcggtgcgggcgctcgtgcgcgtgcgcgtgccggatgccggcacggccgaggaggtgtgcgccgacgtctggctgggctgctggcggtcggcgagggcgttccgtggtgatgcgaaggtgctgtcctggctgctgggcatcgcgaaacggcagatctacatgcgcgtgcggcgcgtacgcccgaatgtgaccgcgttggacgatgcgcccgaaccgcgtgacgatggaccgagtccggagacggccgtgctgtccgaagcgggcgtggatgatctgatggcgttgttgcgccggctgcccgtcgaactggtggagacggccacgttggcgtggctgcacggcctgtcgtaccggcagatcgccgatttgtcggacgtgccggaaggcacggtcaaatcccgtatctcgcgtgcgcgccgtctgctgcgcgcgcaactcgaccgctaaaacgatgcggatggaaaggaacggtgaatcctgatgaccgatcatcttgacgaaacgatcgaccgtttgacggacgagacgcccgacgggcgtctgcttgcggcattggacgccgtggaacgatcccgttcgggagacgcgcctcccgctgcggcggtgatggcgcgcatccgcgcgtcgcggtccccgttggacggaccggcatggtcgtgggcgcgcagtctgcggttgttcatgctgctgctgggccggcagtcgcgggtggtgccgtggcaggtggtgccggccacactggcgttgatggcgttcgccggattgggggcgcggttcttcgcggtcggctggagtgcgacgatcgtgtcccatgcgttctgctcgatggtgctggccggcgtgctgctgagcgtgacgatggcgttcggggattcccgcgcggacatgatctcgtcggccaccccgttgggtacgggggcggtcacgctggtccggctggtgttcatactcgcctgcgacgtcgtgttcggcctgatggtgaccaccgtgatgggcgcgcaggggtatgggacattcggcgtactgctggtcggatggctgtcgcccctgctgctggtcgccggcgtgggcgcgatgctcgcgatccgtttctcctcgggcgtcggcttcggcgtcggcctgctgttgattatcgcaatccggctgaatccgttcgggttcgcgggtctggcggacgcaagccggtccggtgcagcacaatcctccggacagctaggtctggccgtcgcggggctgatggcctgtgtgggggcggtggcgctggccggacgattgtccggggcgcgcatggcggccgcgaccgtctgaccgactcgaagccgataactcatctggtcgttcggcatgtcgcgtgaacttcaggacaggcggccgctacctacttggtgacgaacaaaaagaatgaccgtcaacttcatcggacttcaaggagggtcggcatgacgggaatgattcgcgctcaggcaaggcgcatcggcatgggattgctggcaatgcccgtggcctgtgggattgcggtggcggcagccggcgtcatggtatccggcgtgtggtcgcgtacgcaaacattgatggtggtgaactgggtcgcgcagctgatggtgatcggctcgggcgtgtgcgtggcggtcgcattgaccggtgacccgctggtcgaggcgagcgagtccacgcccgtgggttggaggcgcgtgcaaaccacacggttcgcgctcacggctgtatccactcttgtgggtgccgtgcttatgttcgcgccgttgcatgtattgggcctatggccgcaggatatgggatggataagtctgatcgcgccggccggcgcgatactggtcgtgggcctggccgggttcgcggccgccgcatggtccgcgtccgcacaggccacggtcatggcggtggtcgccgtatggatgttcctcgccctgctgtgggacccgtacgtgctcgatccggtcacgcaacgcggcatcccaatcgccgtctccatgatcgccgtagtgttcgcgtggcgtctgctgggcgacgaggaacgcaacgtgacgctcgcaaggagaagcatatgagtccttgcaccggtttccggcatctgacccgcgtccacatgatcatcgtgtggcggcaacgttcattatgggtcgcggctgtcccgctggccttgctcgcggttctgctgggcgtgatctccccggcaggaccgcatgaccacggtgcgggcgatttggcgttcatggccaaggcgatggccatgttcatgccgatcgcctacatggccgcgttcaccgacttccacacgcggcactcccgacttggcattggtcaattggaggattccacgcccatccccgcgcccatgctggccgcggctcgcacgctcggcgcgtttctgatcctcatcaccccgtcgctcctgctgctggagtgcgccggcgtcgtccagaccctgcacggctcgtggcgggccataccacaggcattggccgccggactcgcgatcaccgggccggccgtgctgaccgcgatgagcctgtcctcgctgctcggcgcgatcctgcccatgatcgtcgcgcgcatcaccggcgtgctcgcatggttcgcgctcgtgttctcctcgccgatgctgcccgtgccgaccgtcaacggcaccatcctcaacgtgatcggcgacgccgtcggcgccggatggttcgggctcggccccgtctacccggccacgggaggcatcctcgcggtcaccggcacgcccgccaacgcggccatatccctgatcgcgcagctcg

SEQ ID NO: 2889 - DNA, 4915 bp, Unknown
  R36_18m  MAG No. k141_40151
ggcggggctggcgtggagacggtcagcgataagctgcttgaacacgctccagcaatagacggtaccgattgggatatgaatcagcagtgcgggaataatcgcgctggtccaacgattctcggtaaaccttgccatatatggacggatcctttcgtaactggtgtacgatgacctgccgacccgaacgagagtcgtatcgcccatatccacgcacatcacgacggcatgcccccgtgaaccatccgggctgcacgaatcgaatcaaatcgaatcgtgcgaactgcgaacaattcgctaaacatccttggtgtgcatttcatcggcgctgctggctcttgtcgacgccgacaaacagaactataacgctgttatggggttgctgtggctggtttctgtggtcggaagctatgagctttctcacatcgaaaacagttatatgacggtatcggcgtgattgatacgtgacgtctgcccgtggacgcggcatatccctctcggaaaacaatgactccgtcatgtccatttcttggtttgacatgttttcgtttgcagcgtcggtgctcaccacggtgaccgcggcgttcgagtcgccgggcagggcctcgaccgagggtctcatcctcggctgagatgtgggcggtactatggattcttatcgataaggttcgtgatatgcggagatggtaacgatggtgaccttaaaggatgtcggcgaactggccggagtgaccgccaccaccgcctccgcggccctgcgaggcaaggattacgtcaagcccgaaaccacgcaacgcgtgtgtgacgccgcccgcaaactcggctacaaaatcaacctgtctggccggtccctgcgttctgggcggtccgataccatcaccttccttacctcgggcctcgagggcgactatttctcccatctggccatgtgtgtggctgaggaagtgcacaagcgcgactcgcacatgctcatcgaactgtcccggtatcttaccgacgacaacgatctgtcgtacacgttttcggacggcatcatcgccatcaatgcgccacgtgcggtcgatatcctgaagcggcacccggccgtcatgctggaaaactacgacaccagcctgcccatcgacaccgtgaacgcgccgagcgacgccggctcacgggcggcaatcgaacaccttatcgcgcgtggctgtgcgcgcatcggcatcgtcggcgacaatcacgatcccaacaatcccaacatcattcccggctcgcgtgatattcgtatgcgggccgccaaggagacgattctcgcggccggactgccgtttgacgagcgccgtgatttcatcaaatcctcgtggtcgattgacggcggtatcgaggccgggcgcggcttggccaagaaaggcaagtgcaagtacgacggtctgtactgcctgaacgacggtattgcgctcggtattctgcgtggtctggcggacgatggcgtaagtgtgccgggcgatgtgcgcgttatcggcttcgacggcctgagccagagcatgtacagcgtgccgactttgaccaccgtggccaccgatttcaagggcatggcggataccgcgctgaccttgcttatgcggcgtatcgagaacctggacgacgagttcttcccgcagaccgtgaatgtgggctataagctcatcgagcgcgaatccactgcggcgtagagtctttggccgtgttgagcttcaattgggtgattggactggcaccagcggctgatatcagatatgccgaaagcagcgatgatcggatttaagttgctggagatgacaggatggattgctctttacccctttcaccatcttgcaataattcttacatgtaagaactctctgttaacatgtaagaattattgcaagatggtgaaaggggatgctcatgttgccggccaaagaaagtttgacggttgagttcaagagtgagcagaagcgccctcaatcgcatgatgaaattgttgacaacgtagtggctctagccaataccgaaggcggcacactgtatctcggtattgaagacgatggcactgtgaccggcgtatgtgacgagcatcgcaatatcaatggacttgcggtactaattttcaataagactgttccgcagcttcccgctcgcgtggcgctcttgtatgagaacgaggtgccgatagtcagtattgaggtggataacagtcagcaaatcgtatctaccagtcaggggaagacattgcagcgccggctgaaagcagacggctcgcctgaggtcgttccgctgtttgtttcccaattcattagccgtttatctcagcaacggttctacgatttcagcgcgcaacctgcaccagaggctcggttggacgatttgaatccagactcacggaacaagttgagaagccatattcgcagtgccaatgcgcaaaactcgttgttgtcttttactgatgaggatttcgatcgggcacttgagctggttgttgatggcccgtatggattgcagccatctgttgctggtctgctcaccattggttcggttgatgctattcatcgatcggttccagccgcatcggctgtttttcaagtgatgaaaggcatgtctccaaaggtcaatatggatccgttcgtgttgcctttggtggatatgtttgatcgtgtaggcgagctgatggagccatggaatcccagccacgaagtcatgagcggcttgattcgtgtcgatctgccagacttcgatcgaggggcattccgtgaggcaatgattaacgctttctgccatcgcgattatgcacgaatgggttcggtgaggttcctggttgatgatgatgggttgaccatagctaatcccggaggattcatagagggtgtttccgaagataacctgcttactgcacaaccgcgttcccgcaatccgcagcttgccctgattctgaaagctgccggatatgttgaacgcgccggacgaggcgtggataccatctatgccgggtcgattgcggcgggtggttctttcccggattattcacagtccagtgctgaggaagttatcttgttcttgcgccgtgtggtacctgacgaggcattcgtaaccatgattggcgacgaggaacgtcgacgtggggctccattgccggtctggtcactgattgtgctctcgctgctgcgtgagcatcgtaggcttaccgtggtccaattgtgcgatttctcccatttggagcatcgacgcatcgtgtccgctgttgagaatctggtggaagctggtttggtagagggggtcggtagcgggagctctcgttcgtatatgctgagtgcccgagtgtacaaacgttcagaggggctggcgtcttacgtgcgccagcgtgacatcgatgccacccggcgcagtggccttgttctggagttcgccgaaaaaaatgatggtgtcgtcactacggcggatgtcatggatttgtttggcctgagctatatcagtgcataccggttgttgaagaagctagaggatgcgggcaagttgcgccgcgaggggaatgggccgtcatcccgatacgtgttgggatgattggcgcgcgtgaaagtaagttttttcatcacctttcaataattctttcatgtaagaactctctgtttacatgtaagaattattgcaagatgatgaaagatgtacacaaaacggggaagctctgctcgatgtgagcggggcttccccatatgcgctggtgtgtagatcagcctgtgttctgcaggccggcagcaacgccggagacggtgcacaggatgaggtagatgaatcctgcctgctggctttgcgtgttttgcttcaatttttcttaagcagagtgagacccatcgtatcgttcgattctacgacgaacgttttgcatcaagcgcagataatgtggtgagtgcatattcaacaatggcggacggtcttgatgcacttggtttgacaaatattggaatgagcgaaagcatcctaaaaaaaggctgccggtacagacaagcttcctgataagcaggaagctgaagtgagtgctcgggcgttcgctgcattcattgatcagccaagacggtagctcgcataatgcattatgtgtgggcagatgtgtcgtctgcccacacattcgctgttgtgctttcgatttggaattcctctgccagatacggggaaacttctaaaaggccgctatgccgaggaagagtcctgtaataccggtggccatcaatacgatgatggtgatgattccggcgaagatgcgtacaggaagggtttcttttccatggtttgatgggctgtccgcaactaatctcattactccagctgtaacccagcaaactgcgcccaggactagtgccaggaattctcgacaccattccgtttcaagtgcgggaatgccgacgattgatgacgggtcgcttgccagtcttggcggaatagcgcataggatacgctccaatatcaggtaaggggtatcaaaatggatcagagtcaaagcgaatgggagctgtagcgccagtcctatccaccacagcgtgcgtcggatggtcgcgagtctgtcgcccggcctagtgtccggcttgccgccttcgccctccgtcccggcaccgtccgcgggcgtgtggtccccctcgtgcgcgtccgtcgttccgtccgtgtccttctcctcattcatatgtcccctttcgatcatccgagtctgtcactcggccagcgcgcccgttctatgcgcgccgtcgccggccagtctagggccgtgcgacgcgaacggggaggcccgcgtcgcttatcggcacggaacctccccgctcgcttttgtcgatcggtcggccgggaatcagcccgtgttctgcaggccggcggcgacacccgagcaggagtgtcacaaagcccctgccgctctgggtacccaggtggcggtttatga

SEQ ID NO: 2890 - DNA, 2684 bp, Unknown
  R36_18m  MAG No. k141_40415
gagagtcggtttccgccgcttccgcatcgaggacggcatcctgaccatcaacggcaagcgcatcgtgttcaagggcgccgaccgccacgagttcgacgccaagcgcggccgttccatcaccgagcaggacatgatcgatgatgtgattttctgcaagcgccacaatatcaacgccatccgcacctcgcactatccgaaccaggagcgttggtacgatctgtgcgatgagtacggcatctacctgatcgatgagaccaatctcgaaacccatggcagctggtgcctgcccggcgacgtggtcaccgccgaaaccgcggttccaggaagcaaggcacattgggaaggtgcctgcgtcgatcgtgtcaacagcatgatgcgccgcgactacaatcacccgagcgtggtcatttggtctctcggcaacgagtcctacaccggcgatgtgttccgcgccatgtacaagcacgtgcacgacatcgatccgaaccgccccgtgcactacgagggtgtgacgaagaaccgcgactacgacgatgtgaccgacatcgaaacccgcatgtacgagcatgccgatgtggttgaggaatatctcaagaacgatccgcagaagccgtacatctcctgcgagtacatgcacgcaatgggcaactcggtcggcaatctggacgaatacacggcactggagcgctacccgcactatcagggcggcttcatctgggacttcatcgaccaggcgatctatgccacccagccggacggctccacccgtctgtgctatggcggagacttcggcgatcgcccgagtgattacgagttctccggcaacggactggtcttcgccgaccgtactcccgcaccgaaggcccaggaagtcaagcagctgtattccaacgtccatatcaacgtgaccgatcgttcggtgtccatcaagaacgacaatctgttcatctcgaccggcggataccagttcgtgctgcgcatcctcgctgacggagagccggtatggcagtccgagcgtcgcttcgacgtgcccgccgattcggcatgcacgttcgatgtcgaatggccggtggatctctatcgcgccaatgccaatgagctggtgcttgaagtgtcccagcgcctcgccgaggcgaccgattgggctcctgccgggtatgaactcgccttcggccagactattgtggccggaacgaaggcagccgaagacgcggccctgcctgcggacggcatcgtcactgttggccgttggaatgcgggtgttcagggttccggacgagagattcttctttctcgcacccagggcggcttggtctcctacacgttcgacggtcacgaattcgtgctgcgtcgcccggcgatcaccacattccgcgcgttgacggacaacgaccgtggcgccggccatggattcgagcgagcccagtggatggcggccggccgttatgcccgttgcgtggacaatgtcatcgaacaggtcgatgaagacacgctcaaggccgtgtacacgtatgagctggccacgccgcaacgcaccaaggtcaccgtcggatacaccgccgataccactggccgtctgaacctgcatgtggaatatccgggcgagtccggcgagctacccaccattcctgcgtttggcatcgaatggactctgccggtccagtattcgaacctgaggttcttcggcgctggtcccgaggaaacgtaccaggatcgcaagcacgccaagctgggcgtgtggagcaccgatgcgttcaaggatcacgctccgtatctcatgccgcaggagacgggcaaccatgaggaggtccgttgggcggagatcaccgatgaaaatggacacggtctgcgagtcagccgcgcgaacggtgccgcaccgttcgctgtgagcctgcagccgtattccagcttcatgatcgaagaagcccagcaccaagacgagttgccggctccaaagcacatgttcctccgtgtgctcgccgcacagatgggtgtcggaggcgacgattcctggatgtcaccggtccactcccagtatcacatccccgccgatcagccgatcagcctcgatgtcaatctcgaactgatctgacgatcggatagcgtgtccctcctctactccttcccgtggaggagggacggcatcgtcttacaaggttccttaccttggattaaccggtgacgatgcttcatagcgcggaggatgcggcatggattcatgttttccgtatgccgcgtcctctgctcatatcaggaaagaggtctgatgcccagccccgagggttaggcatcagacctcctttcgtatggttttcataaagatggcacgaaactgtccctgaccaccagttttgcggaaagcctcacgtgcaatcgtaggagcacattcttctcaaacggtgccggaccgattgaaataaaaccagcatgcttgctcttattcttgatgagatcgttcacattacgatactcagttacatgcatgcgctcatcttccgcatgctggtagcaaaaaagattgcggaccaccctcccctattaggaaagacggtccgcaacatttcgtaacggatataacgcaatacgttaacgccggatggatcccttgaatggcttatccggagacaatgcgacacatcccatatcagtccctagaacgttcagcgtaatttccgtgggcttca

SEQ ID NO: 2891 - DNA, 3948 bp, Unknown
  R36_18m  MAG No. k141_40624
cggctcccactccgactccgaccacgtgtacaacaccccgcgcgcctggtacatgcagcgcttcctcaacccgtacgacgaggtgtgggacggcccggacgccgaccacaagcccacctccgacgacatcccgtgggcccgccagcccgagcgcaaggtgaccatcgaggacatcaagtacgtgttgagctcccactaccagggcaccccgttcgatccatacggccagctgggcgatgagcgcacccgccacatgtaccgcacgatcggcatcaaccgccagagccagcttgcggtgatgcagatccgcccgtaccgcccgcaggcctcccgcgccatccagtggatggcatacggctccaacccgttcaacacgctggtgccgttcttcccgaacgtggacaccacgcccgcttaccttgaggacaccaccacccgcgtgacgtccgagaacttctactgggccaaccgcatcatcgccgccctgtgcgatggcgccttccgctccacgtccaacgccgtcgagcgctaccaggagaagaccggtgcgatgggtcaccgcttggtcgccgccaccgacgagcagatcgcccgtctgggcttgacggccgccgaggaagccgcgcagtccgccgctgaagaggaatttgaggccgacaacgtggatggcgatgtgcagccgatgaccccggacgagaccatcgccgcgctgcgtaaccccgaggtgcgcgagattctcgccgccgccaaccagaccatggccgaccagctcaaggaggaaaccgacaagctgcttgactccgtgctgtacactcgcagcatggaaatgaagaacggcttccacatgtccgacttttagtccgtattgagctcccctccctgaggggaactgaccgcgaagcggactgagaggctaagctgttaagaaacagcccagtgggctgtttctaggcgaagaggcggcggcggccgccccaccaccccgctccgccatcatcaacacagaaaggcattaaatgaccaccatcgaagacttcaccagccagtacggcctggtccagaagatcgacgcattcggttacatgaagtacctggctgagaacccggacgccccgcgcaagcacggcaaggtggtgctcgtcaccgccgatacgccgctcaaggcatcgcgcggcgaaggcaagaccaccacgaccatcgccttgatcgacgccctgaacaagcgtggcattgatgcggccgccgtgctgcgtcagccgagcatgggcatcaccgcagccggttccaagggcggtgcctccggcggcggcaaggcatccctgacccaccccgagctcatcgactggggtctgtgcggcgaaatgggcgccatcgaggcggcccagaacctgctcgtctccttcgccgagaaggccatcgatgaaggcaagcttgacacgattctcgtgccgcgtgtctccgaggtgccgagccgctccctgcgctccaccgccgtggactacggcaagggcaacgtgccggagaaggtcgtgctcacgccgacctgcgagctcatgcagatcatggtgctctcccgctcgatggacgagatttccgagcgcgtatccaagatgatcgccggtaccaaggacggcaaggccgtgaccttcggcgagttcgtggatctgtggcgcatcaccggcattctggccgacgcggtcaagccggccaagaccgagaccgtgaacggctccccggtctacgtgcacggtggcccgttcgccaacgtgtccatcggcattccgacgctggtttccgtggaaatggcctgcgctctgcatgatgtggttgtggtcgaagccggttacggcaccgacgccggtgcccagaagtggctggacatcgcctgtcgcgagtatggcgcgcagtggccgtccgccgccatcgtggtgacccgcgcctccacctggcgcgacgatcccgagctggcctggcgctacccgttccacgtgcagcgcctggagaacctggacattccgaccttcccgctcatcaacctgtgggaaggcgaggacgatcaggtcccgtccctgcaggccaccgccgacgagctgggcttccgtacgccgatcatcggcaacctgttccgcgacggcggcgaggcgctggccccgcagcttgacggtttcgtcgacgcgctgcagaacggctccatgccggccgaaccgcattcgcacaagggcatggccctgaccgagaacgccaagtgggtggccgagaacgcctacggcgtaccggccgagcgcgtgatctacaagccgggcttcaccgagtccgtgtccgaggccatggaactgtgccagagcgcaggcatctcgctggatgatctggcgttcgtggcggtcaagtccccggcgaccatgaccgacaacgaccgcgcccccgaagaagagcgcaccgtgaccctgaagaaggtcgaggtgcatgccggtgccggtctggtccacgtcaacctgaccaccagcctcaccacccccatgcccaagattgtgtgatgacaggcatgaggtgaggtaactcgctttcgaggggcggatttccggttttccggaggtctatctgcgtttcgaggggctcttcgattgcgaaacccggagtatgaccattgaaattgcaatgtttatactccgggtttcttgttttaaaagccccttgaaacgctagtagagcttctgaatgttggaaatcagccccttgaaacgtagaaagcccgccaccggcgggctttctacatctgagcttccctctttgagggggagctgtcagctaagctgactgaggggagccagaatacgcaaactagttgccaccctgagccattaaacggaaagcccactgggctttccgtaggcgatgcgaacagctatgctgcgaggggaatggtggcaactagaagttgccgccattccagccccaatcggtggtggcggtgtagcggatgtaggtgcggtcctcgggaatgccgagtgtggagttcagcgcggccataatgctttcggtcagcttttcccaagcagagcccggcacagagcggccgaatacgttgacctccacataggcggcgggctggtcatcgctaccaccgaagtagattggcatattgtcctcgaacgggcacatcagccagccttcggacttgcccggcacagcggtaatcgccttgccgtaggcggccttcagtgcctcacgctgctcgggggtggtggacacggacacatgagtgtgaataacgggcataattcctccttgattcggttcacttccagtctagcctcagcggctgctgttgaacatggcatgcggacgtaggaagctgcttgcagaacggaccggggcaaggccaattggggatattattggcctttccagccaatacacgttccgcagtcagcccaatagtgttgaatactcttgtgagaaaactgattgaacagctgatgaagttcggcattgtgggcgttatcgcctttgttatcgactggggtatcctcaacctattggttggcatattccacatgcacaacgtgctggctgccaccatctctttcatcatctcgctgattttcaactatctggcgagcatgaaattcgtattcaagcatcgtgatgacatggcgcgctggatggagatccttatcttcgtggcgggcgctgtagtcggtctgttcatgaatgacgcgattatctggatttccacttatggcatgaaccacgatgcctatgtatcgcagcatgccgaatatctgttgcgcaccaatatcggcaagctggtggccactgccgtggtaatgatctggaacttcttgattcgcaagtggctgctcgacgatacgcacaccaatgcgatgaaccgtctgaagtccgctgaaaatcgactgaatgccgaggagcttgaagccaagtggcaga

SEQ ID NO: 2892 - DNA, 16986 bp, Unknown
  R36_18m  MAG No. k141_40733
ccgtcagcaccatgaagcgcatccatgacgtgcgctatcgggagattcccgtgccttccaccttggccgattatggtatcggcgtggaattcgaagcgggagagcgtgccctcggcgatgccttttccgccggtcttggcaacgatgccgaatcacgaatcgccacaggctggatcatgatgctttatgctcatgagctgcgcattgaccgggattccaactggcgttgcgtggcgttcgcgcggctgccgctggaaaccgccgaaaacgattccctgacccccggcatgtactgggatgacatgtgcgactatttcgacggcatcgagccggattcggtatccggcacagtcaccgtgacccaaaacacggcttttggttcgatggccggctccaccagcgccgggtgtgagattcgcgtctcatggaccccgcttgacgggaccggaccggacggtactatggacgccggcgcacaaatccgctcgtgggccgcattcatcagatccaccatccgttttgaggaggatgacgccagttgagtgacgtccgtgacaccgaaccccgactgctgaaagagcctcgcgggggagtgcccgatgtcacttcgacgctggatggctatcatcgagcctgcgatgcgctggccgaggcgacgggctcgctggccgccgacgccgaacgtgcgtccggattccgctatggacatgaggattggctgattcagttcaaacgtgaaggtgcgggcatcgccttgcttgatcccgtcgccctgacacgggccggagctgactggaatgaattcaatgacgccgtgggcgatgctacatggattctgcatgattctctgatggacttgcccggattcgccgaaatcggactcaaacccaaggccttgttcgacacggaaatagcggcgcgattgcttggcctgcaccgcttcggtctggccgccgtcaccgaacactacctcggcatcacgctggccaaagagcattccgccgccgattggtcctaccgtccgctgccgcgcgactggcgcaactatgcggcgctcgacgtggaggtgcttatcgaactcgaaaccttgatgcgtcgtgacctgaaagccgcaggcaaggacgagtgggccgctgaagagttttctcacgctttggttgcgggccttgccccgcgcaaacctcatccgattccttggctgcgtatctcgcgcatcacccagctgagtcgtgatccgaggggcttggccatcgccaaatccctatgggaggagcgcgaccggctcgcccggcgatacgacatcgctcccagcctgttattgaccgattcgtcaatcatcgaggccgcgaccaacaagccgcacaatgccgcccaattccgcgcactccgatccctgaacgagcgtgtgcgcattcataccggcaccgagcaggacaaaatgttcgagcggtacgcgccgattcagcgtacggtcaagccgaaggtctggaagcaggccatcgaccgcgccatggccctgaagcccacccaatggcctaccatgcccgcccccgaacaggacgaaaacggtgtggtgaacgcgccccgatccatgcgactgtggcaacagcgccatccggagcgttatgaccgtctgcagcgggtacggcgtgtgatcaactgcatcgccgaagacacccgcacgccggccgagatgatcatcaagccacagatcctacgcaacctgtgctgggtggaagacccggtggaagtggacgtcgagacgttcctgatcgagcagggcgcaaggaactggcaagtgaaactcattgcaccgtccgtaagtggcgttatcatgtagaggttgccttacggcagaactgtaagaaataacgacttttgaggagtcattagcgtgaagatcagcgttcgtaacctcgagcccaccaaggtgaagctcaccgtcactgttgaaccggaagagctcaacccgtatctggatgcggcccgtaaggaaatcgccaagcaggtgaacgttcccggcttccgtaagggccacgttcccggcaagatcatcgaccagcgcatcggtttcgccgccgtcgccggtgaggccgtgaacgacgcggtcccggagctgtactccaaggccctggatgagaagaagattcgtccgatggctcagccggagttcgacgtgcaggatgttccgcagtccgccaacgacgagaccaagctgaagttcaccgccaccgtcgagcgtcgtcctgacatcgaactgccggaactcgacggtcttgagatcgccatctccaagccggaagtcaaggatgaggacgtcgacaagcgcctcgagaccctgcgtcagcgcttcggcaccttggtcggcgtggaccgcccggccgccaagggcgacttcgccaacatcgacctgactgctgagattgacggcgagaccgtcgactcccaggaaggcgtgagctacgagctcggctccaacaccatgctcgacggtctggacgaggctcttgacggcctgtccgccggcgaggagaccaccttcgaaggcacgctggaagccggcgagcacgagggccagaaggccaccgtgaaggtcaaggtcaactccgtcaaggctgaggaactgccggagctgaacgatgagttcgcttccgaagcttccgagttcgacactctggacgagctcaaggctgacatccgcaaggctgccgctcaggacgccgaaggtcgtcaggccaccgaggctcgcgatgccttcatcgccaagctgcaggaaggcctcgagatcccggtgccgaagggtgtcaaggccaacatggtcgaagagcagctcaagggcatgaccccggacccggagaaggccaccaaggagcagaaggctcaggccgaggagaccgtggagaaggatctgcgcgatcagatggtgctcgacgctctggccgagaagctggacgttcaggtgtcccagtccgacgtgttcaacttcctcgcttccatcgcccagcagtacggcatggacccgaacaacttcatccaggccatcatcaagaatggccagcttggctccgctgtgcaggaagtcggccgttccaagggtctgctcgccggcatgcgcgccgtcaagttcaccgctgatggcgaggttgtggacctctccggcttcctgggcgaggccgctgaggacgaagagtccgagtccgtcgaggccgcttccgctgctgccgccgtggccgacgaactgtccgccaaggatgacgccaaggacgctgagtgagcatagcctcatcgcgttagcgtgattgtttgagcccggaatcgtgtttcacggttccgggctcttcctattctggtaaaaggactatttctttggctcccctttggggggagctgtcgggcgtagcgagactgaggggagttcccaaggcatactcgttgcatagcgtgcggaggttgacatgcagccaacggttactatcaaacgccttggttggctcgctgcggcgaccattgtgctcggcgtgctcatcggtgtgggagcaggtctgctgaccctgttgctctacggcgttgaacatgtgctgctcggctacatcgaaggcccagaattgtctggtccattcggcgtgcccgctgcacgccgtgtgatatcggtgaccgtgggactcggcatcgcgggcattatctggtatctgctacgacacaaaacgactgtggtgccctcagtcaagaaggccgtggcgggaaagcgaatgcctttctggcaaaccattgtgcatgtggtgttgcagattttcatcgtcggctccggtgcctcgatcggccgagaagtcgccccacgcgaactcggcgccatgatcgcgcaacgtttttgcgacctgttccatatcgagggcgttgatggtatcgaccggcgcatggtggtggcagtggctgccggtgccggtctaggaggcgtctatgacgcgccgctggccggcatgttcttcgccgtcgaaatcctgttggtggatgtgacgatcgaaaaggttgcgtttggactgggcgtgtctgccattgccgcattcgtggcggttgcgatcaaagggcattgcctgttctacgacatcaccgccatgcaaccggaatccacgccaacgttaatgctgttcgctctgatctgcggtgcggcatgtggagtgggcggcgcattgttccgaaaaggttcgcaatgggcggaagcgcacaagccgaccggcaaggccattctgtggcagatgccgctggctggtctcatcaccggtttggtggcgattgttgtgccgcaggtgatgggcaacggccgtgccgcagcgcaacttggattcagcacgttcattcctgaaaccgccggcactgctggtgccatgcagtcggcatcttcagcggccgcctctccatggaacttgctgacgggcggcggtaatgtatccgattcggcctctggcgggggagcgggctctggaatggcctcgttttgggccatgcttcagggtgggagcggctcttctggatccgtgatgaacgccggtttcccgctgtcccagtccaatatctggatgttgctgggtgtgttggcactcacctttgtcgccaaggcgctggtgacgctgatgaccattcgctccggtgcatcgggcggtgtgctgcagcccggcatcgcattaggttccacgctgggtgcgatgctcggcctcgtatggatactgatgtttccgactgattcggtaaccgcgtgtgccttgatcggtgcggcttcgttgctttcggcctcacagcaggcaccgcttatggccatgtgcttggtgatggagctgaccgaagcgccgcttaccttcttcgtgccagtcggcatggccgtggccacgtcgtcgttgatatcaaagtggttgctgagtcgtaagtaagtagatgcatatattctggctcccctctctgaggggagctgtcgaacacagtgagactgaggggagccgaggtaaagaaagctatgtcagaaaacaccgaagtccgtgcggcacttgaatcgcttgccgctgagccgctcactgagcagattgactactatcgaaagccattcatggtgttgtgggccgccattcaggaggccgccagcgatgtggccgaagactacgacttgcctgcggatatggcccaattatgggtggccgaacagatgcgccaagtcgccgattcactggtcgatcggctcgcggaaaaagccgtggcccatggtgccagcaagtccaacgtggcgcgagccgccggtgccagccccgccaatgccgcccgtcgcttcccgcgtctgggcgacgatgccgcctcccagacccgcctcctcattgacgacgtcctcgacaccttggaataacccgaaatccctacgctacccgccaaaaagcacgcgaaaagccgccttcagtcgcttcaaggcggtagtctgaacaatgttcgagtaattagaaggagaatcaaggtgagcaatacctttgcgaccttgccggtcatggcgggcgatgacgtcccggccggccccgtcgacccgattttcaaccgtctgctcaaagaccgcatcatctggatgggtgaagaggtcaaggacgatatggccaaccgcatctgcgctcagctgctgatgctggccgccgaggacccgaagaaggacatctggctgtacatcaactcgccgggcggctccatcaccgcaggcatggccatctacgacaccatgcagctcatcgagcctgacgtggcgaccgtgggcctgggcatgtgcgcttccatgggccagttcctgctgagctccggcaccaagggcaagcgttacctgacctcgcacgcccgtgtgctcatgcaccagccttccggcggcatcggtggcaccgccactgacgtgcgcatcaacgccgagctcatcatggacatgaagaagaccatgagcgagctgaccgctgagcagaccggccacaccctcgaggagatctaccgcgacaacgaatacgaccactggttcaccgcccaggaagccctcgactatggcttcgtggacaagctcgtgaccacgccggacaccatcggcaacaaccagcagggggagtgagactcatggcaagtgaagaagcaaagttcgccgcccgtgccgaccgcttggccggccgtcatggcgtagccggtttcatgccggccgccgcccgcgcagcccagcccgcgccgaccaaccgttacatcatgccgcagttcgtggagaagaccccgtatggcatgaagacccaggacgcctactcccgcctgttcgaggatcgcatcatcttcctcggcgtgcaggtggacgacgcctccgccgacgacgtgatggcccagctgctggtccttgaatcccaggatccgaaccgtgacgtgatgatgtacatcaactcacccggcggttcgatgacggccatgaccgccatctacgacaccatgcagtacatcaagcccgacgtgcagaccgtgtgtctcggccaggccgcctccgccgccgccattctgctggcctccggcaccaagggcaagcgcctgatgctgccgaacgcccgtgtgctcatccaccagccggccatcgaccaaggattcggcaaggccacggagatcgagattcaggccaaggaaatgctgcgtatgcgcgaatggctggaggagaccctcgccaagcacaccggccaggatgtcgagaagattcgccgcgacatcgaagtggacactttcctgaccgctcctgaagccaaggaatacggcatcgtggacgaggtgctggaacaccgccagtaaaacttccgaacattgcaataccctcggtcggcaacgaccgggggtattgtatttcaaggatgacaatgataatgcgcagcgtggcggttcgacggtgcggcgcggtcggcaaaggagaatcatgggacgtgtggtgagctacaacgaggacgtaccccgttgcacgttctgcggcaaaaccgaacgtcaggtcagaaaactggtggccggtcccaacgcctccatctgcgatgaatgcatcgccctgtgcgtggacatcatctccgaggagcgtgtcaaagatgccgaggtcaattcgctgagcctgcccaagcccgctcagatcttcgattatctcaaccgctacgtcatcggtcaggagaacgccaagcgcgcattatccgtagccgtatacaaccattacaagcgcgtcaacatggagcttcaggagtccgctgagcagcttgacgggaataacgggcacggtggccagaccggcaaacaagccaagcaatccgctcccgcccagacgcgtgctacccgccgcaacagtgaccctttggctgacgttgaggtcgccaaatcaaacattctgttgctcggccccaccggtgtgggcaaaacctatcttgcacaggcgttggcccgcgtaatgaacgtgccattcgtcatcaccgacgccaccaccctgaccgaggccggctatgtaggcgacgatgtggaaaccgtgctccaacgtctcctccaagctgcggatggcgacgtaagccgagcccagcacggcatcatctacattgacgaaatcgataagatcgcccgcaaatccggtgagaacacctccatcacccgtgacgtgtccggtgagggcgttcagcaggcgttgctgaagattttggaaggcaccatcgcctccgtgccgttggagggcacgcgcaagcataaggagcaggacgttgcgcagatggacacacgcggcatcctattcatctgcggcggtgcgttcgtgggactgacggatattgttcgcaagcgattgggccgtcgagagaccggcttcggcgcgaattggcacgacgccgacatgaaagacgaggaattgctcgaacaggtcaatgccgatgatctggccgagttcgggctgttgcctgagttcatcggacgtttgccggtcaccagtgtgctgaaggaacttaccgtagacgatctgacggcgattctcacccagccagccaacgcgctgatcaagcagtaccgtaaactgttcgccgtcgacggcgtcgatctgcaattcacagaacaggccattcgggcgattgctgatatcgccatcaagcaggggaccggcgcacgcgggttgcgttcgattatcgaacgtacgttgcaggacacgatgttccagttgccgagtttggatgatgtgaagcaggtgattgtggacaaggcgtccgtagagggttccagtacgcccaaactcttgcgcgaagccgtggatgtgccgcagggacgcctcaaagttgcgtagtcggttttgcttgaccgagtccgtacacatgcggcgtgaggccagtaaatacgccgttgcggtggcgattaggatggtgcgactcgccgcaacacgccgagttgcattcatctgaacggcgtgtattatatatcgagttgtctgaaaagacaacatgcgccagtagcccagcggattagagcagctgactacggatcagcaggtcgcaggttcgaatcctgtctggcgcactcccgaaccacggggacaacagtggtatgcgccagtagcccagcggattagagcagctgactacggatcagcaggtcgcaggttcgaatcctgtctggcgcacagtaagcctcgaaagcgaaatgcttccgaggcttttccaattgtattggcccgtttgagtcggccacacaggggggtaaggttgcccttcgcgactcagcctggagcggaacgtcctgagatattccgtactattacatacggttcatccaagagagtacagcaaggagacgcgatggccacgaccgccggcgcgaagaagggactttggtccaccatcaggcgaatcgccgcctcagaccgtatttccggactcatcatgctcggcttcgcgctcaccggcctggtgctcgcgaacctgcccgccaccgcgcatgcgttcgagaccgtagcggaaacgcatctgttcatcccctacaccaatctcgacctgccgattggccattgggcccaggatggtctgcttaccatcttcttcctgaccgtgggcctcgaactgaagcaggaactcaccaccggctcgctcgccaatccgaaagcggccgccgtgccgatgctgtgcgcggtgggcggcatgatcgccccgcccatcctgttcctggccgtcacggcattgttctctcagatcgggcctggtgaacccggcacgctgattctgaccaccaccggcagcagcattccgttctcggagatgtcgcacggctgggcagtgcccaccgccacggatatcgcgttctcactggccgtgctcgccctgtttgccaaggccctgcccggttcgatccgcgcgttcctgatgacgcttgccaccgtcgatgacctgctggccattattctgatcgccgtattcttctcctcgatcaacgcctggtattggttcatcggcatcgtcgtgtgcgccgtcatctgggcatacctcgtacgactgaaaaaagtgccgtggattgcggtcggcatcgtcggcgtcctcgcttggatcatgatgttcgaggcaggcgtgcatcccacactggccggcgtgctggttggcctgctgactccctcccgtgaaatgcacggcgaactttcaccgcgtgccgaacgctatgccaacaagcttcagccattctccgcactgctggccctgcccatcttcgccctgttcgccaccggcgtgcacttcgagtcggtgagcccgctgttgctggcttcgccgttggttatcgcactgattgtggctttggtggtcggcaaacctttgggcatcatcaccaccgcatggctggccacgcatgtgggcgggctcaagatggccaaggggctgcgcgtgcgcgacatgattcccgctgccgtcgcctgcggcattggcttcactgtgtccttcctcatcgcctcgctggcgtacaagaatgcggaactttccgctgaggcgcgcttcggcgtgctggtggcctccctgatcgccgccgcgatttccggtgtgctgctgagccgtcagtccaagagattcgagaaggccgcagccgcagcagcggccgatgcggaggatgacgaatcgattgatggcgatggcgctggtcagaccggtcgcaccacaaagtccaccacgcccacggaacaccccggcaccctcgccgacggcaccgccagtgtggagattgacttccgccactgatggcttagacgatccctactccattgttggccttgtttcgtgaaaaccgtacgctgaggcgcgctcaccgtacgttcttcacgagatgaggccttatttcgtgaaaaccgtacgctgagtgtcactcaccgtacgttcttcacgaagtcaaggatgatttcgcggaaaacgtatgcagagcttcaggcgctagaatgcgaagagtcgatagcaccgtacaggaggatattggatggcaaagaagcagaagaaatccaagaagaacgacggcaaaaaggccgctgaagcaaagaatctagccgaggccgcatccaagtccacagtcgtggacgatatggaaccattggaagccacagccgcgaatgatgcggcaacgttggaggccgagacggcaaccgaggctgccgcaacgccggtgaacccggtcgacttggaggacgtctcgccgctgggcgacacctatcatcgcggcccggtgattctacgcggccagatgattccctcggacaataccaccgccaatctgctgaaacccgaccaggacaccgactggctgcacatggacccatggcgtgtgctgcgcatccaatcggaattcgtggacggtttcggggcgctcgccgagctcggacctgcggtctctattttcggctccgcacgcacccagcgcaccgaatcgatctacaaggcggcccggcgcatgggtagccagatagccaagcgcaacatcgccgtcatcaccggcggtggtcccggcatcatggaagccgcgaataggggagcggcactggctggcggcaaatccgtgggactcggcatcgaattgccgcacgagcaggggttgaaccagtgggtgaacctcggcatgagcttccggtacttctttgtgcggaaaaccatgttcgtcaagtattcctccggcgtgatcgtgtgcccgggcggcttcggcacactggatgagatgttcgagctgctgaccttggtccagacccacaaggtggcgaatattccggtggtgctctacggcaaggaatactggcaggggctctttgactggctcaacggtccggtggccgagcacggcatgatttcggcgatcgacccgaaactggtcaccgtgaccgatgacgccgacgaagccgtggaggtggccgtcagcgcaattgtgaggtaagcgagatagagtggctcccctctccgaggggagccaaggacagagttactttttgtaggcgatgagcaggcctgtgccgtcaggggtaagcgtggactcgaaaccttcgtcatcttcgacggtggtgagcagctcacgcatggcgatggccttgtcgctgcggtcggccggattaatcatgccgccctgaccgtcctccaacgccagcacatcggtgaacacgatcacgccgtgcgcgcgcagcagacgggaggcctgggcgaacgtggcggcatagttctcggcgtcgcccgccaccacgatcagatcgtaatcattggcgttgaggcgcggcagaaacacgctggccggggcgttcaccgcacgcaacgtggtgtcggtctcatcctgcagttcggcgaacgccttgcgaatcagcgcgatgccctgagcggtggaatcgaccgcagtcagcaggcccttgttatccagcgcatgggcgagctgcaaggtctccaccagcgagccggtgcctacggcgatgaccgaagcggcgtcggtgatgcgcaccagcatgcccagcagacgggcctgcgcggccgaaccctgcaactggccggacttgtcggcggccgtacgggcgtcggtcaacgcattggattcacgttcgcgcgcgtgttcctcggtgaattcccatgccttggcgaggttggtgtactgcgttctgtccataattcgttcctttatgtcttctctcgtgcgggcacccggtggatgtatcgactacgtgttgcagcgattgccgtagctggtcgtggcgcggcttagcgctcgcggaccttggccacgatctgccacatctcctcgcccacatcgatgccgcgcgggcagtggcgggagcaggcgcgcacggactggcaggcggccacgccgtcggcggtgtcgatggcgtccatacgctccatggccttggtgtcgcgcgaatcgttgacgaaacgggaggcccaaatcagcgaggccgggccgatgaaagcgtcgccgccggcgtacaccgggcaggcgccttcgcacacgccgcaggcgatgcagttgctcagcagctcgtatttggcgagttgttcggggttctgcaggtattcgaacacgtccaccttgccttcggcggtggtggcgagcacgccgtccgcctgaagatatggggtgagcttccttatttggttgagcatcgggtcgatgtcggcgatgaggtcgcgctgcggcgggaagccgggcagggatgccagttcgatgactcccagcgagccgtttgcggccgagtcctggtcggctgccgcgtttgcgccgttttccgcggaatcgtcggattcttcggactcggtgccggtgtgccggaacccttcgtcatcgacttcggggatggcgccgggctgcttggcccaatcgcggatggtggccgtgcacagcagggtgggggtgccgttgatggccacggcgtccgaaccgcacatgccgtgaccgcacgaatagcggaaggccagcgtcgggtcgacggtgcgtttgatggtcagcaggcagtcgagcacggtgtccgaggggcgcgcgggaatcgtgtattcctgcacccactgcttgccgcgcggacgacggcgtgccgccgaatccgagccgccgccgaatggggagcttttcttggcgaacgggctgccgccgcgtgcacgttcggcgcgctcgggtcgcggcgtgaaacgatgcacttgcagggtaaccgtcgtgttgctcgcctcagccatgttctgcctccatgaaacagtgggatgtcaagtccaatatcagccaacctattgtgccacaagccctaggcggcttggtattacccccagcggatcagtactcgcgcttcttgggtggatagtcggtgatgtgcaccggcttgaaacttgccggaccatcatcggcgaccatcgagtgagcaaggaaatgctcatcgtcgcgttcggggaaatcaagtcgttgcatggatccgcgggattcctgacgggattcggaagcgtgcagcatggcctcggccagttcgattagatgacggacttcccagatggcggtgacctcctgattgaaagcggcggtcttgtcatgggcccgcaaggtatcggcaaccggtgtgatgtcgttgttgatctgagtcaacgccgtatcgatggtctgagcggtgcaacgtacggccagagcctgctccatcactgatccgagttgggccatgagctgataaggattggcggtgggcccgccatcgtctgaatcgtccatcggcccggcgagcagttcgtcaagctctgccttgcgggaatcggcagcctgatcggcggcatcggtcagcatgtcatcggtcgaatcatcggccatgggggagtcaaccgggttctcgacgatgcgtgcggccatcgtctgaccagcacgtgtaccgaacaggcaggcgtcgagcagagaattgccgcccagacgattcgcaccatgtacggagacacaagagcattcgccagcggagaacagtccatcgactacctgcacggcaccgtcggcccaacggtacacctcgccattggtggtgatggggatgccgcccatcgtgtaatgcgcagtgggcttgataggcaccaggtccttggccggatcgaggttcgcgtactgctcgatggtttcgaccacctgcggtagcacttccttcatacgttcggggtcgatgccggtcatgtccagccagacgcagtccttcggaccatccgggtccttcgggtcggcgacgccgcggccggcgtcgatctccgccatgatggagcgggagaccacgtctcgcgcggccagatccctatgctccggggcgtagcgttccataaacggctcaccgtcggcgttcctcaggatgccgccctcggcgcgggccgcctcggacagcaggatgccggtgtgcgcgagcccggtggggtggaactgcacaaattcgatgtcctccagctgcaggccggcggccaaggccaatgccatgccgtcgccggtcaggtcccaggaattcgatgtggtatggaacagtcggcccgcgccaccggtggcaagaagcacgttgcgcgcgtggatggcctgaatcttgcccgaatgcgtgtcaaatgccacgatgccggccgcctgcttgccgtcgtcggcgagcaccaggtcggtcacataccattcctcggcgaactcgacgccggcggccacgcactgctgccacaaggcgtgcagaatctggtggccgatgcggtcggccgcataggcggcgcgcttgaccggggcaccgccgaactcgcgcgtgtggccgccgaaccggcgctgggcgatatgcccgtcatcggtacgggagaaggccacgccctgacgctccaggttgatcacggtctgcggcgcgtattcggcgagcagtttggccgcgtcctggtcgacgagccagtcgccgcccttgatggtgtcgtagtaatgccagtgccagtcatcggactccacattgcccaggctcgcggcgatgccgccctcggccgaaccggtgtgcgaacgcagcggctgcagtttggagaccacgaggatcttcgggtccacgccttgttccttgagctcggtgattttgggggagcgcagcagtcccaacgccgccgacaggccggccgctccggcgccgacgatcaccgcatcatacatatcttccaaacgtttcggactcatgggttcgattctcgcacacccgccgaacagtcttcgagccgtgtcatgaaagccgattagccgacacggctgctcagcttgagtatgccggcatcccgctcgatcactcccttcagctccaatgcgccgagtagctcaagtatggtgccgatattgggaatctcgtcgggtaccgtctctcgcgccacacgcaatagtgcgtccggggtgacgatgagatgtcgtttacggcattcacgaatcaatgccactaatgtgcgttccatttccggcagcttggcgataatgatacgttgttgggcttccttctcgggatcgagcttcggcttgacacgaagatccggcatctgatgcgacgagggcggctcttcacccttgctcttgttggcaccggcctcggcagttgcgctcgccggcccatccttggattgaacgagtgtaggctgagtatgcttggtcctaagacgtttcgaatgacctgaatcttgtgacgactcctgtgacgccgatgattccgaggatgctggcgataacggagtcgttgccggcacttccatggcctcctcgttttcggacgagtcctgacctgtggatttcggtatgcctgggcatgccgccataacgggcttatgccgttcatggcatatatcctcagtggatgtggcggcacacagaatcatcgcccggtggtcgccgatcatcttattgcacccggcgttgcaaggctgattgatgtcaccgggaaccgcatacacttcgcgcagcaattcgcatgcccatcccgcggtgttgagcgctccggaacgcaaccgggcttgcgtcacaatcaatgtggaagacatggccgcgataatgcggttgcggagtagaaaacgacgggcttcgggaatcgtccctgggcacagttcactgatcagtgcaccaccctgcgcctcgatacgttcgaacagcgtgcggttacgcatcggtccgatatggttgagcccgccggcgaatacggcaacggttctgcccacattggcgggcattctgccgtgcagcgcattcaacgctccccaatgtgccgccgcatccgtgcccattgcgcctccggacacgaccagatgcccggcaacgactgcctgttcggctacggtgtgtgccacataccggccgtattcggtcacgtcccgtgaaccgacgatgccgaccggtttggcgcaactggtcaatgcgcgtggatcgcctttgatccacaaacacagcggtggcgcccaatcggagcgaatggacaggtcggccaactgcgagggccaacatggatggccggggccgataatccattgcgtgccatccatagtgaaccagtcggccagttggatgatgtcttgcgagggcaggtccatcatgcggttatgccagccggccagtgcattgcggaaggagcgcatcgcattcgccgacgccttgcggccccatcgggtgaggccatccacgaacatgcggtcaatgcgtgacagcgccgggccgcagattccagatggctggcttggatgggattgcgccaacgcgtgccagagggattcggcgctttccgcgcctttgagcgtggcgtacatcatcacatccgccccatcaagacagaacgtgagcgcggcgcggtataacgtatccgtgggaggcatgggaatggtgcgcgaaacagcgaggcccgtatcggtgtgatccacactgcctgcggtgccgccagattgtcggatatcagtagcgttactcatgtcatcctcgttctcatttcgatgccctgatggacgtcctgttcagtgggggatacgcggccggccagatcggcga

SEQ ID NO: 2893 - DNA, 17343 bp, Unknown
  R36_18m  MAG No. k141_41246
cgacctccacacccagctcggcaccttccttcacttcgaaggaggtagccagcgtctcatgggcgatcagatcgcggaactgctcgacatcggccacattggcggccggcacggtcagcaccagggcgatgcgatcggcgatgtccagatcggcagccttacgtgcgtcctgcacagaacgaatcacgtcgcgggcgtagccttcggccagcaaatcggcatccagcgcggtgtcgaggatcacgaagccaccggtcggcagagcggcggagaccgaagcggcggcctcggtggcgttctcctcctccacgcggttgatcagctcgtactcgccttcgaccagcgcaaggtcgccggacggcgtggagaccaccggcgcaccggacgcagcatcgacatgccagtcgccggacttggaggccttgatggcgaactgcacctgcttgccgaggcgcggacccgccgcacgggcattcacacgcagctcgtgcacgatcttcagaccgtgggcggcggcatcctgcagcgtcgagaactcgatgctcttgatgttgagctcggacttcagcagatcgtcgtacgccttgacggcgtccacgttctcgaccaccacggtgagcttggaaaggggctggcgcacgcggatcttggcggccttgcgcagcgacagcgtgccggaaacgacttcgcgcaccttctccatcgcgtccaccaaggccggatcgtcgaccagcacgcggccaagctcggtatcggcaccggtcttctcgtccaccacgaacggccaatcggccaggtgcacggactcgccaccggtcagaccacgccacacggactcggcttccatcggggccagcggcgcaagcacgcgcatgaacgcctcaagcacggtgtacagcgtgttgaacgcggaagcgtcctcattccagaaacggtcacgggtgttgcggatataccagttggtgagcacgtcgatgaagtcggagaccgcatcgcaggcgtcggagattgcgaactcgttcagcgacttctcggcggccagcaccagacgacgggtacgggccagcaggtagcggtccatctccggcagaccggcgatctcgtccgcgcgcagctggcgagcgtcgaagccagccccaccgttggccgcgttggcgtacagggtgaagaagtagtaggagctccacaccggcagcatgacctggcgcacggtgtcgcgaatgccttcggcggtgacgatcaggttgccgccacgcaggatcggcgaagacatgaggaaccagcgcatggcgtcggaaccgtacttgtcgaacacgccgttcacgtccgggtagttgcgcaggtgcttggacatcttctggccgtcggagccgagcacgatgccgtggcagatcacgttcttgaacgccgggcggtcgaacagggcggtcgccatcacgtgcagcaggtagaaccagccgcgagtctggccgatgtattccacgatgtagtcggccgggaagtgctgttcgaacttctccttgttctcgaacgggtagtggaactgcgcgaacgacatggaaccggactcgaaccagcagtcgagcacatcggaaatacggtgcatgtgcgacttgccggtcgggtcgtccgggttgacgcggaccaggttgtcgatccacggacggtgcatgttgatgttgccgtccttgtcgcgcggatagtcgccgaagtcggccttgagctcttcgagcgaaccgtagacgtccacacgcgggtacttcggatcgtcgctcacccacaccgggatcggggaaccccagaagcggttgcgggagatggaccagtcgcgcgcgttggcgagccacttgccgaactgaccgtccttgacattgcccggaatccagttgatctgctggttcaattccagtagacgcggcttgatcttggtcacggacacgaaccaggaggagaccggcttgtagatcagcggggtggcgcagcgccagcagtgcgggtaggagtgcacgtagctcttctcctggaagaggatcgcgcggcgctcttccggaatctcggcgagcgggccgtcaccggcgcgcaggttgcgcaggatcggcaggttggcgtcgaacacgaaatcgccctcgtagtcagggcactgcgcggtgaagcggcagccgtcgtcgagcacgtcggtgctcttgatgccgtgcgcgttcagcgtattcatatcgtcctcaccgtagggagcctggtgaaccaggccggtaccttcgacggtgtcgacgtagtcggcggtgaagatcgtgtagccgttcgggccgggcacgtggccttcggattcggcctcgtcacccgcgaagtacgggaagaccgggtagtagcgtcggcctgccagctcgttgcccttgagttcgcgcacgacctcgtaattctcgccgagttccttctcatagtgcggcagcaaatccttgccgaggtagaacttcttgccagcgaacttgccttcggtcgggcggacctcgacgtagtcgatgtcggcgccgaccacgatggcgaagttggtgggcacggtccacggggtggtggtccagaagacggcgtaggcgtcgtcctcatcgcgcatcttgacggccacggatacggtggtgtcctggcggtcctggtacacgtcggcgtccatgcgcagctcgtgcgcactcaacggcgtgcggtccttcgggcagtacggcagcacgcggtagccctggtaggccaggcccttgtcgtagagctgcttgaaggcccacatcacggattccatgtacgggatgttcagggtcttgtagccgtgctcgaagtccacccaacgggcctgacgatgcacgtagttctgccattcgttggtgtacttcagcacagaagcgcggcaggcgtcgttgaacttgtcgatgcccatcttctcgatctggtcgaccgagtcgatgccgagctccttctgcgcctcaagctcggcgggcaggccgtgggtgtcccagccgaacacgcggttgaccttgcggcccttcatggtctggtagcgcgggatcacgtccttggcgtagccggtcagcaggtggccgtagtgcggcaggccattggcgaacggcgggccatcgaagaacacgaattcgttctggctgtggtcgccggaagggttgcgttcaacggacttctggaaggtgtcgtccttgtcccagtagtcgagaacggtctcctccatgtcggggaagctggggttcggcgcgacgtgcgcggtctcgccgccctcgctcgccttgggatatacgttttcgctcaccgtaaatctcctgttagtactgtgcactggtcctacaggagcgtcattgatggcgattgccgggcgccgacgtgtgccggctggtttcacgaatgtcacgtaccgaaccgtgggccgattagtcaatcgcctcgcagccggaaccgactgtgttccgcccggaacagccatgtctgccgttcctgcctacgaggacgatgacgagcgctggtatgcgctccgcaccgcggtaccacctcgcttatcgcaccggttgcgccgctccgaactgttgcactcggagccgcgagcctgcgcgaccgcttgtgttcggctgtctcgggccgatcccgtcggttctactgggcgattgccgccgttcttccgaagactccccgctgataacggatcactgcctcataacggtgcatatcctaacacgccacgcggtcaaatcgccgcccacggccacggcaccgtcaggagcccgatttagattgggaccggccaccacggaccgagaaaggattgtcggacaatgacgtatgatttcacgtccatcatgaacaggcatggcatggattcgatcgcggtcgacggactgggcaccgacccgggattcgcgccggacccgccacgcgagggtttcgacgtcatccccatgtgggtggcggacatgaacttcccgaccgtgcccacgattccgcaggccatcatcgaacgggcgaagcatcccgcctacgggtacttctcccccaccgacgactattacagctccatcatcgactggcagtccacgcgcaacggggtcaccggattgacccgggaggcgatcggctacgagaacggggtcctgggcggtgtgatcagtgcgctgaccgcgttcgccgcccccggcgacggcgtgctgctgcacagcccgacctacatcgggttcacccggagcatcgaaaacaacggctaccgcatcgtccacagtccgctcacgctggacgagcgcggcgtatggcgcatggattacgaggatatggacaggaagctcaaggagcatcacatccacgtggccgtgttctgcagccctcacaatccttgcgggcgcgtgtgggaacgttgggaaatcgagaaggccatggaagtgtacaaggccaacgattgcgtggtcatttccgacgagatttggtccgatttgactctggggaaccaccagcacatccccacccaatcggtcagcgaggacgcacgcaacaggaccgtggcgttctacgcgcccagcaagaccttcaatctcgccggactggtgggaagctaccacatcatctacaatcccacactccgggaccgcatcgtggccaaaagctcgaaatgccactacaacgacatgaacgtgctttccatgcacgcgctgatcggcgcctaccggcccgaaggccatgagtggctcgacgaactgaaggcggtgctcaccggcaacgtcgattacgcctacgactacatcaccaagcatttccaaggagtgagtctggccaaaccggaaggcacctacatgctgctgctcgactgcgagcagtggtgcgaacgccacggcctgagcctgcccgagttggagaaacgcggttgggatgtgggcgtcgattggcaggacggcagcatgttccaggccccctacagcatccgcgtcaatctcgcattgcccttgagccgcgtcaaggaggccatgcgccgccttgaccaatacgtattcaacgcgtaaacggcatgcatccgcgattgcggtgtcctggaaagacgaatgccgtcaacgaggttggtgcccgttggcggcattcgtcatacgttggccgaaccgggcgaaacccaagttgccgtgcgctatgaggtggatgccgccagcggacgtgtacatctgaccgcccgatatgccggtgccaccgatgcgccgacgctgccggcattcggattggaatggacacttcccaagcagtacgagaacctgcgcttctacggccttggccccgaggaaacctatcacgaccgtctgcacggtggcaagctcggcattttcgagcacaccgcggccgaagacaatgcaccgtatctggtgccgcaggagaccggcaaccatgaagacttgcgttggaccgaagtgcttgacgcccaaggacacggcatgcgtatcagccaggccggcagcgaacatttcgcggcgagcctgttgccgtacagctcgctcatgctggaagaggcgacccaccagaacgagttgccgccggtccgtcacacgttcctgcgcctgttggccgcgcaaatgggcgtgggcggagacgattcatggggcgcgcccgtccatgagcagtaccagctgcccgccgatcgcgcctacacgctcgacgtgaatctggaactgttctaacagcgataaagaagctccctctgacgagggagcttctttatcgcacagagggagcttctttatcgtgctggtacgaaactgtcacgcaccactagggtggtggagatgaaggtatggtggtgcagcgtgcgccgactggagatggcctcggcaagcatcgtaatcgcagtatcggccagctcattctggtcgatatcgtaactggtcaatgtcggcgaagtgtactgggcgatggcctggttattgatactgatcacactggtatcgcgaggcaccagcactcccgcagcggtaaacgcctgcagtacgccgactgcaatcgagtccgcagccacgatgaacgcatccggcatgtcatctcgatgatcgttaaccgcttcctcccctagagtgcgcccggtgtccacagtgaacgcgccttgcgcgtaaatcaggccttccgcatccagccccaaacgctcggtccaattgcggaatgcggttaatcggccgtcttccggatattcgtgcaaacccatcgtgaagccagtaccgccgatatagccgatgcgtcgtttgcccgaggacaccaacatatccaatgcgtccaaaatggtttggcttaaatccggttgtaccgaatcgaacaggctgggcgcaggattggtgtcgatgaatacgccatagggcaataccagatggagcttcaacagtctatccgaagagagtacggacggtccgatggagatgaagccgtcgaaatcaccggcgtcggcaatcagatcgtcgatatgggaaaacgacgtgagttccatgtgctgggctctggcattgtcgccgagcacggaccgtagttcatcgaaataggcgtccgccagttcttcctcgcgggtggcgttgtcgagtacggccacacggcgtggcaatgcgatacggcgtgatccggtagcgtagccaagctgctcgctgacctcgatgatgcgacgtcgcgtctcctctttgacagacaatgtcgggtccccattgagcagccgggataccgtggcctgcgagaagcctgatttctgtgcgatttccttcatcgtgaccatagttgagccttccacgcctcagtacgtaacaatacgcagtatttcagtaaataactttactacatagtgtaactcacgtcatgcgggtatgacgccgtatggttgcagcatcgtcgacccgcagcgctgatgagaacgtgcatgtttcaggccctccgataattatcgggcaggcgggaatccccagaccgtggagtcaatgcgctggattttcccggacttgtcaaagacaacggtgatgtccggcgcagtaaaactgccggtcgaatccccgaatcggtacggatcactccagtcgataacggcatgcatcgtcacggtccgagttttcgcgtcataggactcattcgagtactcgatactgttatgcgtggccgtagtcccgcccagaccgccgccattgccttgatgcatttgctggcaatacttcgtaaaatccgcgccgagaacattcgacactgcatagcgcctaaatgaacgtgttaggtctgcaccaattcacggccggcaatactccacacttctcagtaatcaattcgcaccaaaccgctcacgaatccgagcagcagtaccataagaggcttgcgcaccgaccccagtcgcggcgtacgcggaaacgtacgaggccaactgcgcactgtccgccaacgcatgacccgaggcaagtccggccagaaccgtgcccataaaggcatctccgcacccggtagtgtcgatggccgcaaccgcaactggcgcaatacgatagatatcatcaccatcgatgaccaccgacccatccccgccaagcgtaattaccgcctgattaaagccgaagtcatgcatctgccgcgccacatcagaccagtccagtccatcccaatcgtcatcgtcaggctcggcgatgtccagcagctgtgccatttcatgttcattgaccagcagaatgtccgaagcctcgataagttcagcgggtagttcagcaacgaatggcgaatcgttgagcaataccttgagcccggcatcatggcagaggcgagcgcatgccgtgaccgtttccatcggactctccaaacacagtcccagtacatcagctgaggtcagattatcccgcatcgattgaatatactcaacactgacgtaagcgttagagccgggagaataaacaatcgtgttctctcctgccgcgtctacggtgatgaccgtggtcccgctggccccatccacgtgccgaatataactggtgtccacaccggtatcgttcaatgcttcaagcaaaaaatccgcattagcgtcggaaccgagcacaccaaacaatcggactttggctccaagacgagcggccgaaacagcctgattccccgacttgccaccaggaagcacccgcaacggccctcctagcactgtctcccccggtttgggcagacgctcggtggtgacggtataatcggcattcatcgagccaacgacggacacggccccatgaatgcaatcaagagaaacaagcgtttcatccatagcaggcatgatattccctttctgaatgatagatgctgctggtgcggtagtctgttcgatcaacatgctccgcaccagcaggcgcaatcagacattgcgttttgccgtaaaactcttgcgaaatacgaacagtacaatcatcgacaacaccgaaaccgcacacataatccagaacatgttggaggtctgcgcttccacaccactgccaacaccgaacagaccacccttgcccatggtgtcactggccatgagactggagtatacgccgactccgatagaggccgaagtgttcatcatcagatcgagaattcctacgccacgaccattctcctcgaccggcaacgcatctgacgcagcgtcgtagattggcgtatatacagcggtaacaccagcaatgaacaagcaggcaagaaaagtcagcactccgaacccactcttaatgaatatggcagatcctgcgaagccgacaatcatgagcacgatagcgataaccagtgtgcgcatgcgtccgagtctgttgattactggaccagaaacgcatccaacaattgtggccacaatgtagaccaatgttagacacagcgaaaccgtggtcaacggcacgttgtagatctgctcaccaatcacgttgtaaatcggcacacaagcaaagttgaagaagtacagcacaaattgcagcagcagaatggacatatacgcaccattggtcacgaaagaacgacccaggaacggattcttgcctttccaaatccacagcacaaacagtacagcgaatacaatcgaggcaataatcatgccgactccggggaacgagaagtaaatggcaatgagcgcagcaaataccgccaatattcgcaatcctgcgccaacacacggctctcaacatagaaaaccgcgcccccaactaccggataagaattacttcaacccgataatcgaggtgcggtttttgcaggcgtaccgactactccagctccaccgcgccggtgtagagctgatagtactcgcccttttgcgcgatcagctcgtcatgcgagccacgctcgatgatgttgccgtggtcgagcaccatgatcacgtcggagttgcgtacggtggacagacgatgggcgatgacgaagaccgtacggcccttcatcaggttatccatgccggcctgcacgacttcctcggtacgggtatcgatggaagacgtggcctcatcgagaatcagcgcgggcggatcggccaccgcggcgcgggcgatggaaatcagctggcgctgaccttgggacaggccggatccatcaccctcaagcaccgtgttgtatccctcgggcagcatacggatgaagctgtccgcattgaccagacgcgcggcctcaatgcattcctcatcagtggcgttcagacggccataacgaatgttgtccatcacggtaccggtgaacaggttcacgtcctgcaacacaatgcccaaagacctgcgcaaatcaggcttcttgatgccggccacggagatgccatcatacagaatctgaccttgctggatatcgtagaaccggttgatgaggttggtcacggtggtcttgccggcaccggtggcgccgacgagcgcgatcttctggccgggcttggcgaaccaggtgatgtcgtgcagcaccggcttgtccgggttgtagccgaaggtcacgttggtgaagcgcacgtcgccgcgcagcagcgtataacgcccatcaggcgaggtgatcgcctgctccttggccttcatcgccacctcgcaggcggaaccgcgcagcttttcggcggccttcagagacctcataccatcgtcgccgatctcacgcttccacgcccagtggccggtctcatggtcgacttcggtcatggtgcggccgtccggcccaagttccacgttcacgagcgtcacggtgcccttgtcttcctcgatgggttcgtccatcaacttgaagatgcgggaggcgccggcgagcgccatcatcaccatggtcagctgctgggagacctggccgatcgggttgatgaacgagcgggatagggtcagcagggagacgagcgtgccgagggtgagcggcttgacaccggtcagaccgatgtcattgacgccggccagcgaaacggcggcaccgacgatggcgagcagaatgtagagcagatagcccatattgccgacgaccggcatggtcacattgccccaggtgttcgcctcggcggacgcctcaaagagttcctcgttcttctcatcgaaggtcttctgagtggcgtcctcatggttgaagaccttgatgaccttctggccgttgacggattcctccacgaaggcgttcacgtcgccgatccactgctgctgcttgacgaagtagcggccggaacggctcacgatcttgcgcacgatgaaatacagcagaacggtgaacacgattacgaacgcggtgaatggaatggacagccacagcatggacagcaatgccgcaatcgcggagataatcgaggagaacatctgcgggaacgactgcgagatggcctggcgcagcgtatcggtgtcgttggtgtagtggctcatgatgtcgccgtgctcgtggctgtcgaagtagcgaatcggcagcttctgttggtgggcgaacatatcgtcacgaatcttcttgagcgtgccctgttcaacggtgatgatcagccactgccaagcccaggatgccacgataccggccacatacaggcagcccatcagactgatggcgcgcagcaacggagcccagtcggggttcgattcccccaccatcggcaggatgtaggtgtcaatcagcgattggaggaacagcgcggatccggcctgcgcggcggcaccgatcaggatgcacaccacgatggcgataacgcgcaatttgtattggaagatgtagctgaagatgcgcttgatggttccggggtcggctttgcccatgtcaggctcgcgattcttgaaactctggtcgttgctcatcgtgcttctccttccttggtatcggctgcattggtatcagctgcgctggtatcggccgtgggcatggtcactgtcaccgtcacggtttcggacggctcagcggtagatgactcagcagcctgtccggcagcggccagttctccggtcttagcctggttcttggtctgggattcgtaaatggaacggtattcgtcgcaagtggtgagcagttcctcgtgcgtgccggaggccatgatacggccggaatccatgacaagaatcatgtcggattcctgcacggaggccacgcgctgggcaatgatgattttcgtggtgtccgggatctcgttgtggaatgcggcgcggatcagcttgtccgtcttggtatcgacggcgctggtcgaatcgtcgagaatcagaatcttcggcttcttcagcagcgcacgggcgatgcacaggcgctggcgctgtccaccggacacattggtgccgccctgctcgatgtacgtgtcgtacttatcggggaattcctgaacgaatccatcggcctgcgcgagctgcgcggcatggcgaatctcttcatcggtggcgttcgggttgccccagcgcaggttttcggcaatagtgccggagaacagcacgttcttctgcaacaccatggccacctgatcgcgcagcgcctcgatgtcatagtcgcgcacgtccacgccgccgaccttgagcgagccagagctcacgtcgtacagtcgcggcaccagctgtaccagagacgactttgccgaaccagtaccgccgacgatgccgatggtcatgccagaacgaatcttcaggttgatgtcgtcaagcacgggcttttcggaactgtcggagtagcggaaggtgacgtggtcgaattcgatggagccgtcggccatgtcagtcaccgggtgagccgggttctgcaccgtgctttcctcctgcagcacctggcagatacgctcggcagaagcctgagaaataatcaccatgacgaaaatcatggacagcatcatcatggccataagaatctgcatggcataggtgaccagcgaagtcagctcgccggtggacaggcccaacgccgcattattgccggaagcgacgatctgctgcgcgcccatccatgcgatgagaatcatcgaggcgtagacgcacaccatcatgatcggcatgttgaagctcatgatgcgttcggccttggtgaagtccttgaagatgcgttgggagatgcggccgaacttggagacctcgaaggattcgcggttataggacttgaccacgcggatgccctgcaggttctcgtcgaccacgttgttcaacgcatcgtaggtgtgaaacacgcgctcgaacacggggttcacgagcacgaccagaccgcacaggccgatggccagaatcgggatgcaggccaggaacaccatggaaatcgacggggagatacggaacgagaacagccaggccacgaccaccatgatcggggcacgcacacccagacgaatgatcatcatgtaggcgttctgcaggttcgtcacgtcggtggtcagtcgggtcacgatcgaaccggtggagaaccggtcgatgttggtgaagctgaagccctgcaccttctcgaactggtccttgcgcaggttcttggcgaagcccgcgccggccacggccgcgtactttccggacaggaagccggcacccagcgaaaccatcgcgcacatcagcagaatcacgccgaacttgacggtggccggcatgctgccaccggtgataccctcatcgatcagcgaagccatgatggtcggaatcaggatttccagaataccttcgaccgccacgaacaccggagccaggatgctggctttcttgtattcacgaatcgaatgacccagcgtgcgcagtacatgcttaggtctaccgggttcgacggctttgcgcgcctgcgcgattgcctctgcggtatcgctcattcgttctcctccttcgtgtcagcaacctccgctccgtcttgatcgggagccatcaccacaggtgactgagggagcgtttgatgttcaaattcgcgttgtgcgcgctcgatgttcgcacgcatgcgtgcgacgtagtcgcgcagagcggccttctctccatcggagaagccgccgaccagcaaccgttcgacccggtcaccattcaccttgagatcagcgacgatcgcgtccgccttgtcggtcaggacgatgcgcttgcagcgcgcgtcatgctccaccgattcacaggcgatcaggcccttcttctccatcagggccagcacacgcgaggcggtggaccgggtgatgcagaattatacgcaacaattcatgataaagagacccatagacaacagttgtacatacaacaatcagcgtgttgtagtatttccggctcttccgattttggcgtgtaagggcatgtgtcagaggtgggtttggatggcgtgtctgaagccgccggcgtgcagcaggcttctggtgatggtggcgtcgaggttgcggaagcccagggccatgcccctgagggtctcgagccttccgctacggcaggtccttacgttcgaacacccacatggtctcgtccgtggatctgttgtcggtaagaatcgtcaacatgaaccgctcaccgtcgttcttcacgtaaccgcattgcactgcaccttccgacttgagccggctacggacgacatcgtagtcaagcagtcgcaggagaccttcttgatattcgggagcaatcctcacataacaaaactcacgtaatgcttcgcggaaggaaccgccatgaccatcaagcatacgctgaaagaaatcgggcaccatgatcgaacgctgcgtatcggtattcagattgactataaatgacaccggataacgtacattcagatgttcaagcagcattttcatatcctcatcgcgcaccagaatatcctcaagctggttgttgagcatgcggagctggcgtttgcctccgccattgacgtaataccgtttcttgtcctgacgcatacggatttccgcctgattgatgaggtccggaaggccctctccatcatcggattcggccatgcctacggatatatcccaatcaccttccaggaaatcccgacgcatacgcgccatccgacgcatactttggctcaccgtatggttgcagctgacaatcacgaactcatcgcctccgatgcggtagatcctgtcgtccccgaagcaggcacgcatcgcattcgcaagtccgcacaacgccgaatcgcccttggcatgccccaaatggttgttgatttcatgcagtccgatcatgtcgacgtacaccaccgtcaacggcttgtcatgcgtggcctggatgtactccaaatcgtcatcgtaggcattgcggttgagtagtcccgtaagcgagtccctgcggtaattatcggcatcgccgcatgtcaatattcccatgggcagattccgtccgaccagcaccacagcccaagggtcggatggggagcatgcgtgagcgggaaccgccgcgaatgcgactacgccggttttggccaatatctcgctgcggtatatccccagcacggtttcctgcctgtatagccgttcccggatcgaagacaaattcagatcggcgaagaatcgtccggcatcgtcaggatgcaccacccggttggcggtcaccgcacgcatgtaggcgccgaattcgtcgacttccggatcgggaatcaccccatctcgtttgatggcacggtattcgcctgtcgccacattcaaccgagatatttccgccagaccatcagccaggatttcaaaggcgtcggccgccaacgcggagactcccaacagcacccggccgttgacggtcacatgaccgcgatgcaggtaatcgcacgacatatcccaatagtgccgaccgtcggcacgctcggccaacagcgtttccatccgtttcaccggcagtggagggtagaaataatatccttggatgtatccgcatccgactgcttccagccaatcgacctgttccttggtctgggcgccctcggcgatgaccatcagatgcagcttcttagccatcacaatcatggattggatgattttcacgcctttaccggcattctccttgctcagctcgatgaacttcgcgtccagtttgatcatatcgacattaatgtctttgagcatgttcagcgaggaatatgccgaaccgaaatcatccatcagcaccacgatgcctctcgcatgcagtttacggatggtgtccttcaccatggacaggtttttcgccacggtgctttcggtgatttccacccgcaacagacgcgcgtcgacgtcatattcgttcaacagcccgccgatcacgtcggccacatccatctggtcgatatccatcatggacacgttcacggaaaccggtaccagattgcgtccttcacgctcccatctgcccagcatctcaaccacgaagcgccatacgaacatatccacatggcagatacgcccggctctttccaataccgggacgaaccatcctggggaaatcacgccatatttggggtgattccagcgcaccaacgcctcggctcctacaatggttcccgtctccgcattgcatttaggctgcagataacagcagaattcgccgttttcgagcgcatgatcgatgtcttcgaatgtgaaaaaaggcaccagctcgtcgttagacggcattccgcccatttccggcatgtcggtcactcggtcctcccctcgtcgaaaaaactatccgtggtattcgccgttgtactgtatcagtgttacgtcctcgacgccgtcaatcgcacggatacgttcggcgaacgtcatatccttgtcgtcgcaaaacacttcaacggccatttccgtgcgttcgctacgcatggttttggatttgacgaagaatttggtacgtccgaacgcgcgcgtgatctcatcgccaaccatatcgcccacatagtggatcaccgcaatgtacacgcgtcccttgtcctgatgcgaataaaacaatgccaacataccgatcatcaccaatccggcaacaatcaccagcacatacatgcccgcacccgccgcgatacctgaagtaatcgaccagaacaaatacagcagatccatcggatccttgaccgcggtacggtaacgcacaatcgacaacgcaccgaccataccaagggaaatcacaatattcgtactgatggacaacgtgaccatgcaggtgagcacggacatgcccaccaatgtgaccgcgaaactgcgcgaatacaccacgcccgtgtagaaacggcggtacacgtagtaaatgacgatgccaacgatcaacgccaccagcaatgccaacgccattttgggcacattgtattgactgaaggatttcagcaccgactttttgatcatatcattaacgctcataatgctgctctttctctcttgcttccttgattcgtaacgtttgatttcgggaaatgccagccgatcatagactgtctttacaggctcggcacgctccagccttcctgccagtagccgaatccccgcaaatacgaggctttgtcataacagagcacgtatttcgaagccgacgtcaactcctgagctttgccaggcaacagatcgcgtaccatctgcggcaggaattcagtgaatttgacttccatcaccagttttcccggctcaagcacgggcagtaccggcagtgtggagtcgaaaatatcgaatcctccaaccgccgcacgcacattcatatcgaaagtgacacgcacagtaccggcgtcaagaatccacggttcgcgctcataatcgacgatcacacgcggacgcaacacattgcacatgcattccacataaagctcgcggcacaattgatgctcgctgtcgcgcaaaaactcgtaatcgccggcaagaatgcggtcgaactgctcatgggtgagcggcgcatcctccttgtagatccaactgtcgcttttgcgtttgcgttccagtttgatcacacggtcgctgtaatcgtagatgcgaatacggtatttcttgcgcagcagcacaccatcgactttttcccgatatgcggtgttccaataatcgtcgaaatacaggctgcgaatcatatagccgcc

SEQ ID NO: 2894 - DNA, 2943 bp, Unknown
  R36_18m  MAG No. k141_41492
ccaggtcaacgccgaagtcgagcagatccgtcacgacatcgccgctcagcaggatgaggccacgaagaaggtcaacgaactcctgcagcacctcgaagagcgtcgtgtggcggccaagcgggaagccgatgagttggtcggccaggccaagaacactcgcgaccaagccgattcatatgccgcgtccaagcgcgaggaggcggacatccaggccgccgcaatcgtgcataaggcgggcgaggaagccgatgcgcagatcgaggagcgtcgtgccgccgcccaaagcgagcttgacggtctgtccaagcgcatcgccgatctgcaggaacgcgagtccgtcatcacccagcgtgtttcggaactgcgttctatgttctcgcaggcgttctccggattcgctttcggtggtaatgcggcggcctctggtcagagtcaggaagccgctgccgtggcgtcattgccggtggtcgcgcccgtcccggaagtcaagcctgtacacaacgaggccgatgatcagccgggtgagttgagcggaaacgagtcggctgccgacgatcacaatgagacagatgcggcaccggctgattcggctgattcagctacgcagaatgagcagtccgaatcgtctgagccgtccgagcaccagacacagggcgaaccggaggccccgactcaggagaatccagccgtatctgagcagaacggcgaatgacaggccttcgattagactactagcggtaagaattacggcacctgcgctttcgagccaggtgccgtattcgtttggatctgcgccacaagcgcaccatcacagaaggagtatgacatgagtgaattgacgcctctgaccggcgaagcactgaataccctgcgcggcgatttcgcacagagcggcaccaaccgtctggccatgaacgcggtgaccgccgccggcatcgacaaggtggctcgcaattatgaccgcgctcgtctgatgcagcgccgtttctccaccatcgttgacaatggcgaagccacccatcaggatcgctccggccgctgctggctgttcagctccctgaacgtggcccgtttcgtggccaagaagaacatgaacttgaaggagttcgagttctcccagaactacgcgatgtactacgacaagctggagcgcgtcaactacttccttaaggatgtggccgctctggtggctgccggagagccttccgactcccgcctgatgcagcacctgctcgccgacgtgatgggcgatggcggccagtggaccatggccatgaacgtgtacaagaagtacggcgctgtgcccaaggacctgttcccggagaccgaatcctccaagaacaccggtgaaatgaacacccagctgcgccacatgctgcacaccgccgtggcgcacatgtacgccgctgacggcgatgcctccaaggtcgaggcgattattgccgacgccactgctgccggccaccgtattctgaccatccacctgggcgagccgccggtctccttcgactgggaatggaccgacaaggatggcgaattccaccgcgacggcgagattacgccggttgagttctggaagaagtacgtgggtccggctggtcttgaggactacgtgtgcctggtggatgatccgcgcaccgagcacgccaagggcaagaagatcggcatcgagcacctcggcaatgtggctggcggcgacgccaccgagtacctcaacgtgccaaaccagttcatgaaggactgtgtcaagcagattctcgttgagcagggcatcccggtatggttcggtgccgactgccacccgttcatggaccgtgagaacggcgcttgggccaccgacctgttcgagtacggccgcgtgtacgacgtggacttcgatttggacaaggaagtccgcgtgcgcttcggtgactccgccatgaaccacgccatggctttcgccggcgttgacgtggccgacgacggcaccacccgccgctggcgagtggagaactcttggggcaccaagatcgccgacaagggctacttcaccatgtccgacgactggttcaccgaatacgtctacgaggtagccgtcccgaaggccctgttgccggaggaataccagaaggccctcgaagagccagccaccatgctccccgcatgggacccgatgggcgccttggcctgacttcgccagcctcccggaatcggcctgacggccgatgctgtgttttttcgcagcctgccggctgctagggtctctccctctgtcagcgcgaagccgctgacgggggggaggccgcggtcgcaggccgcacaacaacacagcatcgccgcaggcgagtccacgcaggcgagttcacccaaagtccataaccgccggcccaacaagcagtccccgtaacagactgctatagttgggcttttgcgtctatagcgccataccgacggtacgtatacaaggaaaggagtcgagcaatggcagcactacgtggtccggatagttccgaggatgaacgtcgtttgggggagcaggccgtctttcccgagaccgtcgatgtcaacattcgtcagcttgaccccattcccgcgccgcgtgccttcctcagggagcagccgctcaccgatgagatgagcgagctcgtgctccactcgcggcaggaaatccgcgacgtgctcaacggccgtgacgatcgattgctcgtcatcgtgggtccgtgctcgatccacgacccgaaggccgcgcacgaatacgccgagaaactggccgccgtcaagcgtgagcttgaagaccgtctcgtgatcgtgatgcgcgtgtatttcgagaagccgcgcaccaccatcggctggaaaggcctcatcaacgaccccgatctggacggtcgcttcaatatccgtaagggcatgtggctggcccgcaaggtgctcaccgacgtgctgagcctcggcctgcccgccgcc

SEQ ID NO: 2895 - DNA, 6314 bp, Unknown
  R36_18m  MAG No. k141_41538
atggttggattcacattgacgtggttccgaccatccgcagatctgcgactacaagggagagaataatgttgaacaacagggttcgtttcgggaacatgaagcgtgtcaatcgtgcggtttgggcgttgaccgtgattcttatgatggttctgggtcttgtgcttgctggatgctcggggtcttctgacggtgcggacggcaaggaggaatccacatattcgaaaattgtcgccatcgccaagaaagggcgttcgctggccgatgtgaaagacgagctcaaggatgccggtttttcctcctctgattatgaggtgaaaagcgacacggacaaaatggtgctcagagcttcgaactgggttgttcaatccgtggaagatggggacaagcctgttatcaatgttcgtaaagccagcgatatagcgcaggaggaagaagcgaagaaggtagctgaggagaagaaagcagctgaagaggcagccgccaagaaggcagctgaagaggcagccgccaagaaggcagctgaagaagaggctgcaagaaaggccgctgaagaacaggctgccgcgcaggccgaggcccagcggcaagctgaggaggccgctcgacaggcacaacagcaacagcaagcgcagcaaaatgtgcattatgcgaattgctctgaagttcgtgcggctggtgctgctccgttgtatcaagggcagcctggatacaacggcaagttggaccgcgatcacgatggcgtggcctgcgagtaacggattcgatatttcggcgactcagcgcttgttcgggccgccgtccgggaacatcaagtaggtgatgatgccggcggcggttccactggccaatgcgccggtgatgacggcgagagcctgcatcgccgtgctgagcgtgggcttgcccgttgcggcagtctttgaagccttcaatgtggcggcactgggcttgcgtttctcggtggcggcgttgtcggcaacgttgccaccgtccgtattgactggggcattgtcggcaacggcctcgccgtcctgctcttgggcgcgccgttcgcgaatgcgttgctcaatgggatcgtcgaccaaagtcttgatgatgcgtgccagatcgcggtcttcacgacgtgcgatctcggcgctgaacaccgtacgtaaagcgagatactgcagtttggtcatcgggcttttgccggtctccaagttagacaccgtctgtcgcgcgactcccagctcgtcggccagttgctgagtcgtccatccggctaccttgcgaatcggacccaggttctcctgaaacttatcaatccaccattgttcgatttcagacgtcgccattacgcacctccttccacgctgtcaccagtgtacgttacctgtaccgaaatcaatccaaaaaacagtgttcatgtgaaattcactgcgtatttgcgctttcgccggcttaccgagattagccttagacaaggaataacagagtagaagcagaaggtatgcgcgtattcgatttcgacggaaccatctatgatggcgaaagcctgttcgacttgtacctgtattccgcccgccacgacccgaaagtgttccgctatatcgcccccgtgctgcggtacgcggtcaaatacaagcttggccgggccacgcttgaacaaatggaatacggcgtgggcaagatgaccgaaggctatctcacggaactgagccgatccaaacgggtggcgagcgtcgaacagctcgtggacgatttctgggaccgatattacgcacatatcaagccttggtaccagcctgagtcggacgatgtgatcctcaccgcatccttcggtctgacggtgggggaggcctgccgcagactcggcgtgaggaatctcgtggccagcgaggtggatgtggagacgatgaaggtcacgtacctcaacttcaacaccaacaagaccaaacggttccgcgaactgtacggtccggacgccgtcatcgacgagttctacaccgactccaaattcgatcagccgatgatcgacatggcccggcacgcgttcatggtcaaggggaacaccatcacgcaagtcaagtaggaaacaacagaaaacaacacaacgtaaccaataacgaaaggggaacatatatgagcatgccgctcgatctatacgtaatccggcatggcgaatccgaagcgaacgtcatcgtccaggcgggcgagcagggcgacaattccctgtacacgcaggacaacgtcaccgtacccgaccgctcctggagactcaccgccaccggacgcaagcaggccgactgcatcggccgctggctggtcagccagcagcagctgttcgaccgctacatggtctcgccatacgtgcgcacccgcgaaaccgcagccaccatggccctgcccaaggccaaatgggaggagaaccgtgtgctgcgcgaacgttcttggggtgaaataaacaccatcaccaaggacgaattcaaaaacaactacgcacgcaactggaacttcaagaataccgatccgctgtactggcgtccgccggcaggcgagtcgattgccgatgtggccgaggaccgtgtgcacaacatcctgacctcgctgagccgcaaatccgattcggaatccgtggtcatggtcacccacggcgacttcatgctcgccctgatgctcaccatcgaggatctggccgacgaggaattcctgcatcgcgccgactcggacgactggaagatcaccaactgcacctgcctgcactacacgcgccgcgacccggaaaccggccgcacctccaagcgtgtgcgctgggagcagaccgcccggcccgtgctcgacgagacgaccggccgctgggaggtcaaggtggagccgtggcgcgaattcaagcgcccgtacctgtccaatggcgatttggtggatgtggtgcaggccgtcgatccgcacctgctggagtattacggcaaatagcctttcccggaagagagacttcacaaaatcttcgtgagctagaatggtgcgtggtgcggctggttgtgaatgccgtgccccaagcgagagcgaggagagtagtaatgtccaatatcttccaatggcaattgcatggcgacggcaagacgctggcgcccggcgaggtcgtcgagcccgatgaacgtctgactttggtgcgcaccgccggtatcggcgcacagcacgtcatcgccatgttcggtgccaccttcctggtgccgattctgacgggcttcgacccgtccaccaccctgttcttcacggctatgtccaccgcactgtttctgctgatcaacaggaacgtgctgccgagctatttgggctcgtccttcggcttcatcgcaccgatcaccgcggtcaccaccgccaacaagggcattgcggtcgccagcttcggcatcatggtcaccggtattctgctggccctgattggcgtgctcgtgcattacgccggctccaaatggatcgacatcatcatgccgcccgtggtcaacggcgcgattgtggccatcatcggtttcaatctggcaccttccgtgtggaccaacttccaagccgcgccggacaccgcactggttaccctgctggccgtgctgctcgtggccgtgctgttcaagggcttgctgggtcgcctcaacattttggtcggcgtaatcatcggctatgtatatgcctgcatccgcggccaggtcgacttctccgccatcggtgacgccgcatggatcggcttcccgaagttccacctgccgcaggccgatttttccatccttcccatgttcgtccctgttgtgctcgtgcttgtggctgagaacgtcggccatgtcaagtccgtggcccagatgaccggccgcgactacgacaaccagatcggcaccgccctcatggccgacggcctgggcaccacgctcgccggcttcggcggcggctccggcaccaccacctacggcgagaacatcggcgtgatggccgccaccaaggtgtactccaccgccgcctactggtgtgcagccgccttcgccctgatcctgagcctgtgcccgaagttcggcgccgtgatcaacacgatccccgccggagtgctcggcggcgtgaccacgctgctgtacggcatgatcggcatgatcggcatccgcatctgggttgagaacaaggtcaacttcgacaagccgctgaacatcatggtggcagccatcaccatgattattgccatcggccaattcgcgttcactgttggtggcatttccttcaacggcattgccattggcacgatcgtgattcttgtggcctaccacggcctgaaggccattggcaaggcaaccggcactatcgccaaagacgatccggatattttgtagtgtgttttagggctactgggccgtattgtggctcagcccttttgcacaatggcttctaccttcacgggtaggggccatttgcgtgttccatggggcggtgctcgccttacgtggtggtagaacccatggggcggtaattggcccatggggcggcaaacatcccatggggtggtaaaaccctcatggggcggtaggtgaaaatggctttattctgcggtttcacaatttcttcaaaccgccccatgggcaagttaccgccccgtggggtcataagtaaagagtggaatgacagcgtggcgagcatcaagcaaagtagggggcttacgctaagctcggaaagcttgcgtaatttgcgtaacctttgacatgaaaggccactgtgccccgtaataatttcgatgatcgtgacgattccgctgatttccagatgaacgacagcgcggaatcccgcccccttacctttggcgaacttggcgtacccggaccgctggtgcgcgtgcttgcggcagatgacaagaagaccgcattccccattcaggccgacaccctgcccgattcactggccggccgcgacattctcggccgagggcgcaccggctccggcaaaaccctcgccttctccattccgctggtcacccggcttggctcctatgattcgcttggcgaaatcgcgatggaggagttccgcaaggaaatcaagcgccgcaagaaggccagcttggaagagcgccgcgctgacgatttcctgccgcacccgcgcggcctggtgctggcccccacccgcgagctcgcgaaccagatcaacgacgtgctgatgccgctggcccacacgttcggcatgaacaccaccacggtgtacggcggcgtcaagtacatccaccagatccgcgatctgaaggccggcgccgatatcgtggtcgcctgcccgggccgccttgaggacctgctgcgccagcaggcgctcacgctctcgtccgtcgaagtcgtggtcatcgatgaggccgatgaaatggccgaaatgggcttcctgccgccggtcaagcgactgcttgagcagatttcgcccgacgcccagcacatgctgttctccgccacgctcgatcacggcgtggatgaagtggtgaacaccttcctgcacgatcccaaggtgcacgaggtcgattcggccaccgccgaacccgacctgatgacccaccacgtgttcgaaaccacgcgcggcgacaagcacgaactcgtgcgcatgctcgcctcgggcgaaggccgccgcatcctgttcacccgcaccaagttccaggccaagaagctcgccaagaacctgacgcagaacggcattccggccgccgagctgcacggcaacctgaaccagaaccagcgtgatcgcaacctcgccgcattcgattccggcgacgtgcgcgtcatggtggccactgacgtggccgcccgtggcatagacgtcggcggcgtggagcttgtggtgcaggtcgagccgccggctgacccgaagtcctttgtacaccgctccggtcgtaccgcccgcgccggcaaggcgggcgacgtggtcaccctcgtgctgcccgagcagcgccgcgagacgcgccgcttgctgaaccaggccggcatcaaaaccaagatgatcgaagtgacccacgattcgcccgaagtgcttgagcttgtgggcgaccgcgccgagcgcgtggatggttggagcctcgacaagtcgcagcccgtgggcaacccgcgcaagggcaagaacaggggcgccaagaacgcggcgggcgacgagtccggccgcggcggcaagcgcaagcacaatcgcaatcgcaaccgtgacgagcagaacgttgccgagaccgagttccagcacgagaacgcaggcggcgagtttgttgccgaaggcgagccgcagcgcaagcacggcgacaaggccagcaagaaggccgtgaagaagaaccgcaaccgtgcggaacgccg

SEQ ID NO: 2896 - DNA, 7795 bp, Unknown
  R36_18m  MAG No. k141_42157
gccttgcagcgcgtcgtggttcatgtagaagcggcgcagctcctcgtcgtcatgcaccacggtgatgccgtggccgccaccgccatcagtgcgcttcatcatgatcgggtagccgtgggtgtgtgcgaagtcgagcagcgttcgcacgtcggtcaccggttcggacaggccaggcaccggcggcactttggcgcgcagagccacgcggcgggcggtgatcttgtcgccgaggtccacgagcgcggtgtggtgcgggcccacccagatggcgccggcatcctcgactttctgtgcgaagctcggcacttcggagaggaatccgtagccggggtgcacggcgtccgcaccggtcttgtgcaggatgtcgatgagcaggtcctcgttgaggtaggtgtccttgtacgtgtcgccggagagcaggtacgcctcgtcggccatgtccacatagcggctattgcggtcctgttcggagtagacggccacggtggagatacccatctccttggccgtgcgcaccacgcgcagagcgatctcacctcggttcgcaatcagcagttttttgacagtatgagccatagtgtcaaattgtgctctccatataaaggagagggcaagccgcgttcgcacaaaagctttcacgcccttttgtaggctacgaacaaacgcgcgcgtaggttccggcaacgtaaccgttggcgccggctatcaaaaacgttgcaaatccgccgattgcacatccttgcgcgccggttcaagaagttgacgttacggttgcgttcgtcaacttatgacaaatcgaaatcgacaattttgtaagttggtacgaaaccgcacgaaatcgaacacctctacgatggcaaccgtaagttcgggggaaggctcatctgcgggcgaacggaagacgaccggaccggcatcggtccatcgccgcacgattcgcccgcacagggccggattcatttgggaccgtccaccatatggacggttcggactgtcggggataccgcacgacccgccggaacctcccctcatccatcgcataccgcccgccgttcacggcgatatcacacaacataggggttattgatatgcagacttcacacaccaccgcatccgcagcggccaccacgccgctcgcccgtcgtatcgtcgccgcatcctggaagccggtgctgttcgccgtgctgatgtggctgtccgcggccgccggcgagattccgattccgggcacgccggtgccgatcacgctgcagacgttcgtggtgatgctcgccggtctcatgctgccgtggcgtcaggccggtgccgccgtcgccacctatctggcggccggtgcggtcggcctgccggtgttcgccggcggcacctccacgctggccctggtcggcccgagcgccggcttcctcttcggcttcctgccgggtgtggtggtcatcgccctgctgcgcggcaagtccgacacttcgtccttcgcggccgccgcgcgcaccgcgggccgctacctgctggccgcgctggtcggcggcgtcgtggtggtgtacgccttcggcttcatcatccagtccgcgttgaccggtgcgccgctcgccgccgtggccctggcctccatgggcttcgtcgtcggcgacgccatcaaggccgtggtggcctctctggccgccgccggcctgtccaagctcggtcgctgacctgagctactagctagctactggccggctattacagcactcccacatcggcggtgcggaccgtatggtccgtgccgtcttgtgttctcaggatcagtgaggcgtcttcgttgaggccgatggcttcgccggtcagcgtggtgccgtccgtgaaatgcgcctcgacctgacggccgcgcgcccagcacaccgccttcatttcctcgcgcaacgactcggcctggcccttcgggtcggcgatgaacttcgccagtcgttcacggaagccctcgacctgacgttcggccaccgcatcgcgcatctcgccaaacgacggcaagcccgtgacatgcagctgcagcgaagtcgactgcggcgtgggcagccaacaggcacccagcgccagattcaggcctacgccgaacacgatgacgacgtcgtcatcggcatcagcatcagtaccggacgacggcggaatcaccagttccgagagcagcccgcccagcttgagcccgtggcagaacacgtcgttcggccatttgagttccagcaagcagtccggctggttcggcgcggcaccgtattcctcgatcatgccgttcagggcgtccagcgtgaccagtccggcgatcatctgcagccagccattgacggattcgtcggtggcgatcgcgcgcggaatgcgcatggcataggacatcgtcgagcaacggccgggctgactgacccacttgtgaccattgcgcccacggccggcggtctgccggtcggcggccaccacggccaccgccagttcgccatcctggtggtcgggcagcgtcaacgacccgtcgccgatcatctgcgcggccagcgcgttggtcgaatcggtttcgtccacggcgaccacatgatccgcgacggctgtagttctgggtagctgcggcgttgcagctttcaacgcaatcatcatgggcactacgttacctcggttgcgccgttttttgcccgcgatattccacggaaaagcgcacaaaatcaaccattttgggccggacagcccgtgttagcgttcacaacttcggaaattccgcattcgccgagcccacgcatgcacccggccgtcgtattggcttgcgaacaatggcgatgcccggcagacatcgaatatcaaccgttgacctgtgcggctaccatatattgtcatgacgtcaccagccaccgcgaagcttgccgccgtatccagccgccagtcccacccgcatcttgcgcgcgtgggcgctgccgcgcgctggacactggccgtgctggcctgcctgtggcttgcactgtgctcggcggtcggcccgctgtaccgggacgaggagaacggcaccctcgcccattggaactgggccaataccgcaatattcgtcgtgtcgttcctgatatatctcggaatcatcacgctgatggcgcgattcgcagcaggccagcgcatactgccgaagaccatcggcgagcgcctacgccaccatcagcagaatagcgaaacatcacggcccgccgccgatcagcaggccagccaaccagccaagacccgtcgtaccgttcgcgctatcgtcacgtccaccgtcactgttctggaccgctggatcacacgcggcacgaaccggttctggaagcttatgctggtgttttttgtcggctggctctgggtgccgaccactctgctggccgcattcggcgcggacctccgctcacagatccgcgaattcagctgggcctggaaccagtggaccggcctgaaacagccctatatcggcttcttctccttcgtgccgatggacatctaccccaccgcgcactacatgtggccgtccgatcccacgtatctgaccgaccagcacaatgtggtactcactgtgttctatggcgcgatagtcacgtttgcgaggcatctgaccggctcaaacgatgccggcatcgtgacgttggctgccctgcagacgctgttcgccgtgttctgctgcgctgccgccgccaatcgattcctgaaccggccttggataggaaaaacggcaacggattccgccgttcccccacaggccggaggattggccagattcctgattctgctgttcttcatggtctgcccgctggccgtgttttccactatctccatcaccaaatcgccgctgttcgcgttctcgttcgtctggtggttcagcgtctggtatgaactcgtccagacctggcaccccgccggcacccgcaaacatcctcagacccctgccatcgccacgcccgtccacttgccgtgccacagcttcatcgccttcatcctggccacgtcggtgatgctgatttccgcgaaatatgcgtggtacatcatcgctctgcaaatcgtgctggctctgatcgccgaccgcaaacgctgggcgacttacgtcgtggcgctgctcatccccaccgtactgattcacggcggcatctccttcgccatctcctctggtgcgatcatcggcggcgatccaatcgaaagccgcggcgtacagctgcaaatgatcgcccgcgtggctcagcgcaatccggacggtatttcagacgaagccaaaaagaacctcgcgcccgtcttcaatctcgatcagatggccgacgcttactcccagcaggatgccgacccggtgaaatcctccggtattcaggccaagaaggtcagctacaagtggcgcacggtgacgcccgaggatatgaccaatttcaacaaggcatggttcgaaatcgtcaaggacaatccgatcatcgcgctggatgcgttgctggccaaatgcttcggatacttcaatgtgaacgatcagccgtacgtatcgatggattattacgtggccagcgattacgtgcagaaaaactccacatggatcaaggattacaaccatgactggcgtgagcacatcgccggcttcactcgcgtatggggcagtattcccgtgctcggctggcctacgcacggcaatttctacgtggtgatgacattgctgatcggcgcggccgaggtgattcgccgacgttggctcaccctcatgacccatattccgctgctactgctgatgggcgtgatgattaccgcgccggccaataatttcgagcggcacatgttgccggttgcgtttgtattcggattcgtggtgctgacgtattggcgagagtctttggctgaaaggcaacgccaatcagcgacgctacactagtgactatgtcagattttctcgaacttcttgctgccgacgttgccgattcgtccggtgcatccggtatgccgggtgcgcccgattcatccgattcggccgcacccggcatcaccgcgaccaaccgcgtacgcaccgtgctgttcgagtgcctgttcaatcatctggccgacgaacgagtggagtccctgttcaccatcctcggtttcgagcatgacttcgattgttacaccatcgccggataccctgcccggtccgccgcacgtacggccaaggaaatcgagaaaatcgtggccgatttcggcggtgtgtgtctgaccgccaagcgcccgatcggcaacagcaccgccgtagtggcgttgattcgtccggtcggtgcggccacgccggaaatcatctgcaataccatcgccccgtcgttcgccgccgatcggccaatcgccttgggtccacagcgcaccggtgccgatggcgcgatgcgttcgattcaggccacgctctactgtcttcaggccgcgccggccctggccgccaccgtgcagccattgccgcgcccgttacgcaccgacgacgccctgcccgaacgtgcgttgatcggcgacgcggacgcccgtgacgaactggtccgcgtggtctacggaagcctgacagcagcaggcccggatgatccgacgctgctcaccgtctccacattcctgaagttcggcggttcgctcgagaccacggccaaggagctcaacgtacatcccaatacgatccgctaccgtttgaagcgcgccgccgaatccaccggctgggatgccaccgacccgcgcgaggcgtacgtgctgatcaccgccatcgcgctgggtcgtgtggccgaagcgcagcggaccgcagcgtagtcgggcagaagcatgaccagcagaaccgtagccggcaaaggccatagctgaccgggcataaccgtccagcccgacagcctagcgggccgaatcaggctgcctgaatctcgtgtacgccatcgtgcagtaacgcggccaaggattcttgagtggctaacacttcgtccacgaatccaccggcggacaggctggcgatcacgcgaccggactcgttgtccacaatcggtacaccgacggcaccgacacccaacgtcacatcctcatccgacagtgcatatccacgttcgcgagtcaagcgaatatcctcgcgcaactgttccacactgaccagcgtgttctcgttatatgccggaaacggcactcctgcaagatagcgttcgacatcggcatcctcgaaatacgccaaggccacgcggccggccgcgccagcatgcagaggcagcacgcggcccgggcgcaggatcagcgaatcgatggcatgaccttgcgcacattccacgcataccaattcagtgccggagaccacactgaggaatgaggtcatgccggtttgcgcggtgatggcatgcatgaccgcaatcgcaggctgccattcggtacgagacgtgcgagcggcatcagccaatcgcagccagtccagtgataatgagtagttaccatccgtatccgctacggcccaccccacatcgaccagtccatccagcacgcggtatacggaggatcgcgggatatcacaggcgtcggcgatatctgccggcgacaggccattctccgccgccaatgcgtccatcacacgactcgccttgtctaaagcgcgggtcggttcacgtttgtcttccgccatcgtcgacgttccttcccctgacttatccctgactcatcatattcaactgttcaggccaagatgatcaccactgtatccaaggcctcgcgacacctcacggccggcagtctgcaccaatcgcaccatgtcttgagccgatgccgttgccggttgcccatctaccagacaggccagctcaggttccaaggagcgggaaaggccactcagggcgattgccgcttgaatctctccggcgtgattgaataccggtacgctgatagtcacggagccggccatggtctggccgacgtcataggtgaagccgcattcgcgtatatgacgagcctgtcccattgctgtggcacgcatcgtggagaatgtgccgccgagctcgttggtataggcatagtgttccaacagctgctcgtagcgagccgggggaagccaggccgtcagtacatgagagggagcgctcatgctcagaggcaagctattgcccaccagctgtgcatagctttgcaatgtctcacgggtgcgtgtctcgatgcacaccgtgcgcaatcgcctccgaacgaacagaccccagatgccgaactggccgtgatgggcgcggaaggtacggcgagcgatctgctgaatgtccagtctgctttcgatttggccgccgatacgtacgcaatcgatgccaagccgatactcgccacgattgatgccccgttccacccaaccgactgcgacgagattatccagcaaacgatacgttgagcttacgggttcaccagtacgttcgcttatggtttttgcggtgcttggtcccagttccgccaatacatcaagtactgccttggatttcaccaatgcatctacgctacggtcatcacggcttggcgccaccatgcgcgtcacctcctgacctgtttgttgatacctcagacatcttaccgggtattcagcgggttgccgcccaaaacgcactgggccccgacgggatactcctgccggggcccaaggacgcgagatacaccccccccccacgcgcaagtgtcctgatatgcgggaagccccggtacctttggggtatcggggcttcctgtacgtgtggtgcggcggcgtgctactctcccacaccctgtcgggtgcagtaccatcgccgtgccaggccttagcttccgggttcggaatgggaccgggcgtctctcctgggccatggccgcc

SEQ ID NO: 2897 - DNA, 8883 bp, Unknown
  R36_18m  MAG No. k141_42497
atgagggttgacgctgtcgcgcttgtgttcggcgcggcgttcggcatacttggcgaccatgcgttcgcgctgcaattgtcggttgatcttactggttttggccatgtccggctccttgataaggctccggggcgcgggaatcgcgccggccggagctgggacgagtgcattcgttcattgggcgcatgccgcaaggttcggaagatgagttcatgaaatggtgatagaggaaaccgccggaatgccaacgaggaaacgatttcggcgggtgcttaagcctcttcctcgcctcgcgactggtgtccaatgaacgaacagatggattagcgggtctctcggaagagcacccgtttgcggactaccggatcgaacttggtgagctcaagacggtccggcgtattacgacgattcttggtggtggtgtaggtgaatccggtgccggccgtggacttcagggtgatgaccgggcggattgcggaggatttgcttgccatgagtggtgctttctatgtgtgggtgtcacgctgttatgtcacgtatgtcgcgtacgtcgcggtgccatgtgggtgatgcagctcgttagcgcggtttgttgcgcggttacgcgccggcacagtggcgggcctactgactgcccgagcatgggggtgatgccgtggccggttcagttgacgttctgatcgcggcggatgcgggcgatcgccgcctcgatgccgatgcggtcgatggtcttgatgcccttggcgctcacggtaagcgtgacgtgccgctgcaaggacggcacccagtaccgcttggactgcaggttcggggcgaaggttcggcgtgttttcctgtgcgagtgggagacgcggttgccgaccccggcgcgtgttcccagaatttgacatgttttggacatgcctgcaactatatcataatgataaccattatcaaattagaaaggctgtcatgattcatccggcattgcaatcacagggaaacgcggaggggcgcacgcccgtggtgctgctcaccggcgccgaccgcctgagcctggactccgtggcgttctcgttgatcgattccttcccgtccgtatgctcgattgcttatgacgtgcgcccgaacgaagccgtggaatccggtctcgatatcgtgcgcaacgtcgcgaagccccaggcaagcggggtggtgttcggcgagtccgattcgttcgggctcgaggggtgctgcatgagctgcacggtcaaacatgaccttgaacggacgctcggatcgctgcaagggcgggccggcgcgtttctggtctcgctgcctgtgggccttgaggccacgccggtcgcgcagtatctggccgattccttccgtctcaacgagtggggtgagtcgatgttcgtgggtgcggtggccaatgccgtaggccttgacgaattcgaagagcgattctttgacgacgaccgtttgtgcctgtacggcatgggcgaggagaacggcgtctatgacgagcgttcgaccggcgtagtggtctcccgcctgatccgtgaggcctcgtgcgtgctcgaattgccggtcattggtgccggttgcctggcacgccatttggatacagacggggagtgcgcctgccgcgacatcatccgtgcaatcgccttgcgtgatgcgctggtctgtgaggatgcccacaccgtggggctcgtcgacctggtgcaggcgtcggtctgtgccgcgatgccgttgtgacatgtgcggcaaacggcagaacccccgcgtccgaacgaaggtggcgcgggatttctgtcgtttccgaggccttaaatggcagaacccccgcgcgggtatcgttcggacgcggggatactgccgtttcgtctgccgaaaacggcgggatcccgcgttgtcatcgtcggggcgcgggatttccgccggcagcgcgggtgtgcgcgtgcaacacaccgacgtaaatgcaaatgataataattctcaatacatgttattctgtcgtgttgggggccgggcgatgatgcagcaacagcagcatcgcccggccaaacagccgaattagagaggaaaatccaatcatgtccatcatgtccaacgccaagcgcgcgctcgccatcgcggccgccgcggcgaccctgttctcgatggccgcctgcggttccagcaatgccgccggcaacaagtccgattccagcagcgccgcgtcttccggcaagatcgaggtcgtcgcctccatcaaccagtggggttccgtggccgaagacctcggcggcagcaacgtcgaagtcaccaacatcatgaccaagaccaacgttgaggcgcacgattacgagcccaccagccaggatgttgccaagttcggcactgccaaggtggccgtggtcaacggcgccgattacgacccgtgggccaccaaggccgcccagtcgaccaaggccacgctggtcaccgccgccgaaaccgccggcatcaaggaaggcgacaacccgcacgtctggttctccgccaaggtgcgcaacaacaccgccgacgccatcaccgcggcctatcagaaggccgacccgagccacaaggacgactacgccaagctcaataaggaatggcacgccaaggaggatcagctggaaagcaagatcaaggacgcctccgccaagaccaaggatgtgccgtacgccgcgaccgaatccgtcgcatggtacctcgccgacgacctgggcatgaaggacgccaccccgaccggctacgcgcaggcctccgccaacgagagcgagcccaccccgtccgacatcaaggcgttccaggacgccctcaagggcggctccatcaagatgctcgtcttcaacagccaggaagccaactccaccaccgaccagatcaccggtgccgccaaggacgtcaacgtgccgatcgtggagctcaccgagcagatgccgaagcagtacaccaacctgctcgactggatgagcgcactggtcgaccagttcgccgccgccgtgaagtaatgcggcagtagccgtcaatccgcaacagcgataaggggaataatcaagtcagatagcgaggcgttgcctaggggagaacagaacgcttcgctatcagggaaggctccttatatatcagggtgcttcggggatgtcccgaggcaccctttgcgttagggtgaatagttaggaaacggtaagaaaaatagtggaactatggattttccaaggttcagcggcaacaatatgcccttgaaaagtcacatacggaaacaggcgaatgagcgagaacactagtagtatcaccacagtgaaaccccatttcaagctttgggtcaaaaaagccgaagccaatgaagtcacgccccagcacccccacaagcccttccccggctgggcgtacggcgtgctcttcgttatcttcgacattattgttgtgacggcgctcgaagtgggcgtttcgtccagctccacccgtgtgcaactgtccagtccgaccgtcggattcggcttcgtgagcaagatgtggaccgacggcaatttcgtattcgtactcaacgtgatacttgtcgcgttgctgtacctcatgttgctgatgctgttcaacagattctggacggcaagcatcgtgattcttgcggtcggaatcatcgtggccgccatcgaacatttcaaggtcgagatccgttacgaggccattctgcccgccgacctcggcttccttggctcgaacaccggcaatatgctcaccttcattccggccggcgcgcacgtgaccatcctcgtggcacttggcgcgttcgccgcgctgctcgccctgattctggtgctgcgccacttcgacgggcgcaaaggtcgcatgatccgtacggacaacctgagcctgaacctcacctcccgtctgattctgctgctgctgccgattctggtgttcgcgttgtactgcattcatgtgagcaccaccgattcgctggccaacaagttctcccgcgccttgggggacacgccatccatgtgggattccgtgtatgacgcgcagcgcaacggtccgctcgtggcctttacccgtcagctcaacccgaagatcatggacaagccgagcaactactccgaggagaccatgaagaaggtcgccgctcgctaccagaaggaagcggagacaatcaacgcctcccgcaccaacaacctcactgattcgacagtggtgtacgtgctgtccgaatccttctccgacccgagccgcgtgccgggactgaagaccaataaggattcgatgcccaacatccgcaagatcaaggcgggcaccacctccggcctgatgctctcctccggctacggcggaggtacggccaatctcgaatacatgggactttccggcctgagcatggccaatttcgagtcctccctgtccagcccgtaccagcagctggtcccgagccagcattggacccccaccatcaaccagatgtggggtgcgcccgccaactcgctcggctaccatccgtacgagtccagcatgtactcgcgcgctacgaactacaagaagttcgggttctcgcacttctacacgctgaccggtccggacgtgatcaagtatcaggacaagattgacgagtcgccgtacgtctctgataagtcttcctatgattctgcgctggaaggcatcaggtccggcaagacgaacaagttcattcagatcatcaccatgcagaaccacatgccctaccacgagtggtatgagaacaacgactacaccgctgaatccaccacgggtacgccgctgggtgatgatgaacagcagtcgattgagacctatcaaaagggtgtggagattaccgatcaggccactcaggagttcctgaacgaactggatgcgctggataagcccgtcaccgtagtgttctacggcgatcacttgccgggcatctactcgtccgccagcgaggatggcaacaactccttggccctgcacctgaccgattacttcatctggtcgaataaggcttccagctcccaaggcaataaggcaagcgatgcagcctactcttcgccgaacttcttcgtggcacaggccgccgatcacatgaacgccaaggtcagcccgtatctggcgttcctgaccgaaatgcattccaagattgccgctatggaaccgcctgtggtcaacaaggtccaaggctgggatcgtattcccgaaggccagaacatctatctcgaccaaaacggcaacccgatgtccaccgatgacttcgacaaggaaaccaagcagttgcttgccgactacaagctcatccaatacgacatcaccgccggcaaaaactacctcaaagacacagattttatgacgttgccgtaaagcagacagcccggccgaaccgtaaagcggatagctcagtgggctatccgtaggtgaggggagcggctgtgccgcgacggaaaatccggaggattttcggtctgtaggcaacgtgcgagccgacaggcgagccagcaaaacgcgggcgaagcccgtccaaaattgctgtaccgttgccatagtgctgtgagcttcctctgatgagggagctgtcgaacgaagtgagactgagggagagatcccacagaccaatcactcccgccttacaataaagccatgaagcgcattgatgtgaatcatggctggcggttccgttcaattggcaaggaccgcgatacggcagcgcggcagccagtcacgctcccgcacgatgcgatgattcacgagtcgcgcgaccctcgcgggccgtacctcgcgattcatcgaacgaggacatgacggcgtggccagctggtcatgggcgggctatgagggccgcgacgccatcgtgcatgtcaccgatgaccgccgcattgtggttgatgcaggcgggcatatcgccgtcggaccttctgccgaagctgtggatgtggaggtacaagtggactctgtggccgcacaacacgacctgcctgccaatgccgaactgctcggcgtggccagcgccaatcccatcaccgtcgatgaactcgccgacaatacctgcaccacctacttcggccgagcccaagctatttggcgaataccagccgaaacatctggtattgcctgcagcacaaacgccctcatgccatcgtcatgacggtacgataggtacagtcgatgcccggaaaccgacccgggcatcctgcgggaaggatgtgccatggtcaatgcggatttcgctcagttgcgtcacgcctacgaatccgggtgtacgcggccattggcttggcggcgggcgcaattggatgcgctatgccgtctggtagcggacaatcgtgatgctttcgtggctgcggccatggccgatttgggcaaacccgcggcggaaaccatactgatggagctgaatctggtggccggcgaggcgcagttcgtccgcaaccggctcggactgtgggccgcgcgccatcccaaggcgatgcattggatgctgcaacccgccgccggctggacgatcgccgagcccaagggcgtggtactcatcatctcgccatggaattacccggtgctgttggctctggagccaatggccgacgcgctcgccgcaggcaacgccatctgcctgaagccctccgagctttcgcccaacacctcgcgcctcatcgccgaactcgtgccgcaatatcttgaccccgagtccgtgtgcgtggtcggaggcgggcccaaggaaaccggcgaactgctgaaatgtccgttcaaccatatcttctacaccggcggcgggcacgtcggcaaaatcgtcatgcgtgcggcggccgagcacctgacaccggtcacgttggaactcggcggcaaatcaccgtgcttcgtggaccgtacggtggatatcaatgtggccgcacgacgtatcgcatggggcaagttcaccaatgccggacagacctgcgtggcacccgactatgtgctcgccacgccggatgtggccgaggctctggccgagcgcatcgccgtagccatcaccgaattctatggcgaagatccgaaggcctcgcctgattttggtcgtattatcaacgatcgtcattttgaacgactgtgcaagctattgccggtcggcaccgtgccgtctgaggagccgagctcgccgctggtacaggtggcatcggcggtaggcgcggccatggatatggtcgggcggcgcttcaatgtcgtggctgccggacgcggaagcgcgggggagacagccggtggtggcaccggtagcgcgaacaatgcggcgaagccggcggccggttcgaatacggcagccgctgatagtgatgcgactgcctcggccgctgttgagccgagcgagattcacaaggtgcccggcgtattcgatccggccgggcgaatcgtttgcggaggcaaggtcgatcgcgccgcccgatatatcgcgcctaccgtgctatacggcacgtcaccggatgcgccggtaatgaaggaggagatcttcggcccgattctgccgatcctggtggttgaggatgccgagtccgcaatccgattcatcaacaagcggtcccggccgttggctgcatatgtgttctcgcgcgatcacgaggttcggctgactttcgaacgtcagaccagctccggagctttgggatattcgttgccgttgggtcacctgctgtccagccgactgccgttcggtggcgtgggcgcgtccggcatcgacgcctaccacggcaaagcaggcttcctcaccttcagccacgtcaaaaccgtggttaccaagccgcagttccccgacactctgcgcctcgtgtacccgcccttcaatgaagccaaggccaaactgttcaacatcatcgccaaattcagctagcgtgatatcgctcgctgatattgggtgatggcgttgtcatagtgacgttcgctgtcccggcagccacgtcaatcgattgattcgtataccgggccagatttttctgtcctggtatttgatttcgagtcattttctgcttaccgggacaaaactgacgccgaaagtatcgtccgcgtattacgaaaatggcggaatagtgcggttttgcatggaagggaattccaaatagtcctatattcgaggtgttcaactgtcctggtttgcgaaaaagagccgaaatcggctaccgggacagaaaaatctggcccggtggccacgtcaatcgattgacatggccaccgggccaaaaatatgcggcagatgcgccgcttctgttacttcagggctttgaagccgatgtcgtggcggtagaacagtccgcgcagctcgagcttgtcgatgatcgcgtagaccttgtcctgagcggacttgatgtccggggcggaggtttcgacgagcaggacacggccggagttggcaatcagaccacccttgtcgtcggaggcgacgccggcatagtagacatgcgaatcctcgtcgacctcgatctcgggcacacgggcacccttgatgacgttctccgggtagccgttggaggcgatgaccacgccgagggtggcattggactcatcccagatgaattcgggggtttcgccgtcgagaatggcggagatgccggcaccgaggtcggaggtgagcttcgggagcacgacttcggtttccgggtcgccgaaacgagcgttgaattcgatgaccttcggtccgtcggcggtggcgatcaggccggcgtacaggatgccggtgaacggtgtgccttcctcggccatgccttcgacggtggggcgcacgattttctcgatggcctcgtcgaccacggactgcggaatctgcggcaccgggctgtaggcacccatgccaccggtgttcgggccttcgtcgccatcgtgggcgcgcttgtgatcctgggagatcggcatcggccagaaatcagtgccgttgacgaagctcatcagggagaattcctggccgtc

SEQ ID NO: 2898 - DNA, 3899 bp, Unknown
  R36_18m  MAG No. k141_43011
gaaccgtattcgtagaccaccggggtgatgccggcgttcagcatatcggcgtagacctgcgcggtttccgggcgcacaccggtgcgtccggtgcacagggtgctcaggcgcagcaccagcaggccgcgcaccacctcacgctccacttccggtccggcaccggcggcatgcgagcggatcagacttttctgcagctgcgcgcgctgttccttggggatggaagtggaggcgagcgcgccgaatccggtggagataccgtaatgcggcacggtgtcgtcggccaaatgatcgataaccgcgcgacttagcgccatctcatgcttcgattcgtccgaaatcgccactttggcaccaccgcgcgctacggcgataacgtcctcgatgctcaatgccccaacgcctacggtgaccgtctgctctgccatgttttcctacctctctatcgtgccgagctccacttggtattggatatattcatctcgccagcatggcatatcaacgttacgggactgtccacaatatgcaccgccccgcgccagcgccgcgcgaacgctcctatactcacggctggtttgttatgcgcctgaccgccgccggtgctgcggcgggtgcttgtgggataagagaagaacatgatttttcaggccggttcgctgctgctcgttatcatcggtgtctacatactcaaacatgtccacattttcggcgagcgtgattacaaaatcgtgcagggtctggtattcaatctgacgcttccttgtgcgattatcctgtcgttcgccacgaacaagcacgacatgcgcatgctgtggatcgtgttgttcggcttcttcgcctgcgcgattccgctgttcatcgtgtatttcggttctcgcggcgacgagaagaactaccgcgccttccagatgctcaacgcctcgggcctgaacctgggcgcgttctgcctgcctgtggttcagacgttcatgggcccgtccgccggtctgccgatcatcatgctcgatatcggcaacgccaccgtggccacggccgggtcactgaccatcacacgcacgctgctgcatatggatgacaatttcaagtcgctaccgctcatcctgcgtctgcgcaatattgccagggacttcctaagctcgatttccttcgacatctacatgctgatgctggtgttcatgttcctgcacgtcacgatcccacagcccatcgttacgctcatcaccccgttcgccaatgcgaacgccttctgcgcgatggccatgatcggactgatgatggagattccgaacaatcgcaaggacaaggtggagttgggcaaggtgattgtctggcgcatggtattcggcgcgattatcgccgtggccgcctggttcctactgccattcgacatgaggattcgcgagatcatcgtgttgggctcgttcgcccctatcacgatcttctcaaccaagttcactgattcgctaaccggcaacgccaagctcgccggcttctcgctgacagtgacggccatcatcagcttggtggtgatgaccgccctgcacgcggtattgccgggagcgtaaggcgcgttcttggttcccctcagtcagcttctccgcctggacggctcccctcagagaggggatccagaacgagtcacgcccgaacgattacgttgcgcagatcgccgatgccctcgacgtgcacgatggtctcgtcgcctgggtcgaggtggccggaggcgttcggggtgccggtcatgatgacgtcaccaggcagcagcgtggagaacgacgaaatcgcggcaatctgctcggggatgccgtgaatcagattcgcggtggtgccagacgccatcggcacatcctcgccgttcagcgtgaaggaaatcttggcgtccttccagtcgaggtcgtcacgcatcacaatccacgggccaagcgggcaggaagtatcgaaacccttggcgcgcgtccacgtggggtcgatgccctgcagatcgcgcaacgtcacgtcgttgacgcaggtgaagccgagcacgtaatccatcgcgttttcaacggacacgttcttggcgatacggcccatcaccacggccacttccggctcgaagttcatgtccttggagcaggccgggtacacgatcggatcgtcggggccaatcaccgaggtggacggcttggtgaagatcaccatgtcttccggcgcgtgggcgatttcggagtggccggcctcgtgcatgaactgggcgtgggcctcgtagttcttggccagaccgtaaaccttggaggggatgaccggggagagcaggcggatgccgtcgccgtcgaccgggtaccggttgccggtaggcttgacctggtcgccggccagcggatggccgtcaagttcgatgaggtagtccttgccgtccgtttcgtccttttgtacgaaggcgtagcgcggcgaatcattcaaagaaaaacgtgcgagtctcatgcctgtaagcctactccttggcggttccttccgcagaagcatccgtccaaggagcaagcataccggccttcaatcgaccaaaacgcacgttcgctgggattgctacttttcggtccaggttttgtcatacagcgactggccgccttgcgtgtgcatgatgacgcgcaatgatgccttgccgctggaggtcttgcacatcgagcccagcagattcgcggtggattgataggtgctgtccatagcatccagtgaggaagcgacggtatcgcctagcgaggcatagctgtcgtcgagcacgtactcgtacaccaaggtgtcaccgtcgacacggtagttgaaggtgatgccggtatctgcaaacgtatccgcttcggattcaatggagtccttgaattccgaatagtcgacgaaatcctgaatcgaatcgtacagcccataatcgccgtcggttagatcgtcatgggtttcgcccaacgtgtcgtccagcgcatcgtcaagattatcttgagctttgctcttatcgctgctatcaccgttgcccgaagaggactgactatagaaggaatcggttttcgcctcatctatagccttgctggcatacgaggcaccgccgacgatcagcgcgatgaccagtattacctgtatcaccatgcccgccgcactgatgatgatgccggcgatggccaagcccttgcccttgccgccctgtttcttaatctggttgaggcccacgatgctcaggatcagaccggggagtgagacaaggaacgagcagataaaaccggcaatagccaggccgttgtacttctggttcgcttcaggcggcacactgccgtaagaaccagaccatcccggctggccgttcggttggccgccttgcatatacgggttatagggcgtttgcggaggcacggccccgccgcccggataccgagcactgacgctgccgtagaccggaggaaccgatccgcctgccggagccgtccccggatagggcgaattgggtgctgccggtgtgggcgcgggcgcagcggcaggagtcactggtggcaaagcctgcgtaggcggtaccggctgattgaccggcgcaagaggctgggtggactgctcggcaggtgtaaacgcctgcgtaggctgctcaacaggagtgaacgcctgagtgggctgttcgcccgctgcgagtgcttgggttggagcattgttggcggcggttcctgcttcccccgtcatcgcatttaacggctcagtcggattggcgtcagcttgctgccccggcacctggccgttcggattggcattcggatcagtcatgacatgcactccttcaactgcatcgcaccccacttgcgagatacgcccctcgtcttacgcgccacattgtgcgttacagacaactgtactcctcgtggcgagccttaagtaccccaggaaatttggcttcc

SEQ ID NO: 2899 - DNA, 19089 bp, Unknown
  R36_18m  MAG No. k141_43093
acgatattatggtcatgattgaatccagcagcgtcgcctgtgccggtgagcccgtgacggtctgcgcgatgagtggcattgcgaaaccttggatacttgatgacagcgacgtgcatgaatccgctacgaaccatttgccataatccgtgccgcgccatagcgactcggtggtgttgctatgtgaattgtgaccgttgggctgtgttgaagattggttgttgactgttccgatgtaatcagccattgtgatcatctccgtattcatcgatgcttgagatattctattatgttcgtcttcaagcgccgcaccggactcacccccggccaataccgcgacgccttccccgcccgcctttacaacaccgtgtgattagggaaggtcagggtactaaccctgggaaaagtgcagtattctgcattattaaccctaggaaaaatgtaattttggacaatcgcaaccctaggaaaaatgtagaatacgcgaattgcaaccctaggaaaagtgtgtattgcggtataaatttatttttggccacatcgctcgtggcgctcgggcggcgcaatatgaatccgcgattcagcagattgtcgattctggtcttgcgttgcgggtgtatcgcgtcgaaaaacctgcggcaccattgccgtcataccgtgatgattccgcgttcaaactgtatctccatgatgttgggctgctggcagcggccctggatctgactcccgcaagcgtgatccttggtgatgacgggctgaccgaattccgtggtgcgttaacggaacagtatgtttgccagcaattagtggccgccggcatcacaccgatgtactggtcgaatgcgaacagtacgggagaagttgattttgtctttgcaggtaatggcgcaatcattccgttggaggccgaagctggtaccgagcgtcataagcgtagcttgaagtggctgtgcgacaaatacgggatttgcggttaccgtacgtcgatgcggaattacaaggagcaggattggctgaccaatgtcccactgtggatagtcgggagctacttccgcccgtggttggcgagtgattatgagccggatggcggagctgatttagggccgctaccgaatactgatgataaaggatgactgaagccgcgagatatggttcggccagttgctgaattggaagaaccgtaaaaccaagtagggcttattggtcacgggtgcccggcaggtgggcaagaccacgctgattgggcagttcggtgcagaccattatgagcatgtggctgaggtgaatttcatcgaaatgcctcaggcggtcgaaacggtaagcaaggccaaggacaccgaagacctgatactgcggttatcggtactttccggcgcggaaattacgccgggcaagactctgctgtttcttgacgagatacaagcgtgtgaggacatgcctacgtgttccatgatggcaacgcggagactgttggacgagccgaatacctgcccatatacatgctgggttgtttgagcgtgatatgacatgcgccactttcccgggaatgtgtcacggattgggtctgttgcccggtctagcggttcggtccattgacccagcctgttacttcacccttaccgtccgcaatggagtgaaccgactaatccatatccgcaaaatcgacaagcgtcactgtaccgtcttgcgccgcgcgggcggcgacatgctcgtcgaagcctgatttggagaacagcatgtaatggctggtttcggggtgcagcagtctggcgcgattgcgcagcacttccaactgctgcagaccggatggcacgctgcgccatttgcattcgcagaataggagagttttcggtttttctcctgaagccacgatgtcaatttcctcctgactgcgggtggtcggattggcgccccaccaacgtccggcatcaagcatgaggaaaggcaatgcctcggtaccgttatgggaccatatccactgaacacagatgtcttcgaacacctgccccataaagtcggagatagtgcgcataacacggtcggcggcgagatcggcatgaccggattgaatgagggacatgttgttcggcacatatcggtaccagaatcggaagaacgagtcctcgatacggtagatcgtcttgcgaggagcgtcctcgccgaaaggtgtctccttgcgaacgattcccagatcgatgagattgcgcaaataggtggcgcatgaggacgattccatatggcatgcggtggcgatggtgttcgaccgagatgccccggaggcaatggtctggattacggcgttgtactcggccggactgcgcagctcctgcttcagcaagttgtctggctcctcaaacagatagcagcttgggtcgaggatgttccaacggatgttgtctcggatgctgatgccgtcgtccagttgccgaagatactgcgggataccgtcggtaagtccgtaagcagtggcggcgtcctcgttgctgtatcttggcaagaacttgcggacatcggcgtagccgaatggctccactttgatttgagcggtgcgtctgccgtacagggggctctcatacccaagcacctggcgctccatgaacgacatggaagagccgcataacaccatcatgagctggctgtcatccttatggcggtcgatggcatgctgcaggaccgaattgatggtccggtctgctttagccagatatgggtactcgtcgatgacgaaggcgatgcgttgctttgcggccagcgcgaacaccgcttccagtgcggattcaaagctgcggtatacgggcgttgtctcgaacgcctctgagcccttttcatacagagcaatgctgcggcttaacgattcgagattcttggaagcgctggattcgattgccgaaaagaaaatcgtggggcgatcttcgaggaagcggttgatgagtgtggtcttgcccacgcggcgacggccgtagaccacgacgcactcgaactgctgtgagctccagcggcgttccagtgccgaaagctccttatctcgcccgacgaacatggcccttgtctccttgctttgctgtctgccctggcacacacgcgcaaattatagaatcgtaatttacttaattatgattctataatttggtcgactggtatgcaacaggtctcgagcgtgcattgccgcatgcgcaacgtttcgcgcgacacattccggggaatgttgcgcttagcgggccgtgccgcgttgctaatgcggggaacacgcagagttgcgggctgttgcgattggacgcaggccgtctagactagtacgcgtttgcgaaagtcgaacgtgcttcgaccggtgaaggagagctccggtcgtgcggccaatgacaggcgcagtgcgaagcacggctgatcgtgaatcgcggcggcagcgattgccgcgtgcggcgcaggagcatgccgcaccataccacaagcaaacaatccccaagaaacggtgatctcctcacatgtacgtcgatccgggaatcgataccagcgcaagcaatctcaaatgggtgctgccatactgcaaaccagacctgccccgcgtggtaggcgcgctcctactgttcatcgccaacaacacgatggccctgaccattccgattctgtccggtatcatcgtggaccgcgtcatcgtcggcggacatgccgacgaactgccacgtctgtgtggactgatgatcctcatgaccatcatccgcgtgggcgcgcgatacggctaccagatgtggatggagcgtttcggccagaactcggtctaccgcctcgtctccgacgaatacgagaagctgcacgagctcgacttcacgtacttcaaccacacacgcaccggcgacatcatgagccgcctgacctccgacaccgacgcgatccgccactgcctgagttgggtgagctatcagatcgccgactgcgtggtcatgttcgtgggtgccctgtgcgtgatgttcgctatcgattggcgactcgcgctcgtcctggcctgcgtcacgccgttcatttttgtgctcacgcgcggcctgtccacgcacgctcacccgctgttcttcgccatccgcaactcgctggcctccctcaactccatggtcgaagagaacatcgagggcaaccgtgtggtcaaggcattcgtgcgcgaaccgtacgagaccgaaaagttcgacgagcacaacgacgattacatgcagcgcaacatggccctggcctacaactcgcgcaagtacatgccttggctggacggcctcggcttctcgctgcagctcatcacgctcggcctcggcggctttcttgtcatcaagggctacatgaccctcggcaatctggtgagtttcaactccttcctgtggatgatcgacggcccggtgcgccagtccggctggctcatcaacgactggcagcgattcaacgccagctgcatcaaaatccgcaagctgctcaccgaacagccgcgcatcgtggagaagcccgacgcggtcgaagccgtcaagcaggcggtcacgatcgtcgagcaagtcaagcacgatgatgaggctaccggagcgcccggggcttccggaacatccggtgcccagcagtccgccgaacgcaagtcctgcccgctgcacatcaagggcgacatccgcttcgaccacgtcagcttcgccttcccggacgacccggagaccccgatcctcaaggacctcgacttcaccgtgcccgccggctccaagctcggcatcctcggcgaaaccggcgcgggcaagtccacgctcgtcagccttatctcccgcttctacgacccgaccgtgggccatgtgctcatcgacggcatcgacgcacgcgactggccgctgaccaccttgcgctcgcaggtgtgcatcgtggcgcaggataccttcctgttctccgacaccatcggcggcaacatcggttttggtgccagcgatgatagcgacgaccgatatatccggaaaatggcccagatcgccggcgcggacaatttcatcaggtcgatgccgcagggttatgacaccgtcgtgggcgaacgcggcgtgggcctgtccggcgggcagaagcagcgcctgtcgctggcccgcgcgctcgcggacaatccgtcgatcctgattatggacgatacgacttcggccgtcgatatggagaccgaggcggagatccagaagcacctcaaggagatggacggcggcaagaccatcgtcgccatcgcccaccgcatctcgtcggtcaaggattccgacctgattctggtgctcgagcacggacgtatcgtcgaacgcggcacgcacgccgaactcgtggccgcacacggccgctactgggacatctaccacaagcagctcggactccagtccggcgccgcacaggggttttagaagaggacttatggcacaacgcaatacattccgcgaggatgaggagctggaggagtccatcaacctccacgacatcgctcgcgtcggcaaatatctcaaaccgtatatggcacaggtggcgcgcattctcgtcgtcgtcatctcgatgagctgcatcgtcgtcgccgtgccgtacctgaccaagatcatgatcgacgaggcgatcccgaacaagggcctcggcaagctcggcatcctcgccgtgatcctcgccgcgctgatcgtgctgtacgagttcgggctgcgctaccgcacggtggcgatcacgcgcgtcggccagctcatgctcaaggacatgcgccgcgatatcttcacgcatatccagacgctgcccttcagctacttcgattcgcgcccgcacggcaagatcctgatccgcgtggtcaactatgtgaacacgctttcggacacgctgagctccggtctgatcaacgtgatctccgacgtgttcaccttcgtgatcactctgatcgtgatgttcgtgatcgactggcagctggccctgtggagcttgatcctgttcccggtgctcatcatctgggtgcgcgtgctgcagatcttccagcggcgcgccttccagaagctctccaacaagcagagcaacctgaacgcctacatccacgagtcgatcgccggcgtgaagaccacgcagaccttcgcgcaggagcaggcccagttcaggaccttccaggagcagcagggcgaggtgcgttccgcgtggatgcacgccgtgcacatccagttcctcatgtggccgggcgtgcagaccatctccgtgatgaccatctcgttcatctacttcgtcggcgtgatgggcttcgggggcgtgaacgtgaccaccggcgtgctcatcgcgttcgtcggctacgcgaacaacttctggaatccggtgatcaacatcggcaacttctacaaccagctcatcacctgctcggcgtacctcgagcgcatcttcgagacgctcgacgtcacgccggagatccgcaacaagcccgacgcggcggacctgccgcagattcgcgggcgcgtcgacttcaacgacgtggtgttccgctacgagaaggacggccgtaacatcctcaacctcgtggacttccacgtcgaaccggggcgcacgatcgcgctggtcggcccgacgggcgccggcaagacgacgatcatcaacctgctgtcgcgcttctacgacgtgtccgagggctcggtgacgatcgacggccacgacgtgcgcgacgtgacgctcgcatcgctgcgccggcagatgggcgtgatgctacaggacaccttcatcttctccggcaacgtgcgcgagaacatccgctacggcaagctcgacgccaccgacgaggaaatcgaggcggcggcgaaggccgtgcacgcgcacgagttcatcatggaactgcccgacgggtacgacacggtggtggaggagcgcggatcgaccctgtcggccggccagcgccagctcatcgccttcgcgcgcgtgctgctcgccgacccgcgtatcctaatcctggacgaggcgacgagcaacatcgacacgcgcaccgaggaggcgatgcaggccggcctgcagcatctgctcaaggggcgcacgagcttcatcatcgcgcaccgtctgtcgacgatcgagaacgcggatgagatcttctacatcgatcacggccagatcgtcgagcatggctcgcacgcgcagctgctcgccgccaagggcgcgtactaccgcctctacgagtcgcagtacgcgatgattcgcgtggccagcggggcgccggaagagtgacgagatgttgcgcacaaggatgcgtttagcggcgtttcacatagcgggtgctgcgaccggcaccgattttgatgatcgtaccggagtccaacagtgatttcagcgtgcgctcaatggtggtggtgctggtatcgggcatacgagcgagaatatcggccttggagagtggcactagggattgatcaagcagtgcttcaatccgcattcccttggtggctactcgcggtgctccctgcgctctgccgcctgccgtgagattgatgcgttcgtcgaattccttgcacgcggacagtatgatgccaagcaggtagttcgtgaatggcgcataatcattggcgttgtcgtcccatccttgggtgcttgcggccagcgcctcataataagtgcttttactttgctcgataaggtgttcgatactgatgtatttgccgaccatatagccattgcggtacagcatcaggagcgtgagtagccgactcatgcggccgttgccgtcattgaacggatgtatgcaggtgaaatcgagaatgaacatggcgatggcaagcaatggatcggtatgtccatctcggattgcttgcgtgtaggcggaacacgcgcgttcgatcagtattcgatgtagtcgaatgatctcatactgcctcattttctgcatcatacgaacttttctgcatcatattttatcaaaatgaggtagaaaatgggctgatgaggcagaaaaggcggcaggatggtggccatctcgcttgccggttgcgctactttcccgggaatgttgcgctcgtggcaagagacggcaagttcaggcggccgagattggcgatacccgtcgtgtagtcgaacgtcttaccggactgccttacgagcgttgctgacggtagcctacactgagaaaccatgagcaagcaccaccatcgcgaccgtagctgggccccggcacctgaagcattgccggacgacgcccagaccatcgacaaccacactcacgtggcctccgtaatccctttcgcgcgcgctatgagccatgaggcgcaggagaaggggcagcccgaagtcccggtgtacgacgtcgaccaattgctggcgcaggcgcaatctgtcggcattgggggtatcatcgactgcggttgcgagctgccgcacctgatgaccgccgtccagatggccctcgatcatccaggtaacgtgcacgcggcgctcgcaatacaccccaatgagtccgtgctccacgggcatcgcggtgtgccggggccggatggtctgcctctcaaatacaagccttaccatgacacgtctttcgaggacgcgctcgccgaagtacatcgcctcgccaccacataccccgagcaagtggtggctatcggcgagaccggcatggacctcttccgcaccggcgaaggtgccaaggaactgcagcgcgaggctttccgcgcgcatattgccctggccaaggaactgggcctgcccatgcagattcacgaccgcgactcccatcgcgaggtcatcgaaaccctgctggccgacggcgcgcccgaacgcaccgtattccactcgtattccggcgaccgtgagatggccgagattgcgcgcgaacatggctggtatctgagcttctccggcaccgtgagctacaaaggcaacgacggtatccgcgaatcgctacggattgtgggtctgggccatgcgatggtcgaaaccgatgcgccgtatctgacgcccatgccgtaccgtggccgcaccaacgcgccgtacatgatcccctacaccttgcgggccatggccgatacgctcgacctgtccatcgcggatgtggcgcgcggcacccgcgataccgcccgcgccgtatacggactgtgagggccgggtgtgcggccgtcgcggcgatgtgttgacttgtaaaatttgtcagaattgtgaacgaggtctaccatgatgtacctgacataagcgagggggatgatctccacctcaatggaggactgaacgtatggctgagtcgaaccaaaggaccgcacgcgcccaaaaagcctcaaaggcccagacagcccaggctggcgccgccaaagccaaggcccgacaggaagaagaagcactgctgagggccgacacctttaccaacgctcccaaggtgtcccgccgcactctcaccaaggaggagcgcgaggcactcgccaagcagagggaagccgaaaccaaggaagccgagaaaatcgccagcgcatggtcgaaaggcggcctcggccgatggtgggcccgcttgcaatctagcccagacaaggttacctggggcatggcgatcgtggcgctcggcgtggtgtacggcgacatcggcacctcgcccctctacaccgcgcagaccttccttgccggtcagggagggcttggcagcgtaaaccgagaggccgtgctcggcatgctgtcgctggtcttctggtcgattacgctgatcaccaccgtcaaatatgtgctcatcgccatgcgcatcgacaacaatggcgaaggcggcatcttcgcactgtactcgttgattcgcaagtacggcgcatggctcgcgattcccgccatgctcggcggcgcggcattccttgcggattcggtacttaccccggcggtttccatcagttccgcagtcgaaggcttgcagaccctgccgccattggaagggttgttcgacgaaaacccaagcctgaccctgatgattaccgtcgtgatcatcgtgattctcttctccgtgcagtcgcgcggcaccgaaagcatcggcaaagtattcggctcgatggtgctggtctggttcagcttcctcgccatcgtaggcgtcacgaatctctctaacgactggtctgtgttcgcggccctgaacccggtgtacggcatcaaattcctgttcagcccggacaatgctgccggcatcgccctgatgggcaccgtgttcctctcgaccaccggtgccgaggcgctgtactccgacatgggccacgtggggcgcggcaacatctacttcacctggccattcatcaaggttgcgctggtgctcaactacttcggccaaggcgcgtggatgttggccaatagcgataacccgcaatacaccgcgatgaagtcgctcaacccgttcttccagatgatgaccccgaacgtgcggtacctggccgtgattctgtctgtttcggccggcgtgatcgcctcccaggccctgatcacgggcgcgttcaccatggtttccgaggccacccgcctcaactggatgccccatctgcaggtgcgttacccggcccgtacgcgcggccagctgtacattccggtggtcaacggcgtgttgtgcgtggccacgctcgccgtgctcgccatcttcaaggattccgaacacatctccgccgcgtacggcctggcgttgaccattacgatgatcaccaccaccgtgttgctcggcgtctacttatggcattccggcaagcgggtcggtgccatcgtgttcaccgtgctgttcttggcgattcaggctatgttcttcatcgcgtctatggccaaattcctgcacggtggttggttcaccatgttgctgaccgccgcgattctgttcgtcatgtacacgtggaatgagggcaccaagctcgaacgtgcgcaacgccgtcacatgcggcccaacgacttcctacccgcgctcgacaagctgcacggtgatttccgcatcccgtattttgcggacaacatcgtgtacctgacctccgactcggaaaccaagcgactcgacacggacatcttcttctccatcttcgccgaccaccccaagcgtgcccgtgcttggtgggcagtcagcgtggaaaccaccgacgagccgttcacccgtgaatactcggtggaggacttcggcacgaactacatctaccgcgtgcgcttccgtttgggcttcaaggtttcgcagtccatcccggcgtacatccaccagatcatgcacgacctgtccaaaaccggcgaactgcctaagcagaagtcgatttaccccaaggtcgacgccgatccggacatcggcaccatccgttacgtgctgattcacaaggccctgatgccggaatccaaggtttccgcacgcggtgccctgtcgttgcaagccaagtacgcaatccgccgcatggccggctcgccggttaagtggttcggtctggcaccttacaacccgctggtcgaggtgcagccgctgttcgtctccacccgccgcccaccgcgtctgaagcgcaccgatacggccaagaccatcacgacgcccacgccgactcgtgcagtggccgacccggccgccgtccccgacccgatggacaccacgtccgggcttgggcgattggtacaggagctcgatgccgccgtatcggccgaggaacggaagatcgctgaggccgctgccgccgctgcggtcgctgagcagggcgataagggcaaggccaagaacggcaaacccgccgccaagcctcagcgctcctccaaacagaagcgataacataccagtttgcagcggcgctgatgcgctctataaagaatggctataacggtcgccgcacgtcgccgcacggtttcggtaagttgaaataccatgtgcagattactgggatacgcgacggcaggtttcaacctgagtctcaacgccgtgttggggcaagacaatgtcgaggatttccgtgaactgtctgaaatccacaatgatggctggggtgtagcccagctttccgatcccgccgaagcgccgcacgtgcgcgacggtggcgcacccaccccggaaaccggcacccgaatctacaagtcgaccatcgcggcccgtcatgacagcacgtttgaggcgctggccgacgaaccgtctcgcggtgccatctggcacctgcgcttggcaagctccaatctgccgctcatcatggagaaccagcacccgttctatgcgaacggcctgagcttcatccacaacggcgatatctcggacgccaatggccgcaacatcgtcaccaaccgctcatacccggtgaaccacagcgtgctcctctccaccggcggccgttccgactccgctatcttcttcgcggtgattctggaatacatcggtttcggcttcccgctcgacgaggccgtggcccaggccgtgcgcgaactgcgccaagcctacccgaagtccagctacaactgcatgattcagtccgaggaccagctcatcgccctgtgcgccgccggtcgtgagaagaccagcccgcgcatcgtggaaatctacgatgagtacggccgtggcgagcaggccgccgactaccgtgtgatgcgctaccgtgagctgcgcgacgacaacggcgactccgccggtgtggtggtctcctcttccggctatgagcaggaaggctggaacgtgctggagaacgaccagatgatcatcgcctctaaccgcaacggcacctaccgtctccgttccatctgaaatagcttcataagctccctctgacgaggggggctgtcagccgacagactgactggggggggggaggcccctagagcctcaaatcatccgcatcccatacttctccgccaacgccggaatatccggcacgccatacttggccaccagatccagccatcgttgtttgttctctccgccaaatcgctcggctcgggccgtatacgcctcgacctgcaggaacttcggcggcactgacttgctatggaacttgtcggcgtacatcaccacttcctgctcgagattcatcggcacatagtcggctggtggcaatggcagctcctggcgcaccacatcctcgcgcgtaagtcccacgccggtatggttgcggcagaactgggcgatggactcgtccacgccctcgtcgagcagatactcgtagcccttaagaccgtgcagaatgtagcgtttcttgctgaatttgagcggttcgtcgtcagagccgtcatgcttgaacacgcggtaggtgccgatgtcatgcagcagtccgccgatgagtactaaatgctcgtcgagcagacgcggcggcacatggccgccggtgacgcctgcggtgggcggtacctccgcgtccttcggtaatgtgcagcggcgcgtgaacagcgcgttctgccggcgcacgatctggcagccgatggtcgctacaatcacgcaatgcgtgtgcaccagctcgtacgccgccttggacggcgcgattttgcggtgcaactcgtcgatctgctccagtgtgggaatatatccggtcatgattatcaggtttcgcctcgtacggtcagatttatcttcagattagcgcggcaatgagccgcggcaggattgtcaggagctgattcggacatctcgacatgcctatctccgtttcaaggggctgattcggcatcctcctgaggtctacttccgtttcaaggggctggtgcccaagtatacgcggcgtaaaaacggcggaatgacgttggcatgaagccgtttatactcggggtttggcggatgaccagccccttgaaacggaagtagacctcccggaacacgcaaatcagcccctcgaaatcgaaaaagctcacgatgtttggtatgtatccgaacatcgtgagcttcaagagcctgtgctggtgtgtctggtgtgtattgctaccggacagatcagatcttgaagagtgtgtcggctgcttcggcgatctcgcgtgatgcggtgagcacgataacgcaatgcttcgggtcaccggtgtgcgccagcttggccagcgcggcgaacacggtcacctcgtcatccgcgttcagccctcgtgtcggctcgtcgaggatcagcacctcggcctcggtgctgattgcacgggcgatggccaccaaacgctgctgcaccaaaggcaatgtgccgacggccacgccgctggtggcctcagagaagccgaccttggccagcagttcgcgggcgatcaccggcttgggcttcaggaagttgcggttggacgcattcatggcgtacagcacgttttgttcggcgtcgagattcggttgcacggcgtgcagctgcggtacgatgcccagacggtggccgcgcagttccacgggctcgagctcaacaatgttggcgctcttgttcatcaccgtgccagacaccggcgtggccaaaccgctcatcacgcccatcagcgcgcgacgtttggcgtcggcggtgatgcccgaatcggggtcgtcgctgatcagcagcgcgtatgcgtgtccggagtagcagaagaaattcgcgccatcgaggatgttgaccttgcccttggggccggcgaccgtcaccttgttcagggcaaaggtcgggtaggtcttgagcagaatgtcgtcggaaccgccgcccaccaacacgcgatcgatacgcgaggccagcgtcatggtgggttcggccgctttgccctgaggctccgcatgctcggccaatgcgtctttgtgatcggttttggctagtcggagtgtttcgttgacgcgggcggcattgcgctcggtcacttcggcggatgcgttggccgaagcgatggcgtctgcttcggcctcgctggtctcgtcggtttctccggtttcggcagatgccagtgcgctgtaaataccatcgtcaacagtgctttcgtcatcaacgtcatcgaaggtcacgctgaactgcatggagtcagctggaacggattcaatggcgtcgttcgtctcagtctcagaagtcacttcgtcagccgttgcgtcagtggtcttctcgagttcctgatcgttgttcttgtcgctcatgcctgtgcctccgcatcgtcggttgtggtggtcgtcttattggcctcgccggcatcatgagcggtggcctcagcagcttcatcggtctcggcagcgccagtggtttcggccgtttcaatcgcctcagcctcgctcacggtgccccagtcgccatcggcggcgaacagcttgttcgcgctgaagaacgcaaggcgcagggcggcaagaatcgccaggatcaggattgaacccaggccataccagaccatggtccaaatcaggtccgatgtcaccgggatggtatggccggatgccagagcaggtccgatcggcttggcggcgaacgcgcctccgaccagaccaattacgtagaagggcagggtgacgatgaacacttccagcatgaactgccatcccaaacgcccgcgagtgacgccggacaccagtgccatgccgatctcgtcgtcacgcttgggcgcccacacgcccgacagcacgaggatgagcaacagcacgccgcccacggcaaccaacacaatggtgccggtcttcgcgcgcgaggatagcgtatccagcggctccagagaagcgttgtaggattccagcgaaggggaagacacctcgtatcccttggcgggcagcttggacttcttgagggtggataccaaggacttgtatgtagcgggaccaccggtgtcgaacaccacgtccagatccggcaccgcccagccggaggcggtcttgtcgttggactgtgggtcgagtccggccttggcgaaggtctgatagttggtgaagatcgcgttctcgcggttgcgggcggccgtcaccggattggcgacggcggattcggatgtgtacttgtagatgccgcgcaccttgagtttggccgtggtcttggcgtccgaggcggccgccaccttgagcgtatcgcccaccttcaggttgttggcggaggcaaacgcttcagagaccagtgcgccggtggtgttcgggttggaggacttgttgtcgtagctcaggtccttgccgtccacgatttcgaaggtaccgaggtcgctggccttggcggcatcctcggtccagaaggctcgccaaatgagctggccgccggtctcatcatcggaggccgagcccagcgatccgccgtccagggccttcaaatcaccgctcacgcgggccggcacggtttcggtaaccgtgaagttcaacgagttggtggccgaccggacgagcgtggcgtattcggtgtatgaggtccacgtcatgtaatgcttggtggaagccgagtccgtagcggagaccttcttccacgtagccgcagtcgggcgaatggccaacgtggccttctgctgatcgtacgcggtggtgtgtgcgttggtatcttcttgaatgatggccagtccggcgactgtgccgaaggtgaccgccaaggtgatgaacgcggtcagggccgtacgtcctttagaacgtgtcagggcccgccaggcgttgctgaggacgaacatgtaattacctctcccgttctcctaagccgaacagatcaatacggctttaactattgttgcgtttagtgaccgttttcttgcgcaatactgttatacccctcaatgaagtctgagaacattctgacagcgatgtggcggtcatgcggggatttgcacccggtatgggataaaccctcggtctatttcggtggcatcggtacactggcatgagatatgcgtggcgtcacgtgtgctccggcatgtctgcgattccggattcgcccggagtccggcatccggaagcgtggccttgcgccgttggataagagtatgagctgagcagattttcgggtaggataagtatgcgattcacttcagggcattcgagccataaggctgtggggcgtaggagaagccgccatgccggtaacgggaaatccaatcgctccgcatctacgaatagcgctgcaaatcagcagacgggtcccgtaaacctgaagactccccagcacgtgggtggcgacggccgttcgctgatcagccgtacgccgatatgggcgcgagtggtggttgtactgctgctgacgttgctggccagcgtcacctgtgtgggcacgctctacgcggcatccgtctcgagaatggccacggatgcgcagcgtgtgctgacatccgccgaaagtctggccaattcggcacttggctgcggcagcgataagagtctgtcggacatctcccaagagttggtcaatgccaccagtgatctcaacgaggagctgaacggcccgcagtgggacttcttccgcgaccattcgcgatttggcagcgacatcaccgctgcccgcgaaatgctggcttccgtggatacgttggtcaacggtccgttcactgatctgctgaacctgtccaaacgattgcagggcttctccctgaagaatggctcggtggacgtcagcgccctgatggatatgccggatatcgtcaagcaggtgcataaggatatctcgcagcagctcaccaagctcaacaaggtgccgactccgagcgtcgccaaggtggccaccgtgctcgaaaccgaaaaggctgcgctcaagaccgtggattcgatgctcagcgaatacgatggcctcattaacttgctaccgcaactgcttggcgaggacggcaagcgcacgtatttggtgatggtgcagaacccggccgagctgcgttcggcgggcggcatggtgggcaccatcgccgcaatcacggcagataagggcacgattaccatcggtgatttcgccaccacttctggttgggacattcctgaggagccaatggatgatacggtgctgaaggagcgccaggtatttggtggcacttttgaccagtacccggccaccacgaccatcgaccccgaattccagcgtgtggcacagatgaacaaatacatgtggctgtatcagaaaggcaacgaagacgagaacgtagcgggtgtattgtcattcgatcccgtattcctccaggcattgctgggagccacaggcaaggtcaagctttcggacggccgagtgctggatggcaccaccacggtgccgttcttcgcttcagacctgtacacggattacccggacttcgagcagcagaacaacttcgtttccgaagcggctcaagcaattatgaaccatgtgcttggcaacgcgaatgcctctaccgcatccccgctgttgaaggcaattagagataccagcgctagcggtcatttcaagctatggatggctgatccggatgagcaggaggcgctgattgccaccggacttatcgacgataaggccagtggcgagttgtctgctgacagtcaggtgcccgaagccggcatctatctttcggagctgcagcaaggcaagcaggattggtatctgaagacctccaccacggtcacaaaaacctgcggcgacgcctcggccagccagaacgccctgtattctggcgtgctggataagcgcatcacgacagccgtgcgtaacacgcagctgggtcagtttacggaagatcagctcggtgacgaatacacggtcaccttcaccatgaagaacacgctgactaaggctaaggccgaatcgttgcctgatttcgttaatggcggctcggagaatccagtgctcggtggcatgctgtaccgcgtggtgcttaccgccccgtacggtggcgaaatcaccgctgtgcaggctgatatagattcatggggtaccaacaccgcgagcctgtatgaccgtcagtacattatgttcaaccagcagtggatcgagcccggaaaagaattgacgattgcctataccgttcgggtcagcagcgatgccacacatccactgaacgtggtaaccacgccggtggtgaatgcggatggcgtcgagacgggctccaacggtaaggtgacggatgagtgcccggccgatacgaacggcgccgatggtgcgaacggcgccgatggtgcgaacggcggcaagaacgacgcgcataagggcgcgtcctccgatccctcggccggcctggacaccttggacaagctgaagagccagatcagctgcccggtcgatctgaagtccctgacgggatccatgtgatgaccatgcccgattccgtttccggcgtcgccgtttccgacgccaccgtttccggcgtcgccggcaggccgcg

SEQ ID NO: 2900 - DNA, 14664 bp, Unknown
  R36_18m  MAG No. k141_43174
actgatctggatccggaacgagcgtcttgaaataatcctgtggcgaatgcttccactgcagaccaccatccgcagtcggattcacaaacggcttcaccactttcgccgtattcaacgtgtcatacgtcgcgttggcatacgccaaaaaatgctggccaatattcatggtgtcccacaccgtccgacgggtgtcgacagccgcgatattcttcatgtcgtggataccccgaaaatcggtatacccggttcgggcattcataattgtgttgccgatggaccacccgtggcctttgctccaacgtctacgcacgacaagcgatgccgttcaacaccacagccggtgaccagacaacccatacccagccaacaccacatcacgcaatccctcatcaacggtagtgggccagcccagaatcaattggactggcccactatggcatcagcaattactcaccgcaacgccccgcaaacaaccctcgttaacgggaaacgagtgcagtcacctcaccgctcgaacgggttcttgcggtacgcaaactgctttctgcgctggttcaccgcgacaatcgctccggcgatggcggccaagaccaccagtgcaccgaagatcatcgtgttgcgcagccacggggtgtgggtggcgtactgccaccagttggaggccacgtagatgttgtcgtaggtggacgtcgcctcgttgcctgccttgtcgatcgtgtggatcacgatctcgtggctcttggcgtcggcgtcgaacgtcagactcggcgtggacttgagcgtggcatcgcccttccagctgtctttgagctggccgtcgacatacacttcggtggacttgatgccgaggttgtctttggcgtccaccgatgcgggctgtccctgctggctgtagtacacggtgccggacttgatgccgagcagcgaagcagtcggcgcggtcgagtcgacggcgaagttcacttcggcagtgcccttacggtcggcgttcttcttgtccatggtgttctgcgagaggttgcccgcctcgtccatggactgcacctgcacacggtagaagccgtcggagttaaagcgggatgccggcacggtgtacaccgtacggctccagcccttgtcgtcagaggtcgcgaccttgtagtcgttgttggtgagcgtggtcgccttgtcgtccttggcgatcacgatctggcgcttgctcaggtcaagaccggagacgttgatctccgttatctgcacgtcctgcgccttcttcaggtaggtgccgcgcaggttcgtggtgtccgcatcgaacgtgtaggtggagccgaagcggttcacggagaaggtcttcttggtctcgaacgtgttgccagccagatcggtgccgtgcgccttgatggtgtacacgtcatcgaagtcgaccttgcgttcgaagtccgtgaagtccacggtgcggtcgttggccgcatcggtggtgacgttcttgggcatcttgtcgcccttgagttcgccgcgatggtcgccgaccagcgtgtagctcacgttcttcatgtcgatgttgacatcgttgaagtcgatcaacggtgccacggtaccggcgtacgcggtcttgtcttccacgcggtcgatcttgatctgcggcttggtcttgtcaaccacgaactcgggttcgctcacctcttcggccttgttgccggccagatcggtggcggtggccttgatggtgaagtgcgcctcgcccgtgaatgccacggagttcgtccactcggtggattcgcgcgtgccgccggtacgctgccagcccgccgggccgggggctgcggtgtccgcgccgttatcgtccttggcggtgacggtgatgaccgattcgtcctcggagaagttgcgctcgacttcgcgaatggtagcgttgcgatcggccgcgtagtatttgccgttcttcacgttgttgttgtcgaaggtgagggtcagcttcggagccacggtgtcgaccgtgaactcctcatgaatcgtattcgacgggtgatcgcccggatcggtgtaggcggcgtccacagtccagtcgccgtcgctgtcggcggcgaaggtggccacgtacgtcttcaggtcaccactcgcgttcttgaaggaggagaccggaatggtggccttcttgccgtcgaccgacgtggtgacgaccacacgatcgccctcatacttcttggagaaatcgaagttcgattcggtcagtgtcacggtaccggcacggtgggccttgtagtacttgccgttgcgcacatcattgttgtcgtaggagactgcgatggtgggagccacggtgtcgatggccacgccgttcaatcccttcagcgcgttggcggcttggttgccgttcacgccttcgtaggcattcagcttgccggtgtcgaccggattgccggcctcatcgcgaatggtgaggctggtctcgccgaggtagacgcgctggctgtcgccatccatcgtgaagctgatgctgccggcggccgcgtcgcccgcatagacgggagccgggtcgttcttgccggaaagccagttgtcgaagtgcttggtggagaacgcggtggagtccgcagtcacaccggacacattatcgctgatgccgttcagcgtggccgtgaagacatcagtggagaagatccaatcccacttcttcggtgcttcactggaagcggtcaggtcgcccagcttcggagcggtccagtcgagcaccacgtctttggactgggtggatgcctcattggcctttgcctgtagaccggcataggcgaggtgcagcgtgtaattgccttctacttcgttggtcttgccgttgatcaacagcttctggccggagagcgtccacgtgtagccatcgccttcagtccactgtgcatcgctggcatccaacggcttgatgttctgctcgttctggccaccggtcaacggcgtggtgttcgaagtactaccagcgagcaggttcgtcttgccggcgttgagcttggcgtaaatcgggaaccagtggtcggtgatggtgtaggccaccttgaccttgccacggaagtacttgttgttgttatcactggagtcgggcacggagttgtcggacttggtgaccgcgaaggatgccttggtatcgtcaccattcacatcggcaacgacggcgtcgtaatccttgacattgtcctgaaccggagctttcttgaagctttccttgtccagcgcgttgccgaggttgtcgttgacgctcaccgtgatcttgctcaggtcgtagaagccttcctgatcaagggtcaactgtcccttgccttcgttgtcgagtgtgacattcaccgtcttgccctcggcaagcgtcttgcccttcagatcagtgccgtcaggaatggtcagcttaacggagtcatccttgatgccggacgtatgggcttcgttcttggcggagtcgttcgaggactggccgttgggcagcaagtccttgatccagaccgtgaacgtctgtgcaccggccttggcgaagaccgtgtagctcttgccttgcacggtggtatcgacgatggtctcgcccttggcaccggccggaccgctgatcttggtcagcactgggcgcttggtgtccaacaggtagttggtagtgccggtgctttgagcgttgaacagctcgacattgttgccgaagttcttctggagcgtcagctggtagtcgccgttgaactgcttgccggtggcatccttgtcggtttcggtccgcttgggcaggtttgcggtgcccagcgtgatgacgctgtccttataggtggcgtcactgatcttgaacgtgaaggacttcgaaccggcgtcgccgtattgcaccgcgccggtcagcaagtctgtattggcataaccagccttgaccacatcccagcggtaggcgaacgcggggtcaccggcgaccttgagggagatgttggtgagatcttccttgtaggtattctgcgggtcagcatcgttgagctgcagagtcgccttcgcggtctgcttgctcacgcccagcgtatccggcagctgcttggccgcagcggccacggtggtatcagtggacttggccagtgcggccttcaccgtggccaatgtggtttcggcatcgctgacattgggcttcgtggtcgccttatcggtggctctgagggatacgccggccagcgtgtacttgccgtcctggtcgccgagcgtcagttggaccttgttggggtcgttgttcacacgctgaagttcggtccacttgccggtgaccttatcgccattccacgtggtgtaatcgaccttggcttcgacctttgccagaccagaggtctgtgcatcgtctttgccggcacctgttgccgtggaatcgggcagcagatcgcgcgcgtccaaagtgatggtggcggcagaacgggacacgacactgatggaatcgtccttggtggaggtcagttcatctctgcctgcctggtaggcggcaccggtgaagctcggagcctgcgtatccacgccgaaggtcttggcgttattggtcacgtcacccaacactgccagcaatgtggggttatcggttaccgtaatggcatactggccgtttgtgttcttggcgtcaatcaacggcttggcggcatccgctgcgatgacgatctcgtcaccggcgccgttcaccgtggcaccggccaccgggaacgcgccctggtacacggtcttgccgccagcggtcaatgtgctggtgagcaggttcaggcccttggtgccggcaccttcttgcagacccttcagttcgtccgccagccacgggttgttcttgacggtcagtgtgaccttgggagtgccgttgatgtagtcggtgccgcttaccgataccgtggtcttcggctggacattcttgccgatacgaatcttcgtgtaggtgaacttatcgccagcaattgcgtttaccttttcagccttggactgcgtacctgcattgtccgtggcttggatggtgaagtccgtcaaatcgtaggttccggccttggtgagagggaatgtgtaggtgccgtcaccgttgttggtcaacgtgaccgtggcctgcttgcccgtctcaggatcgataccgcttgcaatcaccttgcccacaccggcaccatcatccgtaacggtgaaggtcagggcacgttctttacggtcgactgcgaagagtgtctttccgaacggaatatcaatgccgccgttcttggagtagcccttccacgcaacggtaggagcggtggtgtcgatggcgaacgactgcgttacagtcggcgtgcccggcagcgcggagttcaggcttacggtgtggttaccggtcttcaggtccagtccggcatcgccgcagtccatggcaccattcgtaagattatcggcatcgcacaccgggattgtggcaccggtgccgtcggcagccggaacggtcagcaacttgataccgttcgccttgagcagggcgagttcatcggcgaagtatgcgctcgtgctgctcaccgagaagccgccgaccttgctgtaatacgtggtgccgttgttgacagcacccttatccggggtggtaccggtcagattcagggacagaccagtgccggcattcgggtcaacaataacggtcttcgcgtcgagcaaatcgctcaacggcttcgcatcggaagcgctgccgaaccaattggtgaccgtaaccgtggtcttggtcaggtcggtcttgccgttaggcacggtccatgcttcatctgccttgaccgtatcggtcttggtgccgttgccattcggatacgtcacctcataagacacgacattggctgcctcagccgcaaccggagtaaaggttacggacggcgacgtggtcgtgaaccaggtaccgtcggtcgcgtctttgcctttcagccaatcagtatcaacaacgtcgccgaacaccgccgtatccacggcggcgggcttggtgctgtcataagacaattgaggagccgtgatggtgctcgtgccgtcgccatccttgaactgattcaggtcaatggcggcatctgccgctgtaggatcagccggcgcggcaactgtcacatcgagcgtaaccggatcaccgctcagagcgaacgccggaccatcattcggctcaacggtgtaggtgtagccgtcctgcacattgcctgtacggtggaagtcgccatacttgacttccttgacgcccaagatgcccacggtcacggtaaaggcaatcttgtctttatccgcaccttcgtattgtccgttacggtcaaattggcccgcggggaaaccatcaaacccagtaatcgtcacgcccagacgaacattcgaggcattggtgcggccatcggtcagcggctgggcattatcggccaccttgccgtccttatcggcggcataccaagccaaatccatcttcggcgtagtggcggcagccggctgtgccttgacggccttgaaggagcgtgcggacaccacggagccggtggtctgctcgggcttgaggtcggaagtcgaatcggcgctggctaccacggcggtagcacccatggcaagagccgccacagccacggccgcaccgatcaacgacttgcgccagaaactggaattagttacgaagctcattacttgttcttccctccacgaaccaggatggtacgggattcatcgtcgtcggacgatgcttcattcgtcttgcggaattgcatcagcgaggtctcgccctcgtccgccaattcggcggcggaagccatggacaccggaatctcaaccacagattcgagtgcggccttggtacccagacgggtgctttcgtcttcctcgtccaccacggccggagcggcggaagccttttgcttggcaccgggcactgcggacggcttgtcttcgccggggcgagtaatgccacccttggtgctggcggaacccagagagccggaaccggtaccggtcaccgggcggaattcgatgtcgctggtgtcatgcgtaccggtggtggtatcggaaagggcacccttcttgcgcttgcggcgcgagccttcgcccagattctcggcgttggcccacgaaccggcgcgcactccacgcagttcggcgatctcacgttccgcgcgcttgccggtcagggcgtcacgcacggcgggaatgttgaacttgcggaacagcactacggccacgaccgcaagaatcacggccaaagccaggaatacgactgccagagtcctatagatatcggcgttcacttggcgtcccccttgatatcaacgaaagcgttggcgatggcgtccttggtgggcttttcggcctgttgcgcggctttcttgctggcatccagctcatcggtggtggtttcggtcttgtcggcaagcgatgcggcggcatcggccaaatcgctcatctgctgttgcgtgatgccgtccgcgcggaacttgcgcgggtacacgcgcaacgcgtccaaggtcaggttcgcggattcgaggctgatcacaccgttatcttcctgagcggcggacttcaccagttcgttcagcttgctgaagtacggcttgtacttgcctgaatcggatccttcgttgatcagcggcacgatctccgtgttgaagtcggcgatgtcggcgtagatcttggcgagcttgacgttgctgaagctactctcttgtgccgcgttgtgcatccactgcgaagcggcgcggatgcgggcgtatcgctgtggatcggtgttggcggcggacgcgctttggccggccatcttggagccggagtagtagtaccaatacatgcggccggtgtcgaagctcagctcggcccacttggtggagtccttgcgcaacgagtcggcgtgctggttgatcagcgtgttgtagatctgctcttcgtcgtcgctgaaatcactgtcagcggtgtaacgcttgatcagctgctcgtacggttcaatggcattggtcttgatttccactgcgcgcacgtaggcggcttctgcggcggatgcgtcggtggtctgcgccgcctggttcatccagtagtcgtaatcggtgttctgcgcgtggttggctagcaccaggctgccgccggcgagggccaggcagaccacggaggcgatcgccgtgccgaggaagccccaccacttggaattcagcgccttgcggtatgcggcgtcttcctgcttgtagtgtttcagcgcatacgcgaagtcggcgcaggtctggaagcgatcgtccggattcttgctggtggccttggcaatcaccagttccaagccctgcgaaagctccgggttgatctcacgaatcggcacaatgccgttcttgcgcgggtgtgagccagtcagcaggtagaacagggtggcaccgagcgcgtagatatcggtacgtgcgtccacggtgccgttatcggcgaactgttcgggagcgccgaagcccggcgtaccgagctggcggtcgtcaccgaccagcggcttgctgtccgcatccttgccggtctccagtgcaatgccgaagtcgataagcttgattgcgccctcaggggtcagcatcacattcgagggcttcatatcgcggaagatcaccggatgcttgcggcggtgcagatagtcgagcacatcgcacagctggatgccccaatcgaccacgtcttcttcggactgcgggccttctttcttgagcaggctcgccaaggtctggccttcgacgtaatccataacgacgaacaggctgcccttttcttcgatcaggtcgacgatacgtggaatcgccgggtgatcgaagcgcttaatcatattggcttcgacggtcaggctcttaatgaccaagtcgcgctgcaccggatcagaggcactgcgaatttccttgatggcccattgcttgttcagcgaggaatccattgccagatagacggtggacataccacccttgccgatctgggcaaggatcttgtaccgcttgccgaccaatgtgtttaaccccaccataggtggccctccaacacttgtctcttctcttacgacttccgtgcacgtaccgagtcacaaaccactgggagcggtacccacactcctaagttgccacactacccccgtaaatcgacaagaacaatactgctgtctgaaaatgcgagatggcccggaaccagacgagttccgggccatcttatcgggggtgaggagggttactcctcgatgtcaggctgaccgccctgatcggagtagaaatcatccgggttgaagtcgtcgccgagcttcagatcaccgaactcgagattcgagaagttcaggtcggacaggtcggcatcggagaagctcgcgtcgccgagatcgccatcgccgcccagaccgaagttcgggtagatggtgtcgcggatggccttgtcgggctcgaccacggcgttgcggtagcgggcgaggcccgtaccggccgggatgagcttaccgatgatgacgttctccttgaggcccttgaggtcgtcgaccttctcggagagggcggcttcggtgagcacgcgggtggtctcctggaaggatgcggcggacagccaggagtcggtggccagcgacgccttggtgatgcccataagcgccggacgaccgacggccggacggccaccgttcttgacgatgttgcggttgatctcgcggaagcgggcattgtccaccagctcacccggcagcaggtcggtgtcgccggagtcgatgatggtcacgcgacgggtcatctggtgcacgatgacctcgatgtgcttgtcgtggatatccacaccctgggagcggtacacggtgtgcacttcctccacgatgttgacctgggcggcgcgcttgccgaggatggtgaggatcttcttgggatccacggaaccttcgaccagctgggtgccaaccttgatgtggtcgccgtcggcaactttgagcggcacgcgcttggagacctggtaggtgatcggcttgatcacgccgtcttccttcggcgcgccggaatcggcgtccggggtcaggatgatctggcgaccgcgatcgttctccacgatcttgatgctgccggcgaactcggtgatcggggcctcacccttcggggtgcgggcctcgaaaagctcggtgacacggggaagaccctgggtgatatcggatgccgcggccacaccaccggagtggaaggaacgcagcgtcagctgggtaccaggctcaccgatggactgggcggcgacgataccgacggtctcgccgacatcgaccagcttgttggtggccagggaccagccatagcacttggcgcacacaccgcgcttggactcgcaggtcagcacggaacggcacttgacttcctcgacaccgtgggccacgaggtcgttgagcacgtccatggacagggcgtcgtcgcgcttgtacagcacggtctgtccgtcggccgggtcaatgacgtcggcggcgagcagacgggagtacgggccaccgtcggcggccttgacgagcaccaggttgccgtcgttgtcgcgctcggcgacgcggatgggcagaccggccttggtgccgcagtcctcttcgcgcacgatgacatcctgggagacgtcgaccagacgacgggtcaggtaaccggattctgcggtacgcagtgcggtatcggccagacccttgcgggcaccgtgctgggagatgaagtactccagcacggacaggccgtcgcggtagttggacttcacaggacgaggaatgatctcacccttcgggttggccacgaggcctcgcatacctgcgatctggttgatctgcatcatgttgcctcgtgcaccagactgcacgatgatggccaggttggaggtcgggtcgaacttctcctcgacttccttggacacctcggcggtgcactcggtccacaggtcgatgagttcctgacggcgagcttcctcggtcaacagacccatctcgtagttggcgttgaccttgtcggccttggcctcgtactcggcgatcttctcgtcgcgctcgggcggctcgttcacgtcggagaacgcgaaggacacgccggaccacggtgcacgggtgaagccaagatccttcagggcgtccagcgtggcggccacctgctgggtggagtaacgcatggcgatgtcgtcgacgatcttggacagacggcccttggccacctgctcgttgacgaacgggtagtcggtcggcagggtctcgttgaacaggatgcggccgtaggaggtggcgaacagcacggtgccgtcgtggaagcgttcttccttgacgacctcgtcctcgccttcgcgcgggtcgagcaccttgacttcgccgggctcccagttcttcggcagcacgaagctctcgggcaggcggatgagcaccttggcctgcatgtcgatctcgtggcggtcgagggccatttcggcctcttccagcgaggagaacacgcggccctggcccttggcgccttccagcacggtggacaggtagtacagaccgaggatcatgtcctggctcggcatggtcacggtgtgaccgtcagccggcttcaggatgttgtcggaagccatcatcagcgagcgggcctcggcctgggcttcggcggacaggggcaggtggactgccatctggtcaccatcgaagtcggcgttgaaggcggcgcaggccagcggcggcaggtggatggccttgccttccaccaggatcggctcgaatgcctgaatacccagacggtgcagcgtaggtgcacggttgagcagcacggggtgctcggagatgacctcctcgagcacgccccacacttcggcgtcgccgcggtccacgagacgcttggcggacttcatgttctgcgcgtagttcaggtccacgaggcgcttgatgacgaacggcttgaacagctcgagggccatcggcttcggcagaccgcactggtgcatgcgcagggacgggccgaccacgatcacggaacggccggagtagtcgactcgcttaccgagcaggttctgacggaaacgaccctgcttacccttgagcatgtcggacagggacttcagcggacggttggaggcaccggtgaccgggcgaccacgacggccgttgtcgaacagggagtcgacggcttcctggagcatgcgcttctcgttgttgagcatgatttcaggggcgccgagctcgatcagtcgcttcagacggttgttacggttgatcacacggcggtacaggtcgttgaggtcggaggtggcgaaacgtccgccgtcgagctggaccatcgggcgcaggtccggcgggatgaccgggatcacgtcgagcaccatggcctccggcttgttgccggtggtcaggaaggcgttgacgaccttgaggcgcttcagggccttggtcttacgctgctcggaagcgtccttgatctcctcgcgcagttccttggagatggtctccaggtcaagggactgcaggcgcttcttgatggcttcggcgcccatgcagccgtcgaagtaatcgccgtagcggtcctgcatctcgcgccacaggtccacgtcgtcgaccatgtcgccgggcttgagcttcttgaacttgtcgaagacggcgtccacacgggcgatctggtcgttgtagcgggtgcggatggcggccatatcgcgctcggcaccgttacgcagcttggtgcgggccgggcccttggcctcgccggtctcctcaagggcggcgagatcctcttcgaccttcttggcgcgggcttcgatgtcggagtcacggcgctgctcaaggcgcttgatctcggaatcgaactcgtcctgcaggccgggcagatcgttgtgacgctcgtcttcgttcacctcggtgaccatgtaggaggcgaagtagatcacgcgctccagatccttcggggtgacgttcagcaggtagccgaggcgggaaggcacacccttgaagaaccagatgtgcgtcaccggggcggcgagctcgatgtggcccatgcgctcacggcgcacgcggctgcgggtcacttcgacgccgcatcgctcgcagacgatgcccttgaagcgcacgcgcttgtacttgccgcaggcgcactcccagtcacgggtcgggccgaagatctgttcgccgaacagaccgtccttctcaggcttcagcgtacggtagttgatggtttcaggcttcttgacctcaccgtggctccaaccacggatgtcatcggcggtggcaaggccgatgcgaatcttgtcaaatgcgttgacgtccagcacttgttaatccgtttctgttcttgagaccttcccaagctccccttgtcaggggagctgtcagccaaggctgactgaggggtagtgcaaaccggaaaggtctctgtacgttatctatttcacgttggcggggctacacgcggcgtattgaccgcatgcagcccgagggatcactggtattcgggctcttcggccttctggtcttccttggcggccgcgtcggggcgggcgccaatgttgaagccgaggtcgtcagcggagctggccggatcgtcatcctcgtccttcatgtcgatggccacgccttcggcgttgagcacttcgacgttcagggacagggactgcatttccttcaggagcaccttgaacgactcagggatgcctgccggcggcaggttatcgcccttgacgatggcaccgtagacgcgcacgcggccgtcgacgtcatcggatttggtggtcatcatctcgtgcagcgtgtaggcggcaccgtaggcctcaagggcccacacctccatctcgccgaagcgctggccaccgaactgggccttaccaccgagcggctgctgggtgatcatggagtacgggccggtggagcgggcgtgaatcttgtcgtcgaccaggtggtgcagcttcagcatgtacatgtagccaacggaaatcggcttggtgtacggctcaccggtacggccatcgaacagggtggccttgccgtcggggccgaccagacggtcgccgtcgcggttcggcagcgtggtggacagcaggcccttcaggacctcgggcttgacaccgtcgaacaccggggtggcgaccggggtgttcggctcggccttctcggcaccggacggaaccagcttcttccactcggcttccatgttcgggtcaagggagatatcccaaccggagtgggcgatccagccaaggtgcagttcgagcacctgaccgaggttcattcgggaaggcacacccagcgggttcaacatgatgtcgaccggagtaccgtcagccaggaacggcatgtcctcttccggcaggatgcgggagatgcagcccttgttgccgtggcggccggagagcttgtcgcccaccgtgatcttgcggtgctgggcgatgtagacgcgaatcatctggttgacgccgttgggcagctcgtcgccgtcctcctcggcatcctcgcgggtgatctccttgacgccgatgacggtaccggtctcgccgtgaggcacgcgcagggaggtgtcgcgcacctcgcgggacttctcgccgaagatggcgcgcagcaggcgctcctccggggtcagctcggtctcgcccttcggggtgaccttaccgaccaggatgtcgccggcctcgacctcggcgccgatgcggatgatgccgcgctcgtcaaggttggccacggcgtcctcgccgacgttcggcaggtcgcgggtgatctcttcggcacccagcttggtttcgcgggcgtcaatctcgtactcctcgatg

SEQ ID NO: 2901 - DNA, 2555 bp, Unknown
  R36_18m  MAG No. k141_43184
aaccgcacaggacgcgggccgacgaggccgggctcgcggacatcctcggccgcgggttcgacggctgcgagccgcgcacccacctggccggtggcctgacgtacgtgcgcgtcggcggcaagtgggcgtacgtgtgcctgctcatcgacctagcgaacaggagcatcgccgcccacagcgccgacacgggccgcaccgccgacctggtcatggccgcgttcgccacgctcggcttccctctgaccggggtggaggtgttccacacggaccggggcagcgggttcgacaacgcgagaatcgacgggctgctcgacgtgttcgacatcggaagatcgccgtcagggaagggcgacccgtacggcaacgccgtggtcgaatccaccaacaggctcctgaagaaggagctcatataccggaaccactacaccagcctggaacaactacgctccgacctcaacgactatgtgtggtggtccgacaaccaaagactccactccaccctcggataccggagccccgacgaattcacgcaacaaggactcgccctctaaagaattgtccaacacgccgttgccaatccagtccgacatgaggcaacggcatgggcagtccatgctcgaatcctgaccatagaggggggggcagtggccttgaaagctacaaatactcaacgaatgcaaagaccgtttcgaggtcgggccgatatgccgaattctcgccgaatcgctggattgcgggttcatcactccacgcggttaccgcatgttcaaatctaggcccgtgagccgcatggacgccagacatgaggcgctggcccgcgatatccttgagattcacgcggatttctttatggccgtgtatggataccgcaaggtccacgcccagctgatcgcccagggctgggatccggccgagatcggccgtgaccaagtggcccgcgtcatgcgggaattgggagtcaaaggcgtgcgccaccaccatggacacggaggagctgcccctgcaggcgttggagtaggcgatcgcgtgggccgcgtcgcatggcgggaccgacggtctcgtccaccacagtgatcatggcgtgcagtacaccggcacggtgtacaccaccagggtgatggaatatggcatgctgccgtcgaccggcacggtcggcgactcctacgacaacgccatggccgaatccgccgacggcgcgtacaggaccgagctcgtctggcggcgcaaacccttccatgatctgaaggacctggagctggcgacgttccggtgggtctcgtggtggaactcgaagcggctgcaccagtccctgggctacaggacaccggaagcggtggaaaccgagtactatcagaaccaagcggcacaagccgcctcactataagcgcggaacaaaaatcaggccacttcagcctgttgcatgatcttcttgcccatgttcttgccgacttccctggcaagctttcccaccaacatcgccgagccggatgcgccaagcatcacacccaaatacgcaagaactcggactttggcacctccggcagcaacggcggcaggtccgccggggattcctgccacaaaggcggcgagagtggtctgattcattgatttcttaatcaccccacccgcttttctccgcaacgactccaccgtatatacatgttgcgggccatgctccacaatctcatcgagatattccgaatcgccgaattgctgtcgcagcaacccgtccctatcaacccaactaaccggaagcttcgcaacgcttccaatcatatttatcgccacatcgtaaagctcttcgtcggttttcttagccatgttctctctactctgataagacacactgtgcttaacgcccatggtattcgctcctttgtttgttcaatggataacatgcgggcaatccgcattcaccatgagccatgttttcttcgcgagcgcgacgggctttcaacagataggatctgcttccaggtcagcaattcgtcagaatacgtccgcgcgccttcacgcactctcagcactctcagcacgctcatgcatctacatctcaattacatactttgtgtcactcatgcggcatgttcaatcgccaaagaacgtacagccttttatatcagcgcccatccaaggctacgtttacgtcctgaaatgcagtgggcctcccttttctatctcattgctgctacgagtagcagcgacagcttccaagtctcttagcaatgctcaaatccagggtctcttccttttgccaagccacataggcatgtataaatcaactaatacccgccttttctgaactacactgttcctaaaaaagtttcagcgttgaaaggggctctcaaggcaccggtgccgccgttgccaggggaatgcaggacgccggaaactaggccgcgcacatcgcgcaggatgcgggcgacgccatcgcgaaaggcgctcaggacgcaggcgccggaatcgccgacggagtgcagcagtttggcaaaggaatagcagacggattgaaacagctcccggagatcaaactgcccaagttcgggtggggcaag

SEQ ID NO: 2902 - DNA, 4715 bp, Unknown
  R36_18m  MAG No. k141_43948
agtaggagtcggcggtgccgaaggcgtaagtgcaggaatccggcagaacgatatgcacttgcgcctgtgttgcggctatggtgatggtaccgaccgggcaattactgatggaagttttgccatccagcatcttcaccgtgtgcggtccatgtgtcttgtcccaatcggaccaatcaatgattgcctgatcggtgttgtagttttcaccgttgaacgccacaccttgctgcaatgtttcgaacgtggcatcgctggcatcggcaacgaagatgccatccttttgcacatcgttcatgccgtcgctgtttctcgcactgacagattggctcagtgaaacaacagtattgatgccgctggcaccaagatcacggtagtacacgccatacgtgcctgaaacgatggtcatgcagagcgcgcatccaccggcaaccagtccgagaggaatcagaccaccggtacgccgccctctgaatccgaggatgatgaccaccagccccatcactatgcatactgcggcaatccagatggtgctcagacgcataatgccgataatgcccatgtcgtttacccaaatcagtcccatcagaccggcaaaggagaggaaggtaaggcccagtatgctcaagaccacgattgggcccgccggcttgcggcgcttggactcggtgggggcataggccgtcgcattcatacggtcgggggcaaacggcccgttgggtactgtgccgggcatcacgccgggcaccgcgccgggcatcacgctgggcatcgactgatagacaggctgtgaaacaggttgtgaaacactaggcgcggttcgtgaaacagattgtgaaacaggttgcggagctgaatacaaaggagatagagggaccggttgcgcggctggatatgaggcaggctgtggagctggatacgacacaggctgtgaaaccggtcgcggcgcagatgccccgaatccgtacccttcctgctggcgaatgccgcttttggccaacaaccatagcgctaaggcggcgagcgcaatacaaacccaccccgcacctggaatcacgattgccacggctaggaacaggaagcatccaagacaattccagtcccattggccggcaatgaggtcctcggccaagatgtgcccatcgcgtacatccggcatcagaaaccagccgagtgcgtacagagctgcgccgaagccgaagaacaatgtacatacaatcaccaacgcacgtactagtgtggggctccagccaagccgtaaagcgatgccgctgcatacgccaccgatccaccggtcgtcgccgcgaaccagtccactggatcgcacccaagtgaagaagcgtcgcgatgtcttgtttttttgcggaccaggctgcggctgtggctgatacggattcgcgtttggattgctcatgattccattacaccgcccgaccactgccacaacgctcggggaacaccctgattgttccctgaacaccgggtaaaaccccggccgcaacgccctgagcgcggcacaataggagtatgacgtcatctcccgaaccattgctgcccgcgcgcatgccgctgatgcgcccccggcagggccgctggctcaccggcgtgtgcaagggcatcgccctgcacttgggcatcggcgtgacatgggttcggattgcgttcatcgctctgaccttcctctacggcgcaggcatcatcgcttatgtattcctgtgggtgttcatgcccgccggagacccggtggcggctgcggctcgcacagtgcccgttgatcaggcgccgcttgcgcgaggcaatcagccacttgccgctcatgacgacgaatcggctgccgcaccggaatcattgtccgaggccatccaacgtgctccgaaaccggccgttgtggcattggccggtttcgcgttgatggccaccggactgctgctcaccagcaccggtgcggatgcccagattgtgcttccgctgctggtagggttgggcggcatcgcactggcatggatgaatcttagtccgcgaggcacgcagctgttgtctatgttgggcggcatcgcactgattttcatgggatgggcattgtatgtgcataatgtcagcattcccgggtggggcacctctcctcgacgcattgttgccagcggattcgtgatgatcgtcggtatcgtggtggcggtgatgccgtgggcgaacgcgatgctgcaacgactcacccacgagcaggcattgaaggagcgcgaagaggagcgcgcggacatgaccgcccatctgcatgatggcgtgctgcaaacgttggcgctgattcagctgcactccgaggaaccgaccaccgtattcgccctggcgcgtagccaagagcgcgagctgcgcgaatggctgtatcaggaacgttccacatcggatcgttcggtgggagccggattgaagcagatcgccgccgaggtggaggacgagcacggcaagccgattgaggtggtcaccgtgggcgacgcgcggccgagcgcccagaccgatgcgctgctggacgccacccgtcaggcgttggtcaatgcggtcacgcatggcggcgagccggtgtctttgtattgcgaggccagcgacacgatggttgaagtgttcgtgcgcgaccatggcgaaggcttcgatatggacgccattccgcccgaccggctgggcatccgcgaatcgattatcggccgcgtcaaacggcgcggcggtacagtggagatagtgtccagggccggctggggcaccgaggtcagaatgcatatgccgatcgcgctgaaagcggcgcagggagaacatcgatgagcgagaacgagacagccaagattcgtgtggccgtggtcgatgaccatgagatgttccgtgcgggcgtaatcgccacgttgcgtgattccttcgatatcgtcggccaagcggcggacgtgcccggttcggtggcgatgatcgcacagaccaagccgcaggtggtgttgctggatgtgcacgtgcccggcggtgaaggtggcggcggtgccgagatcctcgccaaatcgcggccctactcccccaccaccgtgtttctggcattgtcggtttcggatgcgccgcaggatgtgggggcggtgattcgcgccggcgcccagggctatgtgaccaagacgattaccggcgctgatttgatttcatccatcaagcaggtgcatgagggctatgccgtgttctcgccaaaactggccggttttgtgctttcggcctttcagggtgtgccggcggcggggtctgatggcggcgctgatggtgcggcacgggctcatgatgaggagctggaccggctgtccgcccgcgagcaggaggtcatgcggctgatcgcacgcggatacacgtataaagaggtggcggccgaactgttcatttcgatcaagacggtcgaaacgcacgtgagctcggtgctgcgaaagcttcagctttcgaatcgcaccgagctcacccgctgggccgccgataggcgcattgtgtgataaacgacagatgagctccctcatcagagggagctcatctgctcatatcactcggcgtcgcggaaaccgttggggttcttggtctgccagttgagggaggaggcggccatgtcgtcgatggtcagctcggccttccagccaagctccttctccgccttggaagcgtcggcgtagcaggcggcgatgtcaccggggcgacgcggcttgatcgtgtacggaatcggatgaccggcggccttctcgtaagccttgatgacctcaagcacggagtagccgtggccggtacccaggttgtagacgaacacgccttccttgtcgatgtggtcaatgacggccacgtgacccttggccaggtcgaccacgtggatgtagtcacgcacaccagtgccgtcgggcgtgtcgtagtcgtcgccgtagacctggacttccttgagctcgccgaccgcgaccttggccacgtacggggtgaggttcgccggaatacccttcgggtcttcgcccagcaggccggactcgtgcgcgccgaccgggttgaagtagcgcagcagcacgatggtccaggacggatcggccacatgcacgtcgcgcagaatctgctcctggaacagcttggaggtgccgtacgggttggtggtgccgccggtcggcgtctcctcggtgatcggcagttccttcggcgtgccgtacacggtggcggaggatgagaagatgatcttcttgacgttgtgcttcttcatcaccttgagcagcacaagcgtggagtacaggttgttgtcgtagtattcgatcggcttggccacggactcgcccacggccttgagaccggcgaagtggatgacccagtcgatgttgttttcagcgaagacgcgttccatgagcgcctcatcgcgcacgtcgccgtcataacgcttgaccggcttgccggtgatttgctcgacgcgctcaagcgccacgggcgacgagttgccgtagttatctacggaaataacgtcgtagcccttgttgagcagttcgatgtcggtgtgggtggcgatgaatccagcaccgcccgtaaccagaacagtagtcatattccctcctttggaaggacttgccttcggttttccttcagtattgagcttacttcacttgacctgtttcacctagcggcaaaaccaagactttcgaggaatgtttgcgtggtggctttctgcttgaagacggccgtgttgccga

SEQ ID NO: 2903 - DNA, 2665 bp, Unknown
  R36_18m  MAG No. k141_44001
acacggtgaagatgctggatggcaaaacttccatcagtaattgcccggtcggtaccatcaccatagccgcaacacaggcgcaagtgcatatcgttctgccggattcctgcacttacgccttcggcaccgccgactcctactacaccacttcgagtgacgttggcggcaaatacgagatggtatacaacaactacatgagtccaagctttgttttcttcgaagctgaaagtgccaccaatgggcctgatcacgaatggttgtataaggaatccgccatgccggacaacggcccagaattaaaaatcaatattccctatgtggtggaagcacgtgtcaacgtggtgtacgcctccgattgggaaggctctacgttccagccgcttgccgatatatacgacggcaacagcacaagcaagaacacaaccgggcaatcggaatgatcaagccgttacaaccaggagatggaatcatgactgatgaaaccaaggaattcgcctccatcgaggatgcgacaccgaccacggccataccttccgaaaccgacgagaccaccgagaccacaaccatggtgaccgtcgatgaccgaaccgataccacggtgctgccatccgcagcggatgatgacaaaacggctgtgctacccgtccccgacgatcatgcggatgcgccggtctcggatgtggatacgcaggcaacagctgcctctccatcgcccatcgaaccaaccacagatcggattgccctggaaacagttgccgatgccgtggagggggatggcgggccgattccatctgccgatgatgtaccgatgtacgcagcatcttcagcacaaccttcctatgagcagtctcagaccgccggcaaaccatgccaaactgaggggatcgccaagaacgtccagaatgctaaggatgtcaagagtgccaagaacatccagaaacagagcaccagcgcgcctactgtggtattcggactattaggcgtgattatcggcgtgatcgcgctggttttcgggtgcatatctccggatcggatgatttcgctgttctcgccgaatccgcaattgctgacggctattatctgcgccgtagtgggacttattctggtaatagtggccgttgtatgggccatagtcggtgccgtcaagaagagaaaatagcgttacaaccattgcattacggtcccagtagaagcacattatgacgggagccgaccgataagagccgaccgttctatgctgatgggggaggcatagtaactatgaaacggatttcggcgcggcgggtagcgagcgtcatcgccaccgcgatggcgatgacgctggtattcgccacacttggctgggcgatgatgccgcaatggaacacacggccctacaccaagcacatcgctatcgcttctgccgacaccaccatcacccctgcccatgcgaacattccccacgaggggcgatatcgtacgcgtgaaacccgactatccatcaagaccggcgacggcgtcacgctacccgccgtactacgtgaaccggtcgacgctcccgggccacgcccggcttgtctgttcattcacgggtccggtaccagcggtgccgaggatttcggcgatatcgccaacgccatggcctctgccggcatcgtgaccttggtgccggccaagcgcaacgacaactacaccgtgctgcatcgcgactacccgcgttttgctcgcgaatacgggcgttcgctcgacgtgctgcgtggcataagcggcgtggaccccgccaaaaccggcatctacgccgaatccgaaggcacctggatcgccacgattctaacctcgaaacggcaagacattgcctttgccatacttacatccgcaccggtgttcaatggacgtgagcaaatggccatggctgtcagcgcctatgcgcatgaggccggcgcgcccaagcccgtggtcaaagacatggccaaattgatgtcgctggactacgcgccattcgatctggcctatgccgactttgatgccgaccggtatctgaaatccctcaccatgccggtgctggtgaactacggcacctacgatacggccatgcccatcgaacagggggcgcagcggatcatcgccacggccaacaagtccggcaacgagaacgtcaccgtacgctattttgccggcaaccatcagatgcgggctggtgagggcttattcaccccgaacctgccattggccgaaggctatacgcaagcgctggaaaattgggtgaacggtgtgactgcgggaaccaaagccgatggatgggcaacgccccaagtcgccggtgcgacacctcaccagcgcttcgccgcgccgcaacgtaccagatccggtatcgtcggctcgctcggcgtgctggccggtctgatggtggcagggcccgtgctgatcgtgatggcggcgatattaggtattggcttgactgtgttttcttggctacagacgttgctggccgggcgacgtagtgtggcgactgtgcgggccatgcatgcgacgccgagtgggctgggagccgcccaacagcgtacgttgcacggcattgccggcttatctgccggtatcggcacagcggtgatggtgattaccgtgctgttgtatggctatatgagcgccgtaggcgtatcggctgtattggttatgcctcaaccgc

SEQ ID NO: 2904 - DNA, 4998 bp, Unknown
  R36_18m  MAG No. k141_44275
atgacgtcgcatctgggctacgcgcccggcgacagggagccgaaggcgggcggcgggcatgcgaactcgcgcaacggttcgtatcccaagacgccgtccacgccggcgggagaggcggccgtgcaggttccccacggcagggacggctcgttcaccccgaggtcggtgcccaagcgttccaggaggccgggcgcactggacgagatgatcatatccctgtacgcgggcggcatgacggtgcgcgacatccagcaccaccttgggaagatgatcggcacggacctgagccccgagacgatatccaacatcaccgacgcggtgagcgacgccgtgcccgaatggcaggagcggccgctggacgagttctatccggtcttgtacctggacgccgtcagggtcaaggcgcgcgacaacggcagggtgccgcccaaggcggcgcacatcgccatcggcgtcgacatggacgggttcaagcatgtgcctggcgtatgggtccaggacgacgggggcgcctccttctgggcgcacgtgtgcgccgagatggccaaccggggcatggccgacgcgctgatcgtgtgctgcgacgggctcaagggcctgcccgaggccgtggaggccacgtggcccaaggcgatcgtgcagacctgcgtggtgcacctgatacgcgcggccaacaggttcgtcgccgaccacgacaggaagagggtgtgcgcggcgctcaggagcgtgtactgcgcgcccaacgggcaggccgcggaaaaggcgctcggcgagttcgcggaaagcgagctcggccggagatacccgtcggcggccgccacgtggaaacgctcgtaggaccggttcgtcccgttcccgcggttcccgcccatgctccgccgggtggtgtacaccaccaacagcatcgaatcgcccgactaccagccgcgcaaggtcagccgcgaccgcggccggttcccccaacgaccaggccgtggtcaagctgttcgggtgtttatggtcaaataaacgtgtacggcgtcaccaccaaatctgaacggtataagcgttcatattggacacggacggcggccggaaatggcatcggcggaagaaaagcgccggtgccgtacggttcctgatagattcccgagtgctaacaaccaacacatggtcctcgggaggaaaggaatgacgacaccggtgcgtattcaacagagtatcaggcagctcgagacgaaaggcctgacgcatacgcagatagccagggaactgggcgtttcgcggacgaccgtggtcaagtacgcgacccgcgattattcgcccgttccgccgaccgggggaactgcgagccgttccctggtcgcgggcgagtacgcgcgcaaggccgacgaatggctcggggccgaccggcgcatgccgcgcaaacagcggcacaccgcccggcgcgtgcacgagcggctcgtggaggaatgcggcttcgagggcagttattcgtcggtgcagcgatgggtcaagcgctggcgccaacgccaccgcggcgaggccgaggggttcagtgagctggaatgggcgccgggcagcgcgcaggtcgatttcggccaggccctggccgtggtcgccggcgtggaacggaccgtgcatttcctggtggtctcgttcccgtactcgaacatgagatacgtggccgcgctgcccggcgagaccgcggaatgcgtgtgccatggcctgaacaaggtgctctcccatgccggcatggtcccccgcgtgctggtgttcgacaacgccaccggggtcggccaccgcagggccgacgggaccgtcacccagacgaggctgttctcgctgttctgcgcgcactacggcttcgagacgaggttctgcaacccgtattccgggcacgagaagggcagtaccgagaacgcggtcggtttcctgcgccgcaacctgatggtgccgacgccgtccgcggagggatgggaccggctcacggacgcgtggctggaacgctgcgacgagatcgcgcgcggcgtccactaccgcgaggacgtgccgatccgggacctgttcgagacggacctcgaccacatgctcccgctgccgccgtccatgttcgacgcgtgcgactggcgcggggtgaaggccgacaggaccggaacggtcacgatcgactcgaaccgctacctcgcgggcccgaaatggcattccatgcgtctcatggccggtgtgcgggccctgcgggtcgagctgcgttccatggacggcgagccgatcgtcacgctggagcgcaggtggggccgcagccccgacaccgcgatggacccgctgtcgctgctcgccatcatcgcgcgcaagccgcgttcgtggggcgagagtcccatacgctccgatttcccggaggagacgcgcgtgctgctcgaccggatggagccgcgcgaacgtggcctgctggtcgatgacatccgccgcgcggccgtggcgagtggcttccgtgcggccgccatggccgtcgtcgagatcgtcgccgcgggcagaaggcccgacagggccgcgatcgaccagacggccaggcggatcgcgcagggcgacggtcccgaatcgagggccaggctcgacacgtacagcaggttcatgagggaggacggcgatgagtgagtcgacggacgccgtggcgggcggacgcaggggcgggcggaccgtgagcaagtccaccccggacgaggtcatggagctcgcatgcgggctgccgttgaccaggagcgtgttgcgttccgtggtcgcggacgccacgcccggccagctcggcgtgctggccgacctgttcagggccgagaacgccagccggacggaatccaggcgcgccaggctgatcaggaacgcgggattcccgtgcgtcaagggcttcgacggatacgactggggcatggcgtcgttccccgccgactgggggcgcgagcagctcatggacctcggtttcgtggaccgggccgaggacctcgtgctctacggcgacgttggatgcggcaagacgcacatggcgatcgccacgggcatgctggcgtgcgggaggggcatgccggtgaggttcttcaccgcgtcgtcgctggtgatgcgtttgcggcgggcgagggacgagaaccggctcgacgcggaactgcgcgcgataggccgcgccaggctgctggtcatcgacgagctgggctacctgccaatcgacatcgacggggccaggctcctgttccaggtcgtcgcggattcctacgagaggcggagcgtggtgttcaccacgaacctggagttcggacggtggggcgaggtgttcggcgacggcgacatggccgccgcagtcatcgaccgcatcgtgcaccacggaaggatcgtcaggttccgtggcgagtcgtaccgcaacagccactccctgatgagataaacgaaaagaggggaaccagccggaccgccggtgacggtgtccattttgaacgccgatggtgttcagattaactggtgacgacacgcagatttatttgacgaaagacacttctcgccatcaaccttcaccagagccttccgggcggcctgcagcgcggcaagcgcgtcagccacctgggcgggagtcgcgtcctcgtcggcggcgaccttcttcgcagcgtcgaaggcggcctggaacgcatcccagccggactcgtacttgtcctcggtcagcttgtcggcggcggcgatcgcgttgttcaacgcggtcttgtcggcggccttgacgctcacttcgaaggtcttggagtactcggtgtccttgagcgtcaccgtgaacgtggccttgccgaccttcgcgaacggcttcgcgtaatccacaacggcaccatcggcgtcaaccgcggcaaccctactgccaaaaggcctgaaagcctaagctcctgcgactgggcttgaaccagtgaccgtccgattaacagttagaaagtctggtagaatggcacttggagcgattgggcaaaacggcttcattccaacggtttcaccgtacttaggatgtacttaaaccgtaagtaagaggtaaatggatgtctgagaatgtctgagaatggtgagaggcagggaggcaatcatggtacgcaaagcaagaaacggcatcgtctacccatatcgggtcgaacgccggaagagactgtccgacggaaccgtaaaaatctacgccagctacgagttcaaggttgacggtaagacatacagccgcaaaaaatacgttgacgccaacaagcggctgacggaactgctacaggaacgggccagattcggcagcgccaacaacagctccatcacactcggggctttgtgggattccgtaacctcatatcatgcaaggccgaaccgtcgccgagtcgccaacgtggcgcggtatccggcatggaattgtcccgcgccatctgagtggtctacaatgccctctaatccaagttaggagtagggccatgggattgaaagaattgagattgaaacgtggaatgacacagcgtgagctagcgcaacgtcgcggcgtgcatcacgttgagattgcgcagatcgaaacgggtaaacgcaacgtccgggcggtgtcgcttgatactgcactgcgattgtgtgacgctttgcgcgttgctaatccacgtaagctgcttgatcctgattccgagacttcggcggattgaatgtaatccgccagggctagacgtgtctttatagcgtggctggcccacgaaatgctaatgttcagccgatatgatcggcgtaagagtaaggaggtggcatagttgccgggaatcagtaggtttttcggtatcgtcatttacatgtatgccaatgaccatggccccgtgaaacattttcacgcggaatataatggccattgggctaagtactcgtttgatggcgatttgattaagggcggtttgcctaggaaacaggaacgtttggtgttggcgtgggctgaaatacaccgtgaggatctcgagtccaattggaagtgtgtggaggcccatgtgcaac

SEQ ID NO: 2905 - DNA, 3682 bp, Unknown
  R19_24m  MAG No. k141_64
cacaggtcgaacacgccgatctgcaccagcgagcgggcgaatttgatgccgatgatgcggaaccgcgtggtgtcgagtttgagaccgatggaacggcggttcttggaaccttccaaatcgccggtctcttcaatcatgccggcctcgataaggcgtgcggtgattttggtgatggccgcgggggtgagttccagtgccttggcgatttgcgcgcgggagctgatgccgttgtgatacaggtgcttgacgatgcgggagcggttggattcggagacactggcttgggaagtggcatgggtggtgtttgttgccatcggtcttaagtcctccttgtctgcaccgttgcgagttgttccgctcgtctttgaatctgaacttgattaagatattaacgctgttaattgattgacgcaatcaatatgtcattcggtgtgtcgtgcatgtgagtgtcgtcttgggggaatttgttaagatggttgtcaatagtcggatgcacactgatatcaagcgaaacgttcgatgaagaacaggggaggactgatgtctgaaaacactatgaacaatctcaaaatcggtgttgacgtgggcggaacaaaaatcgaagctgtgctggttgacgcaatgggcacggtattgggttccgcccgcattcccgccagacatggcaacgatgccgtgatcgaagacatcgtcgctgtggcacatcaggcagcgggtgagcgttttgacgaggtgagggccatcggtgtcggtaccccgggcacggtggattcggccagcgggcatgtgggcaatatcgtgaatctcgacgtggtctcgctggatatggggccgttggtctcgcagcgttcgggcgtgccggcccatgtggaaaacgacgtcaatgccgccgccgtcggcgcggccaccgtattgggcggtgcggacggcatgtccggtaccattgcgttcctgaacttcggcaccggactggctgcgggcatcgtcgaaaacggcgtgctgatgcatggctatagcggcgcggccggcgaaatcggccatatcccagtcgaacctcatcgcctcaagtgcccttgcgggcaatacggatgcttggaaacagtctgctcgggcgcatccgtggggcgtctgtggcccaacgccgacccgccgatgcccgacctgattcgtcgcgcgaaaaagcgggaggccaaggccgtcgatgtgctggacatggtagtgcgcgccatcggcgacaccatacaaatcctggctcagtccgttgatccgcgactcatcatcttgggcggtggcatggccaaaaccggcgaaccattggtcgaggtgatcacggctgagctgcgccggcgcgaatcgcaatgccgattcctcgaaacgctggacctgccggcccggctgcgtctggcacctgtcggccaaccagtcggagccatcggtgccgccatggcggcgtagcctggcatagtgccggggcatgggagatgaggcctcagatttgtctccgaggccccatctcccacgcagtcctatatcgctttatgtcgtgctgtgccgcgcttggtcttgcgcgtttcgttgccggggtgaccggcttttatttggccaagtgttggaagaccacggcgatggcctcgccctgtacggtgatgtcaggtccgcattcgcagcgccgaatcaccgtgtgtttgtggaaggacgaggacgtggcggcatccagatattgctgggccgcgccgatgaacgtcgcgttgatgatgttcggctggccatagacgcatacgtctgccatatccaaaaggcccacaggcatggccagggcttggccaagatagcggcccgcccgagcaaggataccctgatgctgctccacgtctgccgcgctgagttgcttcttcaatgcggttccggaaatcatcgtctccaagcaaccgtgcttgccgcaagggcacagcggcccgtcaagatcgatggaaatatggccgagctcgccagccgcgtgcagttcgccgattaccggcgtgtccgagagcagaatcgccgaaccgatgcctctttcgatgcgcacgaaaagcatattcggcccgccttggccaaagaaacgttcggtgagcatggctgcggtggcgtcgttgctgacgtttacttcaagtccgaaatgttcggcgatcggtgtggacaggtcgagattgttccagccgcgcatcgtggaggagcggaccacgccgttgtctaccacgccgggggaggcgactccgatgccgatgacctcgccatcggacatgcccagcatcttctcaatgagctcgatgatcacatccacggaaacgaatgagccggtgttcagggtgacttcggcgtgacgcagcggctggccgagcagattggtgactgcgccgtgcagcaggtgctcctgcgtcaggtcgatgctgatgatgcgcagtcgatcgatatcgatgctcagcagtgtgcctcgtttgcctttgccgccgctgggtgcctgaccggtctcgcgcagcaatccttcctccagcatccgaccgaccacatcggaaacggccacgcggctcaatccggtgcgtcggccgagctcggcgcgcgaatactggttggtggggaacaacaacctgaagataagttggcggttcttgcggcgcacatcggcgggggaagccttggccgcatggtcgtcggtcgttgtgttgagaccgagatatgacatgtttcctcctacctgatggtgagcgagtggacggcgattgttgttccatacacagcttagacggtgaagcgcaatttcgtcgttgaaactgttatgaaacttcactaataaattccagtgtacctgtgtgaagcgtcaggaaacaccgtgagtgttcatgaggtccaaaattgttactatcattaacaaatagcgaatcaccaatcggcgctacgccgaacggtggttggaacgccgcgcggcacccggacgtgacaaggatgttgccattatccgcaagacgggcggcggtacagcgactcgcatcgggcgggccgcacggaactggaggaaaccgatgccggaaatcatcattgtcaagaacgaagccgaggccggcgagatctacggccgttgcgtggcggacctgatcaaagcaaagccggacgccgtgctgggcctggccactggctccagcccgctggccgcctatcaggcgctcgccaagatcgtcaaggacgaggccattgacgtttcgggcgtgcgtggtttcgcgcttgacgaatacatcgggctgccgctgacccatcccgagtcctatcatgcgaccatccatcgcaccgtggtcgaaccgcttggcctggacccggccaaggtccatgtgcctggcgacgtactcaacggcactccgctcgaagatggcgacaaagtcgcgctggccggcccggcctatgatcgtgccatcgaagccgctggcggcatcgacgtgcagatcctcggcatcggcaccgacggccacgtcggcttcaacgagcccggttcctcgttggcctccggcactcgcgtcaagaccttggccgaacagacccgcgtcgacaacgcgcgcttcttcgacaacgacatcaaccaggtgcccacccactgcatcacgcagggtattggcacgatcatgaaggcccgtcacctcgtgctgctggcgttcgg

SEQ ID NO: 2906 - DNA, 18581 bp, Unknown
  R19_24m  MAG No. k141_129
cagcacggccgtctccggactcggtccatcgtcacgcggttcgggcgcatcgtccaacgcggtcacattcgggcgtacgcgccgcacgcgcatgtagatctgccgtttcgcgatgcccagcagccaggacagcaccttcgcatcaccacggaacgccctcgccgaccgccagcagcccagccagacgtcggcgcacacctcctcggccgtgccggcatccggcacgcgcacgcgcacgagcgcccgcaccgccgcagcgtgacgcccatacagggtctcgaaggcgcgttcgtccccggaggcgacccgcgcgagcagatcctcgtcgcgcatcaccgccccaccgggcgaggtcatgtcatcctgcgtatgcggctccttccacggcacatcgtaaacaaacgttcattgatgtatgtagctagaaacgaaccgacggttcacgacacgagcaacgacacgcccggaaggcatatcggattaagttgtgtagaagaacagaaactcacagaagaaatcgttgcgcgcgtgcattaccgagtcccaagcctggctagttcttggcaggaatgctgacatccagctgccagtgggcttgttcagtgtgggtttggaaggtgccgccgtgtgtttcgatgatggtccggtagcggtcgaggccgctgcccaggccgagtcccatgtcggcgggtgtggtggtgtcgctggcggagacgtggatggcgtccgtgtcgaaggtgacgcagatggcgtaccattcgccccggtcggcgtgttcggcgatgttcgcgtacagttccgccggcaagcccgacagcagtcgcatggtctccggcgtgagcggccggtgtggttcggcgagcaggttgtcgccggtgaatcccggggcttcgagcctggactcctcctcgtcgatcagcgattgcagaccggcacgctgcgaggcgatgccggcttctgcgggcacgggccggctgccgcactcaaatcgccgtcggctggttcaaagcaggatgtaaacccgctatttgcccaacagttcgtcatggctgccggttcgcatgaacatggcggtaccatcatcgcgaatccatagaagcagccagtcgccggcattgccgatgtggcattccaatacgccgtttaaatcaccggtaagtgtgtgggcgcgatgtctacgcctcaatacttccttggagtccgccgtgtcctcaagaaccagacgaatgacttctttcagcgggcgtaaatcagtgtgcttgcgtttgagtttcttgatatctcgctggaatgccgctgtgtaatccggtttgagcattgatcagattcccaacgaatcgaacatctcatcggcactgttgaaacgaggtttgccgtcggcgagcctgttcttcgcctcgtcaagggcctccatggtttcaggcggcacggtcgtataggaaaggtttaggggaatgcgcctctcccggacaatctgcttgtagaaggcgcgggtgaccgaagacaagtccagaccgagatcctcggcaatgtttgcggctttctgcttggtgtccgcatccacgcggactgtgacggatgccatgctcacattaacctccaacatcattacgtaagacaatagtatgtatttgtatgctaatagtcaacattctgcggttgcggcatctcgaccatggtacacatcccgcaagcggattgtttaccggatgcaatcgatgatcggaatgccgaccatccagctgtcggcgggcttgtccagaatggcttctggttcatcgcaacgccagcgcgggttgcagccgtatggctttgatggccggggcaagagagccgacaagcgaggtgacgatggacgcacaggccgcaatcatcgccgccgtatatgggtatgcgggcggttccagcggcgagtcggcgggcatcatccacggaattgcccagaccagcaccgcggagatgagcaccgcggcgaaggcgatgatgaggccgagcagcacggacgagccgatgacctgtatggctatgctggctctggtcgcgcccagtgcgcggcggatgagcagctcgtgcgagcgttgctcgatgccggccaatccgatgttgatcatgccgatggcggataccgacaacagcaatatcgcggtgacggtgacgccgagttggagaaaaccgataacctgctcgtaatcatcggcattgtcggaacggttccatgacgatatgctgccggtcccgacgtcggacaacagatcgtccaacgcggttttggcgtgttgatcgtccacgccttcattgggatggacgaggatggtcagcccatccggttcccaggcttgcggccagtagcgttgcagtgtggtcgcgttgacgtagatggtgggtgtgtccgtcccgtcggcgatgacaccgttcacccgtgccggcacctgttgcggatttcctgtccgggcgagtgccacggtgccgtcatgcacgtattggcgggcgctttcgttgactgcggtttccagcgtggcgggttcgtccgctccggtcagccatgtgccctcgatgatgggggcgggcatgattcttgtccgttcggcgtcggtgatgatgatggtgacgcggcgtatctccgtgttgccgtcaccggacgacgcccatatggcgaggtcgttgaggtgatattgcgccgatgcgattcccggacggaaatacgcgaggcgttcctgcaaagccgtgacgacttgcatgttcgccgatgatggcacgtcgacgatggcgctataggtgggtgacttgcctcccagtcgcgcgttgaccgcttccagatagtcgcgtccgagcgtgccgacgagaacgccggcgatgagggcgatgatgccgatgaacatcgacagggcggtgaggctggtacgcaacgggttgatgcgcagatccttggcgatcatgcggatcacgacagtcgccccctgtcgatcgtcagtcggcgttcgcatcgggcggcgagctgcgggtcgtgcgtgacgaggatgagtgtgaccccgagttcacgaacatgtcggaacagtatgtcggcgaccatgtcgccggtttcggtgtcgagcgcgccggttggctcgtcgcagatcagcaggtcgggatctcccaccagcgctcgggcgatggccacgcgctgctgttcgcctcccgacaggcgcgacggcatgctgcacaccgtccggctcccgagcccgacggtgtgcagcatgcgcgaggctcgtcttctgatgacccgcagggggatgcctccccggtattgcaatgggagtgccacgttctcccatgcgctcagatgcggtatgagggagtagttctggaacacgaagccgacatgccggcagcggaagcgcgcccggtcggcgtcgttccacgcggcgcagtcccgcccgtcataggagagcgttccgtcatagtcgttgttgagcagcccgacgatggaggcgagactggttttgccggatcctgatttcccgatgatggcggtggacgttcccctctcgaacgatgcgctgacatcgtccaccgtcgtcagacgttcgccgtcgggcagccggacttcggcgctcagatgttccaactggatgagtgtgctcatgattgcgctcccggtgtgagattcggagctgtcgcggacaccatgtcaccttcctcgagaccgtcgaggatgatgatcgacgtgccgtccgatgcccccaacttcacgttcacggtggcgaacgaatctccgtcacgcctgctgacctggccggaggcgagcctgccggcgactgcggtgacaggcaggatcaaggcgtcctcgaccgccgtcgcggtcagtaccacggtggcgttctgcccgggacgcgcctgcacgtcttttgggaacaggcattgcagtgtgcgagtcgattccgtcccatgcgcagtcgtcgccgatccggccgtatcttccgctgatgagggcggagtggcgacgccgtcattcactaccgcggcacagtccgtgggcccctgcgcgtcggtgatctggaatcggcccgtcaacggctggtccgggtctatggtcgccagcagcgcggtcgcgtccacgctggcgctcatgccgccataccgtatcgagaacagcggatagtccgcggccatgtcgttgtcctgcgcgaccgtttcgatcacgccgtcgaccggagccgtgacctgctgatcgccgacggtacccaacacgtcgcccgcatgcacgtatgctccttgatcagtcgtggagtggaaccagcctttcgccggagtcgtaagcgagaacacaggagccacctgcacgccggtggaggaagaggataacggcgtgatgccgcccctacgtacctcgaccgtggatgctggccgcttcgccgtggaggaggcgtcggacgatggcgtccgcgacggcgagcaagccgtcatcatcgcgcacatcgtcgtggccgtcacgcacgccaacaggcatttgaacggtgcgatcgcattcatttcgtcggtccgttctcatgccggtaccatgtgcagtccgtggtgtagaagtcccgcatggtcgaatagtcgccgagttcggatttgccgatcacatcgttctcgtatatgccatccttgtcctcgtagtagttcttgaaccagtcggtatccagcagcttgcgcagctgctggagggcgcctcgggctgcttccgcgttggtctggctgttgtcgagaatgtcgcgttccaccgagcactgccagtagacatacgcctgtccttccccacttcccttggcatacagcgaggacgcggcctgcgccttgggtatattcgctggaaacgcatcgccgttcatcagttcaaaggggaaatcctcgacggtcgccttgtattcctcgttcgcctgctgccaggtcagcatgccgccacttcccgaggtgccgccgttcggagtcgtcccgcaaccggacagcagcagcatcactgcggtcagaatggcggccctgcgtcgtgttcccgatttcatcatcatgctccttcggacgattgcacaactgtcgccaaccattagcccacagacggcgatccgggagcaaaagactgtcatgcgcgcgcatgacaacgatacgtcgaggagcatgggatgcgcatacgatgggtggcatgacagacctatcggactcgcataccatctccatcggggtgctggacaacgattcgctcgccctcaacgccatagccgtgatgacgagccgtctctccccgcggttccacatcatctggagcaccacgtccccggcgatggcattgcagcgctgcatgacccacggcgcgcgacccgacgtgctggtcgtcgacatggccttgggaggcatcaccggcgcggacatatgcgccagaatccgtcggcgcactccgacgatcggcttggtgtgcgtcacctcctatgaccttgatccatatcggcaagacgcggtcgaggcgggcgcgcaatgcctgatagccaaagatgacatcgtcaaagagctcccgcaggccatacgatgcgcggcacagggcgagcccgtccccggcaccggattccccaccgcacgggaagccaatcgcaaactcaacgaaggacacgcgaccgagggccggctgccggaaaacgacaagccatcgctgtcctccagggaacgggacgtactgcgcctctacgcgcatggatcatccaccgacgagatagccgcgctcctgaatgtcagcaagggcagcgtcttcacctacgtcaacagggcatgccgcaagctccatgccgccgaccgcaaggaggccctcgccatatgcgcccgatacgatctgctttgaaccgtatacaccacccagccatactggccgcggggctggtcctcgcagtggcgatccccgtagagatgggcgtgtactcatcccagaacctgctgtcatggtcgaccatacgcatatcgctgctcgtcgccgtcctgtgcgccatgctcggagcggcaccggtatgggccgcctgtctgctgttcgcggtctcaggatacgcgttgctgtggctgttctcgccgttgacgaccatcatgatcgccgcactgacctccatagcggtcctctcgttcgtcaaaccccgccttggagccgcttccgcactggcggccctcgccgccctcgccgcgaacaacatgcagaacaacctcacctcgtcgaacatcgtaggcatgatcatcatgtgcctatgcccattgtcgctggggttcagtctcaacctgctgttcgcccaacggcaggcgaccgcgacactcaggcaacgactcgaccgcgaacacacggcgcgtcacctgcacgacaccatcagcaacgacctcgcctacatgatcctgcgcatcgaccaggcaagccgcagtgattgccccgccgatcgggagcaatatcagcaccaactcaccgatctgcgcgccatcgccgaaacggcgctcgaccacacccaccaggtgatacgacaacttgaacgcaccgacaaaccagacgatcgcagccgcatcgtcaaaacaaataacgacgacaaaaccgacaggaaaatcgaacagcagcgtgaacggcttgacggcatcattcaatcgcaacgacgtcgccttggcggcctcggattccaaggtgacgacatcctcgggacgttcgaccatccactggcggacgacatcctcgaccttctcgaaggactgctcaacgaactgtacgcgaacatcgccaagcacgccgccccgcacgaatggtacgccgtcacgatctccttcgaccggcggcacgtcatcatttcggcaagcgacgtactaaaggacgaagcggtacggctcggactcggcagcggcctcaagagataccgaaccgttatcgaatccatgtccgggacgttcgacatcaccgatgattccgacaactggaacgcgaacatcaccattccattgtctgtaacacgccggtaaagggaatgacggcctccagctgccagtgggcttgttcggtgtccggctggcttgcgctggtgtgtgttcttcgagcgagtcgatgacctcgtgcgtgtggcccatggcccggctggcggcgtcgcgcaattcgtcgagctgttgctggtattcgtgttcgtcggcgggcatgccgtcggtcccggcgtgaccatcgggacatccagcatgaggattacgcccgtgacaagcgccggccacaggaaccggtccgggcggaacatgccgccgaccaagccggcaagcacagccagagccaacatgatatcgcgcacggtcgcggtgccggggacccgtgccgccatcgagaacacgtactccgcgagcaccgccacggacaatacggcgcaggacgccgcgatcaccggatgcccggcatgccgcaggccaagccggtcggaaagccggggcagagcagatcgtatctggcgcatgcgtccagcacctccttgcggctggcgactcccagcttgtcggccacgcggtgcacgtacgtgaacacgctgcccgtcccgccgctcctgcgacggatgcgccggcacacgtcagcgcccgtgatttttttcccaacgccatatccaacaccagcgcatccggcctggtatgcgggttatgacaatgctcgatcgccaccgcgggcgaacccgtgcccccgcattacataaaagtccttggaaacggccgagatcatcgcgcacatcgcatccagggcgaacggatcattgtccaatacgggcgatacggatcgaccgcgccgcagccccggtcatgtcatcatgtcccatgccgctcatcgtggccacggtcgcagccggacgaaacctgctatcatgcgattacttgacacgatgttgcgcttttggccatgcgcaggttgaatgggattgcgccacgaaaggatatgccatgaacgatctgctgattatcgacatgctgcccacgtacgggctgctgttctacctgctggtctcggtatccgtcttcgtaggatgccgtggcctgcgccggaggacctcggatcgtggcctgctgcgttttgccgtaggcgcgttcttggttgtttccgcgctcggcgccgtgttcgctgcgctggtgtatatcatggcagcgcctttggcgcagccggatatggtcgacttctaccgcacgtaccggccaggagctctgatcttcctgctgggattgttcatcatacaatttgtcttcggcgtcgctgccgtgtatgggggaaagtaacctggtatatcctgcgataaacgcattggcagacacttgctgcctatctgtaaacacactctagataaggcttgcggccgttggccgagcacagtagtagtgtggtctgctgtgtcaacaggaggagtgtgaccaatgcggctgattgagacatggctggcggaccaggaacgcgcgtttgacttgttcgcgaaattcccggcggaggagacgggattcgaaaacccagcggccggcatgaatcgtgaacggttcgccgcatatgtgcgagggttgcgtgacgagtcgatgggcatcggcctgcctgacggctgggtgccggccaccaagtacattctcgtcaacgatgagggcgactatgtgggcatcttcaacctgcgtcaccggctcaccgacttcctgcgcaacggtccgggccacatcggctacggtgtcgcccgcgaataccgcggtcacggctacgcgaccgccgggctcaagctcacgcttgccaaggcccgcgagctcggcatcaaggaggcttacctgagtgtccacaaaaccaatccggcaagtcttgcggtgcagcagcattgcggcgcacgtatcgaccatgaggacaagacggaatactacacacgcatcgccacctgcacggagagcgatggcctctatgcgcgaggcgattgacggcgcctctcgcgtataaatggccgattatcaatcggttttaatcaatctcgcctcggtcgataaagtcgccgtcgaggaaccaataatcgtgcggatttccgcgtaacgccatgaacggcgtgagttccacgccctgtgtctcagctctgctcagcagataggctcggataatccacggatactccagcacgcccgacttgagggtgatgatttgctccacgctgctgccgctgacgccaaaatccctgccgccgttcggcggtcagacccagccggctcatgttctcctgaaattcgcggatagtcgccgcgcgttgctcactgttcaaagacatggcttcatgaatgttgcattggcgccttaatcatccatagttaaggcaccacgcaacatacgattcgcttacccacgcagccatacgacgatggttggaatggactgttcggcgaagcggtctatggcgtcggcggtgacgtaggcgtgggcggtgaggcgcaggtacagttcgccgccgaccgcgctggccgcctcggatacccgacgctccgcgtaatcggcaagatcggacatgtaccggcgcacggcatcacagccccacagtcgctcgatctcgcgcagggactcgggcgcggcgatcggaccgcataaatcctgggtgccttgctcatcgaatcgctccgggaacgggtcagcgaaaccccacgagtcgatcagtggccacaaatcctgaccatcctgaccgccttcgggcggaatcaccagcaatgccgtgccacgcggcgcacacgggaacttatgaaaattgccgacccaccaatcggactgcagtccgccggccggatcggccagttgggcgggagcgtgcgcgccatcaaccaaaatgcggatgccgcggcgatgggcttcggcggcgatgcgctgggccgtaaacagcatagcggtggcggaagtaatctggtccaacacgatgaacgacgtacgctcgctcatctgcgcggtcacggcgccgaccacgccatcctcgtcggcgtcaatggtaactggtgcatcttcctcatccatgcgaatgagacgaatcgcctttcaccccaatgatttcgctctcatggctgatacccgcgtgccgtcatgttccgtaccttggaatcagaagtcgagagtcaaggtccgaaaccgaatggagcggaccgaagcagggagcattgaagatgggatttctcaagaacttttccgaaccgtttgcgttcgcgctggcattgtggccgtttgtgtccatgctgctgacggtgccggtgctggcgttgctgtatcatcgcgacaatcgcatccgactgtcgtcggccatagtggcgtatggcacggtgctgtacctgctcggcctgctgtgcttcacactgtatccgatgccggccgatgcggcagcctattgcgccgcgcaccatctgacgccacagctcaatccattgcagttcatcggtgacatccgtaccgatggtctcaccgccgtactgcaaatcgcgtttaatatcgtgttcttcctgccgttgggcttcatcatgggccgtatctggcgttggccgctgccggttaccgcagtactgtcattcgccacgtcgctgtttctggagacgatgcagctgaccggcctcatgggcgtgttcccgtgcgcctaccgtctgttcgacgtggacgatctcctgtggaacacgaccggcgcgctgatcggattcgcgctggccatgctttcgctgcgcctgattccggcgcgggtcgccgatatgacgccgaccaccacacctggcttcatgaggcggctgatcacgttcatcatcgacatgacgctgatcgggttcgccgtgatgccgacgcatctgttcgtcatgatcgtccgctcaaacctgccctcgggctccaacggctcatggcagtcgatggaaccgttcgactggaccggctcgatcctcttcctggcggcgctcatcctcttcgagggcgtggtgccatggttgcgcggcggctgcacgttcggcggcagcttcacgcacatgacgatagagacccggccgcgcgaagggtggcttcgcgtggcgttctatgtggcgcgcatggcgacgctgatcgccgtggtgtggtggcatagtggcggattcaatctgctggtgttcatcggcctcggcatcttctggctggtcaagcgtcagatgccgtacgacctgatataaaccggcgctccgctgcttggcgttacaggaaaacctccgaccactggtcgggattcggaatgctgcgcagcgggccggccaacgatacggccaatcccgctacggaacagaccacggctacggccatcaccgccgtgaaaccgagatctggctgttgcaacagccagccgaccatcgccgggcatgctgcgcccagtatgccgaccgtggtttcaaatacggcagaagcccgcccctgcatgttgtcgggtgtcttgccgtagagaaagcccagcagaccagcgttcaacgcggggaacggcaggccggccagaatctggcagatcagaatggccgcgtagctgtgcaggaatagcagtggcatctggctgaccacgaacaacgccagcgcgcccgcaatcagtttccctgtgggaaccatatcgactagcttgttggccaacagcgagccgaccaaagtactcacgcccattgccgtgccgagcagtccgatcatgaccgcgttggcgccacgggcggccaacatgatctgcgcgccggtgatactggctacgcaggcgatgttcacaattgcaccgagtatgatcgcggataggaagacgcgcttggtcagggcccatcgccagccttcgaccaagtgcgtgggaaatggcacaacagaagtgccgtgggcccaaacggcgaccacggcttagcgcgacgagtcaacgcgcattagctgtctgcgaacgacaccaacaccttgtacataacaatgccctttgcaaaaaccaaactccaattgttgtaccagttcgagcacgggaccaggcacgtcactgggctcaacataatcggccatcaatggtttctcggcttcgaggggctgatttcgtccggtggggacatctacttggctttcgaggggctgctcaaacgccaaaccgcgagtataaacggctttgtggcaacgacatgacgccatttcggagccttgcctactcgggcatcagccccttgaaacgcaagtagacctccggcgaacgccaaatcagcccctcgaaatcgagttaggcgttgttttcgcgtttgcgctgccgttcgagtgcgtaataagccgcgtagcagcaggcgacgaacgggatcatgcaatacagggtcgaacgctgcgtatcatcgagcaccacgagcaccagcgcgccgatgcacatcacgatggccagccacggcagcaccgggaaaccgggcgcacgatagccgagctcatcggcgctgtgcccatcccgcgcccattcgcgccggaaacggatatggcacacgcatacggagaaccacaccaccagcgtcgccaaacctgacacggcgaccaacaccagatacacggtcgaggcggcgatcacggaagacagcaacgccagcagtgagcccgccatgctgaacagcacggcccacaccggcacaccacggaaattcgtcctagcaaaacgttcgggaatcagccgctccttggccagcgaccacaccatgcgcgaacacacgtacaggccggagttcgcggcggaaagcacggccgtcaacaccacgaagttcatgatgtcgccggcgaacggcataccgattgactggaacaccagcacgaacgggctcgtatccacgccggcctgatgccaggggatcaaggccgccatcaccagaatcgagccgatgaagaaaatcgccaggcgcagcaccgtggtgtgcacggccttgggaatcgcacgcgagggatccttggtttcgccggccgccacgcccaccacttcggtgccggagaacgcgaacaccacggtcagcagagtcgagaaaatcggcgcgataccgcttgggaaccagccgtcggccacgaagttgcccagcaacggcgcggaatcatgaccggcaatcggtatggcgccgaagatcgccagcaggccgatcacaatgaacgcgatgatggcgaacaccttgattgacgcgaaccagaattccgcctcgccgtacagccgcacggacatgatgttgagcgcgaacaccaccacaatgaacacggccgaccacacccaggacggcgaatgcgggaaccatcgctgcatcaacagccctgcggccgtgaattcggaggcgagcgccaccgcccagttcagccaatacaggatggcgatggtgaacgcggtgccggggccgatgaaccgcttcgcatacatgtggaagctgccggcgtacggcatggccacggacagctcgcccaacgacaccatcacgcagtatacgagcagagagccggccgcgtaagcgaggatcgcgcccaacggtcccgcctgatgaatcgcgtagccggagctgacgaacagaccggtgccgatcacgccgcccagggagatcatcgtcaggtgacgcgactccatcttccgttcaaggccggtatcgtccttgggtgtgccggctgccgccatgctcgggtctcctttggtcgggtgaacagttgtgtctcgtgtcggttgtgcgggcggcgctcgatgccgcctaccatatgatagcggtaacacgaacagcgagtggaacacgaggagtttggaatgatggaactgtatatcggatcgcatctgtcgacggccggcggatggaatgcgctgctggaacgttcccatgaggagggcggtaccgcgttcgcgttcttcccgcgttccccgtacggcaagcgttcgaaggcgctcgacccggccggcgcggcggcgttcggtgcgcgtctgaaggctgagggctatgggccgttggtcgtccatgcgccgtacgtctacaatctagccggcaaggatgaggccaagcgcacattcgcgatcgaggcgttggccgaggacatcgagctgctgaccgccatccgcgaggccggccaggaggtgtatatcaatattcatcccggcgcgcatgtgggccaaggctccgagaccggctgccggctgatcagcgagggactgaatcaggtgttcgagcgtacgaccggcgtcatggtgcttctggagaccatggccggcaaaggcacggaatgcgggcgcaacttcgaggagctcgccacgatcatggatggcgtggagaacaaggcgaacgtcggcgtcacgttcgacacctgccatgtgttggatgccggctacgatttggtgcacgactacgacggcgtgatgcgccagttggatgaggcgatcggcttggccaaggtcaaggcgattcatgtgaacggttcgcagttcggcctcggctcgcacaaggaccgtcacgccaatatcggcgagggccagctcggcatcccgttcttcacgcgactggtcaacgacccaaccatggccaagctcccgatgattctcgaaaccaaggagcagacgcccgccacgcatcgcgacgagatcgagttgttgcgcggattggtgcaaaagtagtcgtagtcgaccaatgtcgagcagaagagacctgtttttgactgatggccatacgaggttagttatcagcggggtgttgattgatccgtcttcatatacagctgcatagccggttccagctgcaagagctcaaaacagacgcatgggttcggtggaatccaatggctgaataagacgtttgccgtcgctgttcagtggcgcgacttcgtgaaattgcagatgccgggaaagcatggtacccgcttcccgcatggaatctaacagtgcggctccgtcaacggagcggtccagccatgaggcaaccatattccgaggcgccagcaggggcatgcgatcatgcaccttgacgaactcgtccgcggcagggcaggtgatgatggttgcggtcagctgccatggcgatgcgggagacggcctccaccatgagtacaggccggccaaagacaatagttcatcatgtggtgcgtgaaaatagaacggcctgcgacctttccattcgtagtagccggaagcggggatgatggctcgcatggattttgtggattcggcgaacgccggcttgacatgcgcagactccacacgcgcattatatgtggggtagctcagcactttgctggcgctccatcgcggcactagcgaccaataggcaccggtcagatgacggcggccatccttgccctgtgccaccacgccaatgttctgcatgggtgcgatgttgtaggaaggctgtggcagagtgtcaacgcgcacgtcatcctcgtctaccgcgaactgtgaggccacggcatcccaatccaaatcaagcgcgaatctcctgcacatgcgcccagtctatgccatcaatggaatcaatcccaggccgtatgaccgatattcatggcgattttcctttttgttggccgctctggttccgtagcgatacgaaccaacgaggaatagcccagaatgtaggacgggttcggcaatcgggacggggcgtgacctagagtggcgcatgaccgaacaccaacaaagggaggaccatgtcggttttggacgaactggtggcgggagcgctggaggatcagcgcgcccgtgagctcaccgtatcgcttgaggacgtgaagaaggccgcgctggcggccccggctccgattgacgcgacacgatggcttaagcgcgccgacggcatccccgtgatcgccgagatcaagcgcgcgtctccgtccaagggccacctctccgacatcccggacccggccgcgctggcccgcgagtacgagaagggcggcgcaagcgccatctccgtgctcaccgaaggccgcagattcctcggcggccttgacgatttcgacaaggtccgcgccgccgtgcacattccggtgctgcgcaaggacttcatcgtcaccgactaccagatcttcgaggcccgcgcccacggcgccgacctggtgctgctcatcgtcgccgcattggacgacgcccagctcaagcacctgctcgacctggcgcacgagttgaacatgaccgtgctggtggagacgcatacccgcgaggagatcgaacgcgcccgcaaggccggtgccaaggtgatcggcatcaatgcgcgcaacctgaagaacctcaaggtggacgtgaacaaatacaacgaactcgcggccgatctgcccgatgacgtcatcaaggtggcggaatccggcgtattcggcgcggtcgaggtcgaagactacgcccgcgcgggagcggatgcggtactggtcggtgaaggcgtggccaccgctgatgatcatgaacttgcagtggaacgactagtaaaggcaggagcacaagtgaaagcatccgaaaccaccccgctcagcgaacatcagggaccgtactggggacagttcggcggccgctatgtgcccgaggccctcatcaccgccctcgacgagctggagcgcgtgtacacgcaagccaaggccgaccccgaattccacaaggaattcatgacgctccagcagcgttacgtgggccgtccgagtccgctgaccgaagccccgcgcttcgccgcactggtcaagcagaagaccggtctcgacgcccgtatcttcctcaagcgcgaggacttgaaccacaccggcgcgcacaagatcaacaacgcgctcggccaggccctgctcgtcaagcgcatgggcaagactcgcgtgatcgccgagaccggtgccggccagcacggcgtggccaccgccaccgtgtgcgccatgctcggcctcaagtgccgcatctacatgggccagatcgacgcccgccgtcaggccttgaacgtggcccgcatgcgtatgctcggcgccgaagtggtcgaggtgaccctcggcgacaagatcctgaaggacgccatcaacgaagccctgcgcgactgggtcaccaacgtcaaggacacgcactacctgctcggcaccgtcgcgggcccgcacccgttcccggccatggtgcgcgacttccagaagatcatcggcgaggaagccaagcagcagctccaggactggtacggcatcgaccatccggacgcgatctgcgcctgcgtgggcggcggatccaacgccatcggcgtgatgaacgccttcctggacgacgagcgcgtgaacctctacggctacgaagccggcggcaacggccccgaatccggcaagcacgccatccgcttcgcccccggcaccggccagctcggcatgttccagggcgccaagagctacctgctggaaaccgacgaaggccagacgctcgacacctactcgatctccgcaggcctcgactacgcttccgtgggccccgagcacgcatggctcaaggacatcggccgcgtgaactacagctgggccaccgacgaggaggccatgaacgccttccgtgacctgagccagaccgagggcatcatccccgccatcgaaagctcgcacgccgtggccggcgcgtacaaggccgccgccgatctgaaagccaagggctatgacaaggccgtgatgatcgtgaacatctccggccgaggcgacaaggacatggccaccgccggcaagtggttcggctacctgaccgacgatcaggccgccgcgctcgatgtgaccggcgcccacggcaatactgtcgcctgaacaagaagaggagattgttgattatgaccaatgaagcaaccacgccgtccggccagccgctgggcatcagccacaagcccagcaagtcaggcgctatgttcaccaagttcaaggccgagaacaagcccgccttcatcggctacctgccctacggcttccccaacccggacgtctcgcttgacgccttcaagacaatggtcgagcacggcgtcgacgccgtggaaatcggcctgccgtactccgacccagtcatggacggcccggtcatccaggctgccgcctccatagccctgaacaacggcgagaccatcaagcgcgtgttcgaggccgtcgagaccgtggccaacgccggcggcgtgccgctcatcatgagctactggaacctcgtgtaccactacggcgtcgagcgtttcgcccgtgacttcgagaacgccggcggcgccggcctcatcaccccggacctcatcccggacgaggcgggggagtggatcgaagcctccgaccgtcacggactcgaccgcatcttcctggtctccccggactcgtccaccgagcgcctcgaaaccgtggcccgcaacgcgcgtggcttcgtgtatgcggccgcccgcatgggcgtcaccggcgaacgcgccaccatcgacgcctcgcccgaactcctcgtggagcgcacccgtcaggccggtgccgagaacgtgtgcgtgggcatcggcgtgtccaccgccgaacagggcgccaaggtcggctcctacgcggacggcgtcatcgtcggctccgcgctcgtgcacaccctgctcgcggacgacaacaagaccgcacgcgacccgaaggaaggcttgaagctgctcgccgccaagagcgaggaactggccgaaggcatccacaacgcccg

SEQ ID NO: 2907 - DNA, 8799 bp, Unknown
  R19_24m  MAG No. k141_219
cccagcaacgacttcagctactacgatcagatgctggacaccgccatcctcctcaacgtgattccgaagcgttacgagcgtctcgccttcgataaccaggaggacacgctcttcgccatggcccgcggctaccagggcgacaagggcgacgtgaccgccctgccgatgaagaagtggttcaccaccaactaccactatctggtgcccgaagtcgagtcggccgcggagatcaagctcaactccaccaagccgttcgacgagttcaacgaggccaaggcgctgggcatcgacaccaagcccgtgttcatcggcccgtacacgttcctgaagctcgcccgcaccccggaagccaccgaactcgagctcgacaagggcctggtcaacgccgtggccgccgtctacgccgaagtgctcgacaagttcaacgaactcggcgccgcatgggtccagctcgatgagccgtacctcgtgctcgacaaggagccgggcgatgtggagctcttcaagaccctgtacaccaagatcctgtccgccaagggcaacgtcaaggtgctgctcaacacctacttcggccacatcgccgacgtgtacgagaccgtcaacctgctcggcttcgacggcatcggactggacctcaacgaaggccgtgaagagaacctcgaagccgtcgccaagtatggcgtggcctccaacaccgccatcttcgccggcgtgatcaacggccgcaacatctggcgcaacaactacgccacctccctcggcctggtcgacgccctgaagcaggtcaccgccaacgtggccgtctccaccgcatcctccctgctgcacgtgccgttcagcactgaaggcgagaccggcatctcgtccgaagacctcaagcacttcgcgttcgccgtggaaaagctgaccgagctcaaggaagtcgccgctctggccgacgccaccgaggacgagaagaaggcatccgccgccctcgccgccaaccaggccctgttcgacggcacccgcgtggccgccgacccggccgtcgccgagcgcatcggcaagctgtccgacgccgactacgtgcgccagcccgcccgcgaggagcgtcaggccctgcagcgcgaggccctcggcctgccgctgctgccgaccaccaccatcggctccttcccccagaccaaggagattcgcgccgagcgcgccaagctgcgcaagggcgaggtcaccaaggaagcctacgacgagttcatcaaggcccagatcgacgccgtcatcaagaagcaggaggagatcggcctcgacgtgctggtccacggcgagttcgagcgtaacgacatggtcgaatacttcggccagaacctcaacggcttcctgttcaccaagaacgcttgggttcagtcctacggcacccgttgcgtcaagcctccgatcgtctggggtgacgtgtcccgcgccaacccgatcaccgtggaatggtccgcgtacgcccagtccaagaccgaccacgtgatgaagggcatgctcaccggcccggtgaccatcctcaactggtcctggccgcgcgaggacatcacccacgaggagcagaccaagcagctcgccctcgccatccgcgacgaagtgctcgatctcgaggccgtcggcatcaaggtcatccagatcgatgaggccgccctgcgtgagaagctgccgctgcgcaagtccgactggcacgtcaagtacctcgactgggccgttccggccttccgtctggtgcactccgccgtcaagccgaccacccagatccacacccacatgtgctactccgagttcaacgacatcatccgcgacatcgacgcgatggatgctgacgtgatctccttcgaagcctcccgtggcgatctggtggtgctcgacgccattcatgacgcgcacttcgagaccgaggccggcccgggcgtctacgacatccactccccgcgtattccttccgagaaggaaatcgaggatcgtatctacgagatccttgacaagatggacgtcaagaaggtgtggatcaaccccgactgcggtctgaagacccgtggtaacgccgagacctggccgagcctggagaacctggtcgccgccgccaaggccgtgcgtgccaagctcgacaagtagcggaaatcaccgagctccctctgtatgagggagctcgggtttatgtaaggaaatcagcatgcattccccgatgttcacccttgaggtctttcccccgaagcgcaacgctcccgtggacaccatctatgacaccctcgacggcctggaggggctgaaccccgacttcatttccgtgacctacggccacggcacccattcggatcgcaccgccaccgcgcgcattgctcatacgatcagcaaggagtacggcattcccgcagtcgcgcatctgaccgcgttgtattccgacaaggcgaaaatcgacgaggccctcgacatgttcgagcaggccggcgtgagcgccgtactcgcattgcgcggcgactacatcgacggcgagcagctggtaggcgagttcaaccacgccagcgacctcgtgtcatacatccgctccgtgaagccgggcctcaaagtgttcggcgcctgctacccggaaggccactaccaggctgactcgctggaccaggacatcgaaaaccttaagatcaaggtcgatgccggcgtcactcacctgatctcccaactgttctacgacaacgaggacttctatcgcttcctcgacaaggcgcgcgccgccggcatcaccgtgccgatcgaggcgggcatcatgccggtgcgtggtgccaagtccgtgcgtcgcatggccgaacgcaacgcctcgcgtatcccggacaagctcaacaccctgctgaacaagtgggaggacgacatccagtccctgcgtgccgccggcatcctctacgcttccgagcagatcgccgacctcgtggcccacggcgtggacggcgtccacctgtattcgatgaaccaccccgccaccacgcgccgtatctggcgcaatgcggaaccgttgttcctcggtacgcaaggttgacgcatatcgcggcgcggcgcatctcaatgcgtcgcgccgcacgttaatctgctggcgaaacccagagttcccccagcggccgatggatatcatgaacgtacaagccaaccaaagcgatggaaggaagtccgttatgtgcactggtgtccgtttctccgatgatgagggcaacacttattttggccgtaatctcgactggagtttctcatatggggagaccatcctggtcactccgagcggctaccgctatgacacggtgttcggtgcgggcggcaaagcgaagccgaacgcggtgatcggcgtgggcgtggtcatggccgataggccgatgtatttcgactgcgccaatgaacatggtctggccatcgccggcttgaatttccccggctacgcctcgttcgtccacgaaccggtcgaaggcacggaaaacgtcgccacgttcgaatttccgctgtgggtggcgcgtaatttcgactccgtcgacgaggtcgagaaggcgctcaggaacgtgacgctcgtctcccagatcgtgccgggacagcaggagtctctgctgcactggttcatcggcgacggcaagcgcagcatcgtcgtcgagcagatggccgatggcatgcacgtgcatcatgatgacgttgatgtgctgaccaatcagccgacgttcgacttccatatggaaaatctgcgcaactacatgtgcgtcagcaacgagatggccgaaccgacttcatggggcaaggcctccttgaccgcctggggtgcgggtgtgggcatgcatggcatcccgggcgacgtgagttccccgtcgcgcttcgttcgtgtggcctacaccaacgcgcattacccgcagcagaacgatgaagccgccaatgtgtctcgcctgttccacaccctcggctccgtgcagatggtggacggcatggcgaagatgggcgacggccagttcgaacgcacgctgttcaccagcggatattcgtccaagaccaacacctattacatgaacacctatgatgaccccgccatccgttcctacgccatggccgattacgatatggattcctcggagctcatcagcgtcgcccgatgactccttcccggctcatgccccattcggagggcatgagcgtatatagtggaatcttatggaatcgtcgatgttcaaacccagctccatggatctcatcagggcaggtctgcaagacctcgacaaggcccgcaccttgttcgaccagctcaagacggacgacattcccgatgagcgatgcgccgaactgctgagcatgctggcccacgcctgcgaccccgatatggcattgagcaatttcgtggatatcgtcaacgcgatgcaatccagccagcgcgatctgaaacacgtcatccccgacaacgacgccctgaagcgtctggtcacggtgctcggcgtctccgacgcgatgggcaagttcatgcgcttcaagccgcagcttgtggaggccgcagcagtcgacaactgcaacagccatctgttcaatcacgcgcaacgccgtgcacgtctgctcaaggcggtcggcgcggacccggacgaaccggccatgcccgtcgcctccaaggatctggccgaagcggccacggccttgcgttccagctaccggaaccaactggccgccatcatcgcccaggatgccgtggcggacgacccggcctccatccaaccgaccatcagccgcgaactgtccgacctcgcggacgcggcgctcgaaggcgcgctggccatcgcccgtcacgaaaccgagggcagcgagcatgtgcgcttcaccatcatcggcatgggcaaactcggcgcacaggaactgaactacgtctccgacgtggacctcatctacgtggtcgaaccggccgacaaggacgtggaccatcagacgctgatccgcgtgggcaccaagatgggcaccatgctgcagcgtgtctgccagtccgccatcatgggcgtggccgagcagccgctgtggcagatcgacggcggcctgcgcccggaaggcaaggacggcgcgctggtgcgcgtgctctcctcgcacaagaactactacgagcagtgggccgagaactgggagttccaggcgttgctcaaggcccgcccggtggctggcgaccccgacctcggccgggcctacatggatatgactcggccgttcgtgtggagcgcgtccaagcgtaagaacttcgtctacgactgccagaaaatgcgcaagcgcgtggaagatctgattcccgcacctctgaaggatcgcgaaatcaagctcggccgcggtggtctgcgcgatgtggaattcaccgtgcagatgcttcagcttgtgcacggccgtaccgatgaatcgctgcgcaccagcaacacgctcgactcgctgcagcgcctgtccgaaggcggctacgtctcgcgcaaacaggccgtgcgcatgtctcaggactaccgcttcgagcgcgtgatggagcatcgccagcagatctggtccctgaagcgcacgcacctgttcccggacctcggccgggcctcggtcggaggcctcgaaaagaagcgcgacatcgacgtggatgagctcaaccagaaccaggagctgcgtcgcctcgcccgcgcattcggcctgcacccggaagaactcgtcgacaaatacgacgacacccgtcgcgaagtacgccacctgcacctcgacatctactatcgcccgatgctgccggtcaacgcccagatggagaacgaccagatcgtgctgagcgtcgaggccgcacaggaacgattcgaatccatcggcttcggcgacccggacgccgccatccgccacgtgcaggcgctcactgccggcgtgggacgcgcggccaaaatcaaccgcatcatcctgcccgccgtcttgcagtggctgggcgagggccagaacccggacatgggcctgctcaactggcgcaagctggaggagaacttcggcaccgaatccggctacctcggcttcctgcgcgactccacctccgctgcccagcgtctgtgccacatcctgtccaactcgcgattcctgggcgacgcgctcaacaagtcggtcgaatcgatcagttggctcggtgatgacggcaatctgcaggcccgcacgcgcgaggcattggatgtgcagaccggctcggcgctggaacgtttcggctcgaacatcaacgagttcgccgcctccatgcgcgccatgcgccgccacgaaatcgaacgcatcggcctgtcttggatgagcggtgtgatcagcgactccgacagtctcaaggccatgaccgacgtgtatgacgcgatcatcgacgcctcactgacctgggccgtgcgccaccagatcgccgcgttcggcgtcgaaaccgcgccggccggcatcaccgtcatcgccatgggccgttacggcgggcgcgaagtgaacttcagctccgatgcggatgccattctcatctaccgtccggccgacgatgccgacgacggccaagccaacgccttcgccaagaaggtcgtggaagacctgcgcaacatcctgcaaggcccgacgacgctggaacccaagatcgaactcgacctggacctgcgcccggaaggcaagaacggcccgctcgtgcgctcctacgcctcctgcgaggaatactacgaatcctgggcctcgacctgggagcgccaggcgctgctgcgcgcccggtacgcggccggcgacgccgaactggcgcgggacttcctgatcaacatcgccgacccgttgcgctacccgaccacggagctgaccgaggccgaattgcagaacatccgcaagctcaaggcccgtatggaggccgagcgtctgccgcgcggcgtgcgtcgagaacgtcatctgaagctcggcaagggcggtctgtctgacgtggaatggaccgtgcaactcatgcagctccagcacgccggcgatatcaaagatctgcgcgtcaacggcacattggaggcattggacgtgctggaggccaagaagctcatcagcgctatcgatgcgattcagctgcgcaaggcatggacgttgtgcaccgcggcccgcaacggcaactatctgtggagcgggcgcgccaaccaggccgatattctgcctgatgacatctattcgctgggcggcatcgccgtctacctcggctacggcgcccaccgcggccagcatttcgagaacgacctgctggccgtgatgcgcaaatgccgtgacgtatgccagcgcctgttctacgggcagaccgaagacgaggcgactgcggcaaccaccgccacggcctccgccgcaacgcagcagccgcaaaccgcgcctcgcccgcgtatgcacgtgatcgcaccgcgactggagcggaaccgacgccgcgcgcagcgatagacctttcttgtattgcgttcactacgttcattaggtcgattcatcgttcattaggtcggtccgccgccgcataccttgttggaatggcggcattccaacaacagatacgagggtgcagtgacctaatgaacgtcaaatcgacctaatgaatgagctctggcgttccaaagcagatatcagctatacagacacagcatattcgttggattttcaggtgaacactcggtgaatgcggctgtccgaaaaatggcgtaagttatattaggtcacacaagggtggccacctgaaaaccacgagcgaaaaggtgagccttgtctgaagaaacgccaatggtcggcaaaagcgtcgtaacgctggacggcctgtctacaaaccagattctcgacctgctgcataaggccgaatacatcgattcccaccgcaaagaggttgcccatacctgcgatgggcgagtgctggccacgctgttctacgagccctccacccgtacgcgcctgagctttgagacggcaatgctgcgtctcggcggcaaggtcatcggattcgccggcgcgcagctggcctccgtgaccaagggcgaatccatcgccgacacgttgaagaccgtgtccaactacgtggacgtggtcgccatccgtcacccgaaggagggtgccgcgctggtggcctcccgcgccgcatccgtgccggtgatcaacgccggcgacggcggccacatgcatcccacgcagacgctggccgacctggccacgctgcagtcgcgcttcggccgcatcaccgacctgaccgtgggactgtgcggcgatttgaccttcggccgcaccgtgcactccctgatcgagaccctgtgccgcttcggcaacgtgcgcttcgtgcttatcagcccggacgagctcaagaccccgcagtacgtgatcgaccgcatcaacgccaccgacaactgctcctacgtggaagtgcgcgacctggcctccgtgatcggcgacctcgacgtgctgtacatgacccgcgtgcagaaggaacgcttcttcaacgaagacgactacctgcgcctgcgcgacacctacattctcgacgaagaaaagctgcagctcgccaagccgtccatggccgtacttcacccgctaccgcgcgtcaacgaaatctccgtggacgtggacgacgacccgcgtgccgcctacttcgaacaggtcaagaacggcatgctcgtgcgcatggccctcgaaagcaccgtggtgggcgacgaactacccggatacgaaccgctcaaccccaaggaggttcaggcctgatggaagtcaccagcattcagaacggcatcatcatcgaccatgtgccggccggaacctcgctgaaggttctcgaatacctgaaaatcgacccgg

SEQ ID NO: 2908 - DNA, 6608 bp, Unknown
  R19_24m  MAG No. k141_471
agaatcatgtcggcgtcgcgaatcgtggagaggcggtgcgcgatcacaaagctcgtacgccccacggtcagcgcgtccatggccttctggatcagctcttcggtgcgggtatcgaccgaggaggtggcctcgtcgagaatcagaatcggcgcgtcctgcaccatcgcacgggcgatggtcagcagctgcttctggccctgggagagcgacgacttgtcgtcgagcacggtgtcatagccgtccggcagcgagcggatgaagtggtcgaggcccacggccttgcacgcatcctcgatctgcttgttggtcacgccgggcttggagtaggcgatgttctcgcgcacagtgccgcggaacacccacgtatcctgcagcaccatggagaactggtcgtgcacgttccagcgcggcacggacttggtgtccacgccgtcaatcgcaatcgagccgccggaaatctcatagaagcgcatgagcaggttgaccatggtggtcttgccggcaccggtcgggccgacgatggcgaccttctgcccggccttgacggaggcggagaagtcgtggatgatcggcttgcccggttcgtaaccgaactgtacgtggctgaattccacgtcgcccttcacttcgtggccgttggtcccaagcaaagcggacttgccggattcgtcctccatctccggctcctcaaggaagccgaacacgcgttcggcggccgccgcgcaacgctgcaggttctggaaggcctgggcgaactgcgccaacggctgggtgaacagacggacatacatcatgaacgccacgatcacgccgaactcgatctgcccgtcgagcgcgagcgccgcgcccaccacgcacaccaccacgtagccgaagttgcccacgaaattcatgagcggcatcatcaggccggagaggaactgcgacttccagccggactcgtagaggtccgagttgtacttctcgaagcgacgaatcgaatcggcctcgccgttgtatgccttgacgatgaggtgaccggcgtacatctcctccacgtggccgttgacatcacccagcgccatctgctgccgggcgaagtacttctgggaggacttcatgatggccatcatgatgatcaggccgatgaggctggcaccgatggcgcacagggtcatgatcacgttgttgtagaacatcatcaccagcgcgcccacgaacagcgtcaccgaggtaatcagcgagccgagcgactggcccagcgtctggccgatggcgtccacatcgttggtgatgcgcgacagcacgtcgccgtagctaaccttgtcgaagtatttgagcggcagtttgttgattttgaccgagatggactcgcgcagtcgctgggcggtgcgctgggtgacgttggccatcatccagctttgcacgtagccgagcacggcgtagcccacgtacagggccaccaaagtccaggcgatgtggcccaccgtgccgaaatctaccgagttcatcaccggtctgccgttgacgatggcgggcagacctttgacgatctcgttggtcatgtccttgagcttgtccgggccgacgatctggcagacggtgccggccgcgcccaggatgagcgcgatgatgatgacgggaagatagttgcggcagtagttcacgagtttgcccatgactttgccgaaatcatggggcttttcgacggcacgcctgccgcccattggtcctcttggcatttgttttactccttaaaagtccgtattgacctccctctgatgagggaggtggcgcgaagcgccggagggagagaagccgtacgcgactacccctcagtcagctgtgctgttttattcgctcgcttatcagctcgtcttcgcctgggaacagcccactgggctgttccctttacggctcagcccctgacatggggagctaccgctgccgccccccctacgccgtaagctccgactggctgagctgggattcggcgatctggcggtatacgtcgcagttgtcgagcagttccttgtgcgtgccctgacccacgaccttgccgtcgtcgagcacgacgatgcggtcggcgttcatgatggtgccgatgcgctgggccacgatgagcttggtggaatccttggcctcgcgggcgagcgcgtcgcgcacttcgcggtcggtcttgaagtcgagcgcggagaacgagtcgtcgaaaatcaggatttccgggtgacggtacaccgcgcgcgcaatcgacaggcgctgcttctggccgccggacacgttcgatccgccttgggcgatcgcggcggaatacccgccgtccatgcgcgccacgaactcgctggcctgcgccacgtcggcggcggccttgacgcgattcagctgctcggccggtatatcggcaccttccgcggcctcgccagcggcgatcaacgcggcctcgcgcttgcgcccggccggggtggaggtatcggccatctcgacctccgccgggtcgcccggctgatcgccgtagctcacgttggaggccacggtgcccttgaacagcacggactgctgcggcacgtagccgatcttgtcgcgcagggccttcaggtcgtagtcgcgcacgtccacgccgtcgaccaacacctggccttggctggtgtcatagaagcgcggcacgagattgataagagacgacttgccggagccggtggagccgatgaacgccaccgtctggccctgctcggcggtgaagttgatgccttccagcatcgcctcgcgcgaatccgggtaggtgaagctgacgttgcggaattccacggtgcccctctggccggttttggccacgttggcggcggttttggtgccgttctcgacgattggctcagtgtcgagcacctccatgatgcgctgcgcggacacgtcggcgcgcggccagagcacgaacaccatgctcatgagcaggaagctcatgatgacctgcacggagtagttggagaacacgaccatgttggagaacacggtgagcttgtccttgagcccggcggcgtcgatgaggtaagcgccgatccagtagacggcgagcatcaggccgttcaggacggtgttcatcaacggcatcatgaacgccatgacgcggttggtgaacagctgggtctcggtgaggtccttgttggccttggtgaatttggcttcctggtagtcctcggcattgtaggcgcgcaccacgcgcaggccggtgaggttctcgcgggccacgaggttgatgttgtcggtcagggtctgcatgaccttgaacttcggcatgaccatggccatcatgacggtgatggacaccagcaggaccgccacggcgatgccggtggcgagcgtccattcgaagccttcgccggcgatcttgcacacggcccatacggccatgatcggcgacttgacgatgagctgcaggcccatggtgatgaacatctgcacctgcgtgacgtcgttggtggaacgggtgatgaggctggcggtggagaacttgctcatctcggccgggccgaaggactcgaccttgcggaattcgagcgagcgcagacgctgggtgaacgaggcggccacgcgcgcagcgatgtagccggtgatgatggcacacgccacggatccgagcgagatgagcagcatcttgccgcccgcgatccagatgtccttcatgtcgctgcccggcgtctcgaccagcgtggtgatgtctgacatatagtcgggcagtttcaggtcgaagtagacctgcccgacgatggtcaccagggcgatgagcatctgaccgatctccgctttggagaggtatttcatgatgcgaaacattggtttccccttgtgttggttgggttggttattggttattggcgattggttcttaagttggctgggttatcggtgattatcggttcacgatgtcttaatagtttccattgtttgattacttacactgtgagatattatacgcacttctgtatgttcgctgtgagcgtcctcaatcacctttacctccctctgacgagggaggcgtcaccgcgcagcagtgacggagggagagacccgccagcgggaggaagctagtctcgctcagcctccgcgcgcttagctgccatgtgttcagccacgcgcttgtcccgctccacgaatgcctcacgcacttgttcagccgtcggccgaggccgccccggatggcaaatcgacatatatgtggtgaactcagacaccaggtcaacgaattcgcgcgtgcgccgctcccccatttgcgagaaaatccagcaaattgcggaacgcatttcctctatcatccgatgagactgctcgcgcccggaatcagtgagattcacgcgaataatgcgccgatccttggaatcaatgtcacgcgtgacccagccttttttctccagagacgacagcacagtggagatgcggccggaactggcctgcagcgccgatgccaattgcgacggcgtttgcgtccccttcatggacagctcccggagcacgaactgctcaccatgggctccacgagtgaattccctctgcatcgtcgaacgattgccccacacgctggcatacagttcactaactgcttcctgctcaaatcccataagagcaccatccattcccattcgccacacggcagagcgccgcaaacacccccaagaatatctcacaccgtaaacaattcattactagaaactatttttggaacgcataatgcacacactccacgctctttgatattctgaaagccgcatagatattcacttcggggcgtcgtctaagaatatttgctgggccaacggtagcgacgttggcattgtgctccatgaggtatctggtcgaaaaggcggacgaagacagaccagttgggcggagcgcgcccatacctcaaaaccattgcaattattggctttgaccattttcgtggagtcacgaaaatggtcatgaaaaacataaggacacacccatgaaccgcgacgaaatcacacgcaaaaccagcgaactcagcactatcgcacacaccaccgaggactccaaagttgagtattggtatgcacgcgagctaatgacctatatggggtacgacagatgggaaaacttcagcaaagctattacacgagccaagcaagcttgcgacaattccggcgtatccgttgaatcccatttccgtgacactacgcgagacgtgactctcggcagcggtgccacccgctccatcgcggacgtcaagctcacccgatacgcctgctatctcattgctcaaaacggtgatccaaagaaagaagaagtggcacttctccagagctattttgccgttcagactcgcaaaacggaaatcattgagcaacgcatgggagaaatcagccggctcaccggccgagaggcccttgccactgcagagaagaaactctatccgtatacccaaatcacacacaacaaaaccgcacaagagcacatgtacacgcccaaccacgccgcagaacgccggcaaggatgtgatacaggccacagaaagcgttgtaccgcctaggcaatgcaacaattgtccgctatgctctgaaggcagatggcggcacggatgccatcccaaagagggggtatgaccatgattcggggtatgaacctatgcagcatcgccggctgcacgcacgaagcagaagaagcgggcatgtgcaacatgcatttcacatcggcgctggttcacggagcgctgcactacactgcggacggacgtccgtcgcactgctgagcgcaacaacaaagcaaaacaaccagtaacgctcaacggcttccacatgttcatgctctaattgcatgtacttgcagacacaatggccggtctgagccagctgccctcgcatggagcagctggctcagaccggccattattgttgctttgtactgtttgcactgtattgcgcctgcattgcgcaagctcgggcgcactcgggtgcactcgctgagtggcgtgaatcgcagattgctcaatagcaacgcaatccacgccactcagcagttgccatggttatgcgcggcgtttgcggatgacgagcaaggcaccagccgcagctgtcagcaccacaaccacgaccgcaatggcagccacggcaacacccgtattcgaaaggggctcagcgccattagcagccggcttattcgtggcagtgttaccgggcttagcagtgttgccaggattgttggtatcgccgggcttctgctctccagggccgggagtgacctccgtggccgtgaccgtgacttcgaacgtcgcgttcacgccacgataagagacggtgatggtcttcgtgcctgcggtggcagaatcaaagccagtgaacttcagatcaccatcagttggatcaatcagcttgcgcagcgtttcggtatcgccgactttgtaaatggcggataccttcacatcggcagcgttgaacttatcgcctacctgataggaatccttggtcacttccacagcaagctcggccaactgaggcagttcgccgaatgtcactgtgtaggtttccgccgtgccatcctcagcagttacagtcaccgtggccacgccgctgttctcggtcgaagcctgctccacctgcaccgtagccttcgcgtcagcagcagtc

SEQ ID NO: 2909 - DNA, 2745 bp, Unknown
  R19_24m  MAG No. k141_734
gacctcaaggaatatgccaagacggccactagccagaccaagaccgccaagaagaacgccactgcgattactgccgcggcaaaggccgtgacggacagcaagaacgctaaggatcaggctaacgctcagcaggcgttgcagagcaagatagccgaggctcagactttgctggacaacagcctgtatgccgtcgacgataattcaacgcgcgtgacactggaaagcgacatcgccaacgccaataccgtgttgtctcagcagggcactgacataaaggccatgcaggatgccgtcaacacgttgactgcgtccatggatgcagtcaacacgtccatggcaaactacagtgcagccgttcaagctcagcaagaagcagcgcggcggaaagctctgaatgattattatgcacgattaaggcagcagcagttgttgcagcggcaacagcaaacccagccagacggtacagacgatccggggacaggtggccaggcggctgatcaggggacgaaaccgaaagatgatccggaaccgaaagatgagtcgaagtagtaagttatcgtgctctagcctaaattgtcaaaggaaccgcgaataacagtagtgcgcatttccaccatttgctgttgcaaaccagctcaatatacgcgtgctttgtgccgctatgccgtcacggattcgcataatcagttgtggagggcacttcgtatgacacggtaaaagtgatctctagggcgttgcataatgcaaggattcggctgataaggcgcagaaatgctgatgccggtccccgatgattgggaaccggcatcatgcgtatgagttcgctcggcgtttgggccgggtttcactcagccttcttacggccgcggcgcttcatggtgcctgcagtggcgttggcggcgtcgaagatcacggtcttgctgtctgggtaggcggtgccgttcacggactgataggagacttcgccttcgggggattccgccaaggtgaagtctccttgcggcgcggaacttgttgtgtacgtgttgatttggctggcttagtagctcttgtgcgcctgccaatacgcgtacgcgccggaaatcgagccataatggtcgttgcaataattcacaaaccacttgaactgggtctggtagttggtctgccagtctgcacctgcggaagccatcttgctgcccggcagcgcctgcggcaggccataagcacctgaagacgggttcgtggcggtggggctccagccggattcgtggctgatgatgaagttggcggcggtgaagtcggcctcggagtagccgttggaaatcaggtagtcatgcgcccaggactgaatctcgccggccggcgtggtggtgccgaggctggcggcgctgggcgaagacacggtggcggtgcccaccagaatcaccttatcgaccggagccttcttgacccaggaggtgaacacattggaggaaacgacctgatctccggagcgggttaccagagacgtggtctccagcacgcccttctcgccttcggtctcgaccttctcctggcccttgggcaggctcgaggtctccttgcgcacttcattgaaggcgatttcggtgtcggtggtctccaccgtggtgttggcgcggttgatggaaatgactgtggactcgctgaccttggaatccaggctcggagtcacgctgtcttccggatcgaggacgatatcgccggtttccagcacatccttgacggtggtcatgttggctttttcgccgagaaccacgcgagacttgccattgaccttgactgtcacgtaggtggtgctcttgagcgcgccgcgggatgccgaacgggaagccgcaccatcagtggcggagaatgaggttggggtgatggaaggtgtagcggtgctcgactgatagaagtcgcgggatataacgcctgcagtggcaatgagacccactgcggccacggccgccgcgatcttcgcccactggccccgagacagggttttgacgaatgaggtccgttcagcgtgcttcgacattgcgctccttggttgggtacacactgctttccatcataggacgttgagtggatgaataaaaaaaccgtggtgggtgttcgacccgccacggatggcatatgtagtagttagcagtgcaaggaagcgctatatatgggcttttccgcgcttccgttgccgcagtgtgataaggcttactgctgctcctgcgctgcctgctgtgctttggcggcggccagatccagcgccttggcctgggcgatgaggtcgtccagatcggaggcctgcagcgcgccggcctgctggaagatgacctcgccctgcttggcaatcatcagcgtaggcacagcttgaatgccggcagcctgagccagatcctgattggcgtcgatgtccactttgacgaaagcgatgttcgcattctccggctcgttggacgcagcttcgaaaatcgggccgaacgcacggcacgggccgcaccaggtggcccagaagtcaacgaacgcgatctcgttgtcggtgatggtcttctcaaactcagctgaagtgatggcggtggtggccattgaagttccttcctcaaacacagtgcttgatgctgtgtaccagtttcccagcaccacccaacatttcggcaaaagtttgtgccccaagctgaatggattgcgggcgcatggaggcgatgaggcgctttgctgagaattcacagacaatttttcggtgaattgtgcccatgttcatca

SEQ ID NO: 2910 - DNA, 11018 bp, Unknown
  R19_24m  MAG No. k141_834
acaacgaattaaggaaaacaagtaatggcagaaggtaacgagcgttccggcaagtcctacggcggcggccataaggggtatggcgatcgccgaccgggcaaccgcggtggcaagggtttcaagccgcgcggcaagggcggtttcaagccgcgtcatgacggtgaaggtttcaagccgcgccgtcgtgaggatggcgaaggctacgcgccgcgccgtgatggtgacggtgagggccacggcggctaccgcaagtcgtacggcaagggtggcgacttccacaagggcggccgctctggtttcggtggcaagggcggctatcgcggcaacggtccgcgccgcgatggcgacggcttccgtccgcgccgcgaccgcgatggcgagggcttcaagccgcgccgccgtgaggatggtgagggttacgcgccgcgccgcgaccgcgatggcgagggcttcaagccgcgccgccgtgaggatggtgagggttacgcgccgcgccgtgatggtgatggcgagggccacggcggctaccgtaagtcgtacggcaagtccggtggcttccacaagggtggttaccgcggcagtggtccgcgccgtgacggtgaaggtttcaagccgcgccgcgaaggcggctaccgttcccacgaaggcgagaacggcgagaacccgcgctaccagcaccgtgacaacgatcgtcgtgatttccgtcgcgatgatcgccgtgacttccaccgcgatggtgagcgtcgtgacttccgtcgtgacaatgatcgtcgtgacttccgccgcgatgaccgaagggataacgatcgccgtgatttccatcgtgatggcgatcgccgcaacttccgcagggacgaccgccgcgacaacaaccgtcgtgacggcgaattccgcgagttttcgcaggaagagaagcgccagtaccgtgaggagaagcgctctgaatacatgaggcgtccgcgccgtaactccgacggcacgatgagcttcccctcgcagaacccgtacaccgaccgtcgtcccgacgagcccaagatgcccaagggcatggaatggtcgatgctgtccaaggatgagcgcgaacgtctgcgcggcctgtccaaggagcatgcggagaacattggtctgcacatcctcgccgctttcgcgctggaggagagcgatcccgaacttgccttggagcacgccaagtgggtggcccgtcaggcctcccgcatcgactttgcccgcgagacgctcgcgttcgtggcctaccgtcagggcgactacaagctgtccctgcgtgagttccgtaccgcctaccgtatgaacggcttcctcgactacctgccgttcatcgctgactgcgagcgtggtgtcggtgaaccgaagaaggccgtggaactggcgctgtccgatgagggcaagcagctgcatggcgctcccaaggtcgagatgttcctggtgtatgccggtgcccttggcgatttggagatgtgggacaaggccattgaagtggttcataccgtcggccgctctcagggtcttccgggtgagtaccgtatgcgtgccgtgcaggccgagcagtacttccttgaagaggccggccgcagcaaggaagccgagcagcttaatgacctgctggaccgtcttgaggatcagtatgccgacgaggagattgacgaaaacagcgacgacgtggtgattgaccacgatctcgaagacatcaccgacgactccgacgtgctcgagaagctcggcatcgatccggacgaggcgcagtacgccccggatctggagcaggaatacggcgatgaggacgacgaggctgaagacggcgatgccgagtccgatgaggccgatgtcgaaaatgctgagtccgaggatgcatcggaagaatctgaggaatctgaagccgaggagtcttccgagtccgctgacgatgccgttgaaccggctgagtccgacgagaccgagaccgaaaccgaggagtgagcggcgtaatgacccgtttcctcaaaggcaccgatcgcccgctcgccgaggcctatcagcttgcgctgctggacctcgacggcgtggtgtatcgcggcaagaatccggtcgaatacgcagccgattccattcgtgcggccgaagccgccggcatgaccatcgaatacaccacgaacaactcctcgcgcttccagcacgtggtggccgatcagctcaagggcttcggcttggacgtggagccgtggcaggtcatcacctcttcggtggtggccgcccgtgtggtggccaaggcgttgcccgccggcgcgcgcgtacaggtattgggcgccgagcatttgcgcgatgaggtcacccgcaacggcctgaccatcgtggacggtcctcaggaccgcccgcaggccgttattcagggctggtatccggatatgacttggcagatgatggccgatgccgcgttcgcggtcgaggccggagccacgtatttcgtgaccaaccgcgacctgacgattcctcgtgaactgggcatcgcccccggttgcggatcgatgattcgcgccgtgatcacggccactggcgtcgaaccggtcgcctccgctggcaaaccggaagcgtacatgtacgatgaggcccgcgaactgaacgccgccgaaggccacgatctggtgcccaaggaggcgtccatcgccattggcgaccgactcgacactgatatcgaggccggtaaccgcggtgactatgattcgctggcggtgctgaccggtgtcaccaacccgaccgaactgatgctggctccggcacacctgaggcccacattcatcgcccttgatctgcgtgaactcggcgaagcccaaccggagccggtccgcgacgagagcggtacttgggaatgccgcaaggctagcgcttggtttgaaaacggccaggtacacgtcagcgaccccaccagtatggacggcctgcgtgccgccgtatgcgccgcatgggaagccgccgaccaaggcgcacagctcagcgaggccacggtaccggtgttcgccatcgaggcatagtcctatgcctacggatagcgaacacgcgccggtcaccgagcgataccccgaacttgcggatattgatgaacaagacaacgaccgcaagcttgagacctatcgcaacgtgctggaatcgttacaacacgagcttgataacagccgcagctagcagaggagattcattctcccgccagcggaagatgacgtgaagtgctggatggtgggtccatgccgagccaccccgttggtggatggtgggtcgaaaggaaggtatatgaccgagcaacatatcgatcccgcgaccccacttgatcgcctcgacatgatgctcgtggcttcgggactggtcgaatcgcgggccaaagcgcagcgactcatcaaagccgggcatgtgcgcgtggacggcgagaccatcaccaagccatcgttcatggtcaaagccgggcacagcgaactcgccgtggataagggcgacgactacgtctcccgaggcgcttacaaactcttgggcgcgttcgagacctttgccggcaatggccttaccgggccggaaagcttggaatgtctggatatcggtgcctccaccggtggcttcaccgatgtactgttgcgcgggggagcggccaaagtcgtggcgctcgacgtcggccacggccagctcgacccgcgcatcgccaatgacgagcacgtcatcgaaatgagcggcgtcaacattcgcgaagtagaggccgacgacctgccttaccggccggcgatgatcgtctccgacgtctcctttatttccctgacctatgtgattccggtaatcgcgcgcatcgcggctcccggtgcgcagattgtgttactggtcaaaccgcagttcgaggtcgggcgggcaggactcggcaaaaacggcatcgtggaagatccggcattgcgggagcgggcattgcacgacgtggtcgcctgtgctgaacagcacggacttgacgtggtggccactgccgatagtcccatcatcggcacccacggtaatgaggaatacctgctttacgctgtcttgagatgaatgcgttggcagtctccgttcaccagcagcacgctggaggtacggtcgatgcctattgcggtggcacacgtggcgctttccaccgcactgccgttgcgtagcatggcggagtccgccgtcaaagtccggcattgcagatggttggcttcaaccgtgacggctgtgatatggcgaaccatgctgccatcctcatacccatccatatcaaaacgagaaaacatcgtactgcgcagtggatgaacttccagagccctgctgttgacgtcatgacccttcaacacgccgttcaagcggactgtctgaccgctaatatgacgggtgcctagggagccattgacggacagatttccggaacaaacgatatcgctgttgcatcgcagtttgccggtaaaggttatttcatcgcaaataatgtcgccgccgacttcgatgtcgccgctgccgctgatgctggatacgcgaatatcaccatcacaccgcacaatgccactcttgatgaccagtttgtccccttctataactgaggcctcgaggatgctggtcacaatcatggtgtgaaaatgcgcgccatcggcaagacgggaacgttggtccactcctatagtgccgtagactcctttgcctatcaacgtgcaattctgcgtatgcttgcccatgatgataaagccccctcaatatggacgtacagctttatggcttattgccccaataatgagcgcatccatgttgaggggggttatatcggtcacgatgtgagcagatagggggtatagcgagcgcagttaggggggttagccttggatgaagtggtcgatctgatcctgcttgcccatgaggatgagttcgtcgttgcgatgcatgaccagttccttggagccgtactggaactccttgcctggggccttgaggcccaccacggtcacgccgtatttgtcgtgcacctgcacgtcctcgatgctgcgacccaccgcgtataggggcgtgtggatcttgacgacggtgtacgggccgtcgatttcgatgtaatccagataattgccggccaccagatgacccacgcgcttgccggcatcggtctccgcattgatgatgtgacgggcgccgatgcgctgcagaatgcgcgcatgctcctgggacacggacttggcccacagatcggaaacgccggcatccagcaggttgccggtgatgatcaccgaagcctcgatgctgtcgccgatggccacgacggccgtgtcgaactgggaggcgtcgatctgctcgatggccagcacatcggtcatgtcggcctgaatggtgggcagatgcgcggaccaacgggccacaagctccgggttcttatccacggcgagcacatcctgacccatctggtcgagggtggcggccacggacccgccgaaacggcccaggccgatgaccagcacgcttttgttgccgctcggttttgctgccatgatgatggtcctctctatgccggatttctgtgtgccgattgaatggacgatcagccaacgataatgttttcctgcggataacgaataggttcgggagccatcggtctgctgatggagtaggcgatggtcaacgggccaagtcgtccgacaatcatctcggcggacagaataaacaggctggccggattgccggcgcttgccacgcccaccgaataaccgcccaacgagaaggccgagcaggcctcgaacacggcgtccacgaatgcgcagccggtggtgaacatcagcatcatcgcaccgaccataaccagcgcaaagcaggccgtggtcacggacacggcggtcatctggacgcggcgggggatacggcggcggaacacggtgacatcgcgatggccggtgaatgcggcgcggcaaatcaagagaatcaccgcgaacgtggtgacacggatgccgccggcggtggatgaggagcctgcgccgatgaacatgagtatgctcatgaacaccttggtctcattcgtgacttcgggcacccaggaaatatcgaaaccggcggagcggggcatgacggcggcgctcatcgcacggcgcatcttcatgccgggaccgtctgcggggaacaggccggtattgccccactcgaccagcaggaaccaagccagtgaggtggccaccagcacagcggtggtcaccaaagtgagtttggtgtgcaacgtccaacgtttcgggctgagatgccggcgtgcgcactgcaccagattcagcaccacggggaagccgagcgttcctatgaatgcgctgatgagaatcggcagtcccacgccccaacggttcacatgcaggccggtggcgtcaggcgtgaaaccggtgttgttgtaggccgataccgcgtagaacagcgcctgccacaatgtacgtcccatattgccgtggttcacgcggaacaggtcgggcagcagcagcacgaaggtaagcacctcggcgatgatggaggtgcccaataccacggtgagtacgcctttgacctcggaaagcttcgtggtgcccagttcgttcgcggtaagcatgcgctgggagaccttgagtctgcgggaagcgccaagagccaccatcgaggcgaaggtcatgacgcccaggccgccgaactggatggagaataggatgacaacttggccgaacgtcgaccagtattcgccggtgttcaccaccggaatgccgcaggtggacagggccgagacggcggtgaagaacgcgaccgggaagttggtgaagatgatgtccgatgtggagatcggcagcagcagcaagccggtgacgatgatgatcagtgcgccgaaatacaccatggacacacggcccgggtgcctgagcagacggtcggtgatgctgatgcggcgaatgcgcttggcggttttatcgcttttgtctcggctcagtacatcggccgaataccaccatgacaggcccttcgaggcctcctcattggcggaggattcgtcgaagtcattggccatgggtcctcaagctcctcaactgatactgctgtatggtcatacggcatgccatcgcgctgcgcacggcacgcgtacggtgatcgcgcgactgtatgccattgtatgccgaagccttacgttaatcgactctgcggaacgttgtcggcgacgcgccacgaagcggcatttttcgaacacctgtacgagtgatgacggtgtctgcggctagaataatgagcagtgcgaccgaatcgacaggaggatgccatggccaagcgcaacgcggtggtggtgacgcataccaggctcaggcagaccggaaccgtagtggccgaggcggtgagccagctgcgagtggccggtttcgaagtcaccatcatcgacaacaccgaggcccccgatttcggcgtgcagccgccgtgcgtgtcggacgacaccgaaatcgtcgtggtcctgggcggcgacggcacgatactgcgcgccgccgaactcgtccactgcacccaggtgccgattctcggcgtgaacatggggcatgtcggcttcctggccgaattcgaaagcttccagatcgacgaggcgatccgccgggtcgccacccacgactattcgatcgacgaacgcatgatcgcccatgtggacgtctggctgcctggcaccaccaagcccattgaggattgggcgctgaacgacatcacgctggaacgcgccgaccggggcaagatggtcgaactgtccatccgcgtggacgatgtggagatgaactcgttcggcgcggacggcgtcatcgtctccacgcccaccggttccaccgcctacgccttctccgcgggcggtccggtcatgtggccgaacgtcaaggccctgcagttgattccgttggccgcgcatgccctgttcgccaggccgctgatcatcggctccggttcgacctttaccatcgatattctggacgattccatgtccgaaggctggatttgctgcgatggccgccgccagcgcgccctgccgcagggtacgcgcgtcatggtgcgcgaatcgcgcgataccttgcgcctcgcccgactctccggcgtgccgttcaccaaccgtctggtctccaagttcgatctgcccgtggtcggctggcgcgagcacgcgcgcaatgaggcctcgagccagccgctgcatcacgggcacacgctcccggcggccgcgtatgcggctggcgttgccggtgacgctggcgtcgctggtaccgatcccgacaagccgggcgaacgtgacggcaaggcaggagcctgatgctcgaagaactcgatatccgcaatctggggccgattcgagaagccgccattgcgccggccgcaggcatgaccgccatcaccggtgagaccggcgccggcaaatccatgctgctctccgcgatccgactggtctccggtggggccgccgaatcctcgcgcgtctcggccggggcggacgaggcttgggcccaggcgattttcgcgctcgcggatgatgccgtcgcatctgaacattccggcgacaccaacgatgccggtgacgatgccggttctgacgattctgacagcgggctcaccggtgctgccgtggccgtggccaaggcccacgacgcgggcgtcgaccccgaagacggcgaattgttcctttcccgcaccgtacgcgcttccggacgttcgcgggccgtgctcggcggcaagtccgtaccgcgttcggtgctgggggccatcgccggcgaactggtcatcattcatggccagaccgatcagctgaaaatcgcggccgccgcacggcaacgcgagtttctggaccgggtggccggagacgaagccgaactggccgcctaccgcaaggcgtgggatgcgctggccgccatggatgagcggctggaacgcctgcgctcgcaggaatcctctgcccgccaacaggccgactacctgcgcgaatccatcgaccgcatcaaccgaaccgacccgcagccgggggaggacgaggagctgaaggcgcgccgcgaacgcatcgaaaacgcggccgacatcgcccaaggcgtgggttcggcgctgggcgcgctggatgcctcgcaggtggatgtggacgccgccgacggcgcttcggccgtggaactcatcaatcatgcggtgacctcgttgcgcgcgattcgcgtcggcggcacgttcgccgagcaggccgatcggcttgaatccatcaatgccgatttgggcgacgtggtgttcgccctgagccaggagctgggcgacgaaggcagcgtggaggatctggaccagatcaacggccgtatccacgagcttggcgacctcacccgtcggtggggccccaccttggccgacgtgctcgcttggcgggacaaggcggcgttcgatttggaggatctggacgcctcgccggaaaaggtcgccgaactcgaatccgaacggcaggcgctgtacgatgcggccctcgccgccgccgacgtgctgagcgccgcgcgcgtggctgccgctgccgacttgggcgcgcgcgtcactgaagaactcggctcgctcgccatgctgggcgcctccttggaagtgcgcgtcacgccgcgagacaaggccgatgatccgctcggcccgtatggtcgcgacgatatcgcgttcctgtttacgccgttcgaggggtcgccgcagttgccgatgggcaaaagcgcttcgggcggtgaactgagccgactgatgctggccttggagctggtggccgccgacacgcgcggcggtgccgaccagaccttcatcttcgacgaggttgacgccggcgtgggtggcaaggccgcggtcgaattgggcaaacgtctggcacggctggcccgcagcgcgcaggtcatcgttgtcacccacttggcgcaggtcgcctcgtgggcggacgcgcagttcgtggtcaccaaggagccgccggatgccgatgacgacgatttgggcgtggtcaccaccatcgccgaagtcaacggcgaaacccgcgtccacgaaatcgcccgcatgctctccggcagcgaatccgaagcctccctagaccacgcccgagaactgttgaaggaaagtgtcctatgaccaaagccgccatattcgacctcgacggcaccctccttgactccatgggggtctgggaccaagtcgacatcgacttcctgaacaagcgcggaatcgaagtgccgcccgactacatgaccaaagtctccgccatgcaattccgccagatcgccgaatacaccatcgcacgcttcggccttacagacacgcccgaagagctcatgcaggaatgggacgacatggccagcgtcgcctattccaccacggtcgaagccaaacccggcgcgcttgactatctgcgcgatctgaaagcctccggtgtcaaactgggtgtcgccacctcgctgcccccgcatctgcgtgagccggcgctacgccacgtcggcatgttcgaactgttcaacgatatcgtctccgtcgatgatgcgaacgacgtcggcaaggaccagcccgacgtctacctgctcgccgccaagcgcctaggcgccgcgccggtcgactgcacggtgttcgaagacctgctggtcggcatgaagtcggccaaatcggtcggcatgaaggtctgggccatgcacgacgactcctccgcctccgattggcccgaaatctgccacctggccgacggcgtcctcttcgacttccacgacgctccgcgcgtgctgtgataaaaaagttacacccccgctggcggggctgtcggcgtaacggcgttgtttggcataggtgcccctttccgaggccattgtaggcacggcccatgtttcgacactgtatgttggcgaggtgtttgttcactgttcaactgttatgtaacacaccttgacagttaagcagaacagttatactgtgttgtataacagctaaacagctggggtgctagtcaaccacaatcgaaaggggcataggtgaaactgatcatctcatccgtgtccggtgaacccatctacgag

SEQ ID NO: 2911 - DNA, 4274 bp, Unknown
  R19_24m  MAG No. k141_915
agcgaggtcgacatgaccccgcgcgaagtccacatcgacatcgacctgaacaccggctcggacgccgaggccaccgtctggaccgacgacctcacccacgaatacgtccacatcaacgccgactacgaaagctgacaaacagcccagtgggctgtttgtagcagccggcagcgatagcgtcgccggcgtcgcatataacgcaaacagcccagtgggctgtttgtagcagccggcagcgatagcgtcgccggcgtcgcagaaaagagaaaaattggctacagaattgaagggacctgggttccatttcgacgtgcacaccgatttgcgcgccgatcagaaggcagaagtgcttattgaagcgctgccttggctggaggagttcgccggccagcgtatcgtcgtcaaatacggcggcaacgccatggtcgatgaccatctgaagcagtgcttcgccgaagacatggtcttcctgcgtcaggtgggcctgcatccgatcgtcgtgcacggcggcggcccgcagatctcccacatgctcaaggccctcggcatcaaatccgaattcaaaggcggcctgagggtcaccacccccgaggccatggacgtggtgcgcatggtcctgaccggcaaggtgtcacgcgaactggtcggcctgatcaacgcgcacggcccgctggccgtaggcctgtccggtgaagacggcggcctgttctcggccatgcagcgcaggcccatcatcaatggcaagcccaccgatatcggcttggtcggcgatgtggtttccgtcgatgcctcggcagtcgaggatctggtggccgccggtcgtatcccggtcgtctcttccgtggctccgaacgaagaagatgccactgaagtgctcaacgtgaacgccgattccgccgccgccgctttggctgccgctgtgggcgcacgcaagcttgttatcttgaccgatgtggatggtctgtacgccgattggccggacaagaattctctgattggccggatcggtgtggaaaacctgcgcgatatgctgccggacctggaatccggtatgcgacccaagatggaggcctgtgtcagggccatcgacggtggcgtgccccaagcccatatcatcgacgggcgcaagccgcattcgattttgaatgagatattcacctccgcaggcatcggtaccatggttatgcccgatgaaggactggaaatgaggagctcttatggctactgagcatgaggaaaaactaggtacggaggacagcaagtggctgggagagtactctcaggtccacatgaatgtgttcggtacgccgttgcgcgtcatggatcacggccaaggtgcccacatctgggatgttgacggtaacgaatacctcgatttcctggcaggcatcgccgtcaattccctcggatacgcccaccccaagtgggtcaaagcggttgccgatcaggctgccaaggtggctcatatcagcaactatttcgcgtccgagccgcaaattgagctggcatccaaactggtcaagctggctggtgcacctgaaggctccaaagtctacttcggcaactccggtgctgaaggcaatgaagctgccctcaagcttgccaagctgtatggccgcaccttgcctggtgccctgccttccatcggcggcaagcccgcacgcattctcgcaatgactcacggcttccatggccgtacgatgggtgcgctgtccgccacatggaaacccggtatccgcaagccgtatgatccgctggtgccgaacatcgaattcgtgcgcgccggcgacaaggtcgccctgcacgacgcttttgcacagaccggtctcggccgctatggcaagggtccggtggctgctgtgattctggaacttatccagggcgaagccggcgtgcagccgttgggcgccgattacgtcaagttcgtgcgcgaactgtgcgatatcaaccacgcgctgctcatcatcgatgaagtacagaccggtatcggacgtaccggcaagtggttcgcattccagcgtgacgatctgtccggcggcgtgacgccggatatggtgactttcgccaagggtgtggcaggcggattcccgatgggcggcatgatcgcttttggcgagaaacttgcggctctgttcactcctggttcccacggctccacctttgccggcaatccgctgggtgcggctgcgggactcgccactcttggcgtgattgaagacgagaatctggtggccaacgccgaagctcgcggcgaacagctgcgcgatggcattatggccaccggtaatccgctgttcgtttccgtacgcggccgtggtttgctggacgccgtcgagctcaagcatccctgctcccacgcggtgatgaactactgcctcgaacacgggctcatcgtcaacgcggtggctcccaatgcgctgcgtttcgcaccgccgctgattgtaaccgctcaagacgtggatcaggcacttgccatcctcaaggatgtgcctacggacctgcccgacgactgatttctcgccgtcactgccgacccaccgatccaaggagatcatcatgaccccagaacttcgccacatgctgcgtgacgacgacctcaaccatgaggagcagaagcaggtgctcgaacttgccatcaagttccaccatgaccgcttctacaagcagccgttcgccggtccgcaggccgtcgccgtactgttcgacaagccatccacccgcacccgttccagcttctccatcggcgttgccgagcttggcggctacccgctggtcatcgacaagtccggctcccagctgggccgtggcgagcccgtggccgataccgctcgtgtgctcgaccgcatggcttacggcgtggtgtggcgcaccttcggccaggaccgcgtcgaagaaatggccaagtactccacccatccggtggtcaacgccctgaccgatgacttccatccctgccagattcttgccgacttccagaccatcgccgagcaccgaggcggcgtcgacaacctgaagaaccagaccatcgcctacctcggtgacgcggccaacaacatggccaactcctacctgctcggcggtgccgtggccggcatggacgtgcgcgtggccggcccccacggctacctgccccgcccggacatcgtggccgacgccaagcgcgtcgcggccgagaccggcggctccatcctggtcaccaccgatgccaaggaagcagtgaaggacgccgactgcgtgttcaccgacacctgggtctccatgggcgaggaggccgaatacgccatccgttccaagccgttctgggattaccaggtcaacaccgaacttatggcattggccaagccggatgcgctcttccagcactgcctgcccgcctaccgcggcaaggaagtcaccgctgaagtgatcgacggcccgcagtccgtggtgtgggacgaggccgagaaccgtctgcacgcacagaaagcgttgctgacttggttgaccggcaaggcccgtggagacgaaagcctgctcgcatgagtgaaaccggtccgtccctgcagcgccctgccaccagggcggcgcggctgagtgccatagaacaggcgctcgccacgcatatcatcacctcgcaatcacagctgtccaaaatccttatcgacgagggcattgcggtgactcaggcgaccctgagccgcgatcttgacgagatgcatgcggtgaagacccggctgaaggacggcacggtggcctacacggtgggtcgcagcgtcgttgcttcagaaggtgaggatgtaggggagcgcggtgaggcacagatgtcccgcgtgctgaacggactggtcacctcggtggccgccgccggaaatctggttgtggtgcacacgccttccggtgccgcacaatacgtggcctcggtgattgacaagcagccgatcgaaggcgtgctgggcaccatcgccggagacgacaccgtcatggtgatttgcaccaatgacgacaccgccgtctcccgctccgactggctactaagcctcgcttccaaataaccaacacgccgtgcataaatatacagtcctctgtatatacttgcatcagtttgtttttcagaccttgaatgaaagggaaccaatggcagataacaagcgcattgttctggcctactccggcggtcttgacacctccgtcgccatctcgtatctgaaggagcgcaccggcaaggacgtcgtggccgtgtccctcgacgtcggccagggcggcgaaagcctcgagaccatcaagcagcgcgccct

SEQ ID NO: 2912 - DNA, 2895 bp, Unknown
  R19_24m  MAG No. k141_931
agggcgcgacggcatttgttatacccgcggaacaaatacgaattggtgccattctctttgtcggctcgcacctgggcctcggcctcatcgagatacagagaaagggcgtcgatggttgttctgcagagccttcgatctcgtcgcatcatggaatcagcgagaacgatgagttcttcaagttcgagatacgtggagaacatggcccatgtgcaagctggtgaagtgcatgtgaattgtccctcgattatgaccgtgtctagtggaaaaggccatacaaccactttgacccccacaatgtgccgtttgtcattggcgtgtggaaccgcaacaatggttgtagttgcaaggcctctgtgtttgcttgatatgcggggtacttcaattgacaaaagctccaacgctgttgtcagggcatagggtgggcgccatgcgcttcgtcgttgaacatctgcgcacgtctgcattcgttggtacttctgcattgtcagctcggtcaatgccgttgagctacccatgatgatcaccccttcgtgatgttcgctttgtcctcgcagtgtagagtccggctaccggccctgtctaccgccccaatttttcggtggataaatgtggataagtcggtggataaactatgggtgttcatcgcagttgcaggccatcccgcaattacatggaacgtaggggtttgcaggcagccagcgggaatcgccgtcgacggcgcgattcaacttggacgaatctccatggcgttcatgcaaaggtggcatgatggccggtatgagtagcttggtgcgtattgtcaatgccggtgttccggggtctcaggaccgcgtggatgtggtgcttcgcgatgggggtgttgcgtctgtcggccctgctggaacggtctcggcttcggacagcacgatgcagactaaggcgcatacgacatcgttggaatacgcgacgaatgccattgcttctggcagcgtctcaatcccaacgtcggccgccgcacccgtcgacgaaaccaccatcgacgccgacggcctgtgggttattcccggcctgtgggactgccacacgcacttcacgcaatgggctaagacgctgggccgactggacctcatcaatgcccgttccgccgccgaagcgatggacatgttgcgccgtcatctggatgagcgccgcgccgccggcacgcttgacccagatgccttcgtggtgggcatgcgattccgtcactcgctgtgggccgacgacgagcagcccacactggctgcaattgacgccgtgaccggcgaacagccggtggccctctccagcgcggacatgcactgcggatgggtgaactccgccgcggcccgcaggcttggcgtacatgtggacgaatccggtctggtcggtgaactcgaatggttcaacgcctacaccgccttcgacaaggtgccgggcgctgctgaagagactgaccgtctgctgcgcgaggccgaacaggacgccgcaagcaagggcgtggtgggcatccgcgattatgaaatggccgaaaacatcgatacgtggatcaatcgtttcgcggccggcattaacggtttgcgcgtggacgctggtgtataccccgagcggttgcaagccgccattgacgcgggttggcataccggcaacccactgccgggcagcgccgggctcggccatgtgggcgccatgaagctcatctcggacggatcgctcaacacccgctccgcctactgctccacgccgtattcgggcatcgagccgccgacgtatggcacgctgagctacacgccgcagcaaatcgaagactatatgcgcctagccaccgagcatggcttcgacattgcctgccacgccattggcgacgaagcgaacaccattgcgctcaacgcagtcgccgccacgcacgcacatggatcgatcgagcatgcgcagatgctcaaacccgtcgatatcccgcgtttcgccgagctggggctcacggccagcatccagccgcagcacgccatggatgaccgcgacgtcatcacccgtttctgggccaacccggccggcatcccttatccgttcagggccctccacgacgccggtaccacgctgcgcatgggctcggatgcgcccgtggccccgctggacccgtggctggccatttccgccgccgtgctcggcaccgaaagctctgaccgcgagccgttccagcccgagcagtgcctcgatgtgcatacctcgctggcagcctcgaccgccactggccgtgaccgccttgcatccggcgacccggccgatgtggtgttgctggacgccgacccatacgccgccgatactccggaagccatgcgcgctatgccgcaacacgtcgtaatgacattgctgtgcggggagcgtacgtattgatgcaagccatcggcatgaaaagtgaccagaggtccgtcttgatagccgtgttgcgcggaaaacatgttgtgttttttgaattgagagctactaacgcttgattctccgtttcaaggggcggatttgagccttttcggaggtctatctccgtttcaaggggctggtcatgcgctcaatctcagataagatcccattcacgccaacgtcattccgccgtttttgtgcctcgtctacttgagcaacagcccctcgaagcggagatagacctccggaaaacgagaaatccgcccctcgaagtgaagataggacacagcagacgccgcaatgcaaaaaacgccgtgtcagttgcccagttggggctgacatggcgtcttgctacgagcggcgggaaaatcagtacttcatgcccatggcctcgcgcacctggtcgagggtctcctcggcgatggcgttggcgcgcttgttgccgtcgtgcaggatgtcacgaatggagtccatgtccttggc

SEQ ID NO: 2913 - DNA, 33588 bp, Unknown
  R19_24m  MAG No. k141_941
ctcgcagcggagaaccagaacatcatcggcatcaaagacaccgtcgacaccatcagccacaccaggaaggtcatcgctgccgttcgtaaggtgaatccatcgttcagcgtgctgtccggattcgacgagtactacaccgtcaaccgaatcagcggcggcaatggcgtgctgtgcggattgaccaatgtggagccggagacattcgtcagcctgcatcgtgcatggcagtccggtgactatgccacggccatcaagtcggctgagcgcatttcctatctgatgcgcctgtacgacactgccgacctgttcatcagcgccatcaagggcgcggtcaaggcgaagggactgccaatcgacacgtccatccatgaacccgccgtgcagctgaccgatgaacagtaccgcaatatccagagcattctaggcaagtaacaatcaaataagtctgaagacaagcaggagcagctatgctgaaagggataccgtcgatcatacagcccgatttattgaagattctcagtgaaatgggccatggcgatactatagttctcgcggacgcccactttcccgctgaatcattggggattcattcccatgtgatcagatatgacggtcagcccatcgaaccacttctcgatgcagtgatgcagcttataccgttggatcaatatacggagcatccggtgtttttgatggataaggttcctggagacgccgtcgacaccccgatatgggatcggtatcgtcaggtaatcgccaagcatgagcctgacaggcaaacggctattggcatgctggaacggttcgccttttatgatgaggccgaaaaagcctactgcatcgttgcaacaggtgagcagtcacagtatgcgaacatcatcatcagaaaaggcgtcattcgctaataaccgaataggagcaatataatgagcaatcctgcagatgcgggcatcaacctgaactatctcgcaaacgtgcgcccatcgtcgcgccagcttgcctggcagcgcatggaaatgtatgccttcatacacttcggcatgaataccatgacagacagggaatggggtcttgggcatgaggatccggcgctgttcgatccacagaatgtagatgtggaacagtggatggatgcgctggtggctggtggaatgactggtgtcatcttgacgtgcaagcatcatgatggattctgcctgtggccatcgcgttacacgcagcataccgttgccgcctcgccatggaggggcgggaaaggggatctcgttcgtgaggtcagtgagtcagccagacgtcatggactgaagttcggcgtatacctgtctccgtgggatcgaaccgaagattcctatggcaaaggcaaggcatatgacgatttctacgttggacaattgactgagttgctcacccagtacggaccgattttctctgtatggctggatggtgccaatggtgagggcaagaacggcaagactcagtattacgactgggatcgttactacaacgtcattcgttcgcttcaacccaatgcggtgatatccgtatgcggtcccgacgttcgttgggctggaaatgaagccggacatgtgcgtgacaacgaatggagcgtcgtgccccgacgactgcgctcggcggagctgactatggaaaaatcacagcaggaggacgatgcgtcctttgcctctacggttcgctctcaagatgacgaccttggaagccgtgaggcggtttccggatacggggatgatgtctgttggtatccggctgaggtcgatacctccattcgccctggatggttctaccacaagtatgaagacgacaaggtcatgaacgcagatcagctttttgacctctggctttccgcagtcggcggcaattcgtcgcttctgctcaatattcctccttccccagaaggacggttcgcagaaccggatgtggagtcactcaaggggttgggaagccgtatcgatgaattccgcaaagcattggcttcggcttgttgcgaagtcaagaccagtagcgcgaacgaagctgcaatgcgacttattgatgggaatcaagacacgtattggtctcctagcaccgatgacgtggcccctgctgtcacgctcactttcccgcaactgacgacgatcaatgccgttgtggtcgaagaggccatagagtgtgggcagcgcatcgaacatatgcgcgtcactggcgtgctatctgacggcactgagtgtgtactcggacagtccggcacagtgggataccgcaggatactccgtttcgacgatgtcgaagtatcttcggttacccttcatgtggatgattcaaggctcacgccaatgatcagccgtgcggctgcggtgcggatataaggcgggtatatcaccatgaaactcacattcgatggaatctcttcgtgctgggaagaaggcatcccgctcggcaatggacgcatgggagcggtcctgtgttccgaaccggaaaccgacgtgctgtatctcaacgatgacaccctttggtctggatatccacacgcggaaacctcaccggtgacgccggaaattgtggccaaggcacgtcaggcggcatccggcgacgattacaccgccgccacgcgaatcatcaaggaagccacactgcaggagaaggacgaacagatttacgagccgttcggaacggcccgtattcagtactcgacccctgcagacggccgtgagagcatgaaacgccagctggatcttgcaagggcgctcgccggtgaaacattccagatgggtgatgccaacgttcatgtcgacgcatggtgcagcgagcccgacgacctgttggtctacagaatgtcatcggatgcgccgattgatgtgaacgtcagtgtctccggcactttcctcaagcaatcacgcgcctcgttggaaacggtatccgacggtcatcgggccaccctcatcgtcatgggccggatgcctggactcaacatcgggctcctgcctcacccttccgaacatccttgggaagatgaccaggacggaactggaatggcgtacgccggtgcattctcccttactgtcacaggtggcggcatcaatgtgggggacaacagtctgcaatgttcgaacatcaccggattatcgctccgcttccgcagtataagcggattcaagggaagcgaccagcagccggaacgaagcatgacggttatcgccgaccatctggagaaaaccattgacgattggtcgactgacctgcagaccatgctcgaccgccatatcgcggactaccgcagatatttcgacagggtggccatccatctcggttcagcccatgatgacgatacggaactaccgttctcggtgatccttcgctcggatgagaaaaaggaaccgcatcgtctggagatgctggcggaggcgatgttcgatttcggccgatatctgcttatctcctcgtccaggccacacacccaacctgcgaatctgcaggggatttggaaccataaggatttcccgaactggtacagcgcctacacgacgaacatcaacgtcgagatgaactattggatgaccggcccctgcgcgctcaaggagctcatcgagccgctcgtctccatgaatgaggagctgctggcaccggggcacgatgccgctgacaggattctcggctgccgaggatcggctgtcttccataatgtcgatctctggcgtagggctcttccagcaaacggcgatccgatgtggtcgttctggccgttcggccaggcatggatgtgccggaacctgttcgatgaatatctgttcaaccaggatgcatcgtacctgtcccgcatctggccgatcatgcgggacaacgcgcgattctgcatggatttcctatcggagacaaagcatgggctggccccgtcccctgcaacatcaccggagaactgtttcctggtgaatggagaaccggtatccgttgcgcaaagcagtgagaacgccacggccatcgtgcgtaatctgcttgatgatttgattcaggcttctcacgatttggaaaaccttgacgaagaggacagcgctctggtccgtgaagcggaatccgtccgttcccaactggctgaaacgcgattgggagctgatggaagagtccttgaatggaacgacgaattcatcgaatccgatccacagcaccgccatctgtcccacctttacgaactgcatcctggtgcaggcatcacgtctaagactccgcgtctggaggaagccgcgagaaaatccctcgaagtgcgtggcgatgatggttccggttggagcatcgtatggcgcatgatcatgtgggctcgtctgcgtgatgcggaacacgccaaacgaatcataggcatgttcctacggccggtggatgcgaacgctgaaaccaatctgctgggcggaggagtgtacgacagcggattatgcgcccacccgccgttccagatcgacgggaaccttggattcccggcggccttgtcggagatgcttgtccaaagccacgatggctggattcgcgttcttccggccctgccggaggattggcatgagggaagcttccatgcgctccgcgcaagaggtggaatccaagtggatgcgacatggacggatcagacagtggaatatacgttgcgctgttcgaagcctacggagattacgctgaacgttctggggactgatatgggacgtgtcgcattgtctccggataagccattcaagggaaccatccggcgttaacgtattgcgttatatccgttactaaatgttgcggaccgtctttcctaatagaggaggacggtccgcaatctttttttgatgggaaaggagattccgccattttccacgattggtatgcgcagatgaacctgtacagtgaaagctatgcgtgtaatttctggacgattcaagggtgtggcgcttgctacgccgaaaacgggtacccggcctaccacggatcgcaccaaagaggcgattttctcgcacctcgactcatggggagtgctggatgatgcccgtgtactggacctgttcgccggtactggtgcgttgggcatcgaagcgctgagccgtggcgcgcgagaactcgtggccgtggaaagttcccggcctgcggcggcgctgattaccaagaccttgtcgcagttacagaagaatcgttcgtgggatgcctcgctcaaggcccgtgtgttcaccaaaaaggccgagcaagtggctggcggctttggtgaatcctttgacgtgatattcattgatccgccctacgcctatgagaccgctgaatgcaatcagttgttggtcaatctggcggtgggcagcgccaccaacgagaacaccgtgattatgctcgaacgctcggtacgctccgacacccccaccgcccccgaaggctggcaaatcactgaaagccgcaactacggcgaaaccgccgtcttctacatcgagcccgcggatgacgactcggatatagagcgttccgacgattccgccgcgtagtgaatctcccaccgtgtggtgaattaatcggcgagccggcgcggatgggcggcggagacctcccagcccaaggccatcagggtcttgcggtcggccttatccagcgccttgcaatccagtgccgcgataaggtctggccggatctcggcggtgcgggccagcgcttcgttgcggcgaaaacggtccaccttgccgtggtcgccggacaacagcacgtccggcaccgcaataccacgccacacggccggcttggtgtactggcgatgttcaagcagtgcgtcctcgccggtgtaggattcctcgacaatcgaatctgggttgcccatgaatccgggcatcaggcgggtgatggcctcaagcatcaccgacaccgccacttcgccaccgttcagcacatagtcgccgatcgaatattcgcgtacgtcgacgccctgggagcggtagtagtccgggatgcgcgcatcgtagccctcataccggccgcagccgaacagcagatggtcggcatggctgagctcggtggcgtcgcgttgggtaaacaacggggccgatgggttcgggaagatgagcaccggtgtgccggatagggcggaggattcagacggccgcgagaatcccagcagttcgtccagacattcgctccacacctcgggcttcatcaccatgccggccccgccgccgactggcgtatcatccaccgaatgatgcacatcgtgggtccagtcgcgcaggttgtgcgctttgatctccaacaatcccttggcctgggctttgcccatcaggctgaggttcatcacctcaaagtattcggggaacacgctcacgatatcgatcttcatgttatccagcctaacggtagccccgcccgcattacacggccaccactacactattgcggtgatgaatacgacgatgaacctccccacccgcaaaaagcccgaagtgttgtccccggccggcaacctgaggggcctgaaaaccgcggtcgattatggtgccgacgccgtctactgcggcggcaaagccttcggcatgcgatcggcccccaaaaacctaagccttgaggactttgaggaaggctcgcgctacgcccatgaacgcggcgcccgcgtgtacgtgacctgcaacgtgctgccgcgcaacaacgagatcgaagccatgcgcgagtacgtcggccagctcaaggacaccggcgtggacgcgctgatcgtctctgacatcggcgtgatgatgatggcccgccaagtggctccgaacctggaattgcatgtctccacgcaggccggcgtcaccaattaccaagctgcgaacgccttctatgagcttggcgctcgccgtgtggtgttggcccgcgagatggacttgcaggccgtgcgtgatattcgcgccaacattcccggtgacctcgacatcgaatgcttcgtgcatggcgcgatgtgcatggcgttctccggccgttgcctgttctccaactatctgaccgggcgtgatggcaatcatggcgaatgcgcgcagccatgccgctggaagtattcgatcgtggaagagaagcgccccggccagtacttcccgatcgagcagaccgagaacggcgcctatctgttcaattcgcaggacatgaatatgctggggcacttggatgatttgattgactccggtgccaccagcctcaaaatcgaaggccgcgcgaaaagcgcctactatatcgccgccatgaccaacgcctacaaaaccgcggttaatgaatacatgattcaacgcggttttgaagacgctgatggcaatgttctgaagcctttccgtgaccgtgtgattcgcccgggcgaccccgattttggccaaggaaccgaagatcaagtgatgagcaatgccgatgccgcgttcgccggtgtggccgatgagggatatgaccgtggctctgatactgcggttgccgattcggtcaccggctcggttgccgcagaacgtgaccgcgtgacggttgctgatgccgccgactcaactgcctctggtacgtcggccggcaccgccgtcgaacccgacggcatgagctcccacgcccgctccacgcgccgcaagtccaacaccgcggtcgaacagatcgagaccgattggaagcatgcggccgttcgcccggccccgcacgtcgaactgcccgaatggctgctcgaggaaaccgacaaggtggcccaccgcgactactccaccggcttctattacccggagcacaaggtcacacagaacaccgaccgctccgcctacttccgctcatggctggtagtgggcgaagtgctgagctggagcgcggacgaaggcggacgtgtcacgctgatgagccgtaacaagatcgagcccggtcaacaggttgaattcctgctgcctggcgagagaccattggtctttaccgtgccggaaaccggcctgcgcgatgccgatggcgcgccagtacccgccatcaataatccggcgcacgtgttctcgatgccctgcccgcaccaggtgcccatcaacgccgccatccgctcgcgcaccaaaaagcccaccctcaaagccgaataacctaccactccgcccccgctgactgggggtggtcatgggaatcatgaacaccgcccgcacccaagaaagaatgccttatgcctgaatacagcgaagaaatcctcgattccaacagcatcagctctaccgataaagccggtcgccctattccggtgaccatccccatcgcactggcccccggcatcaaggtggtgtacaccacgcgactgggtggactgagcaccggcgattacggcaacctgaacctcggcggcaagtccggcgacgaacctgaggccgtgctgtcgaaccgcatcgcactcgccgaagcggtgcaagcccgcctatcgctggtctcccaagtacattccggcgtggctgtggacgtggacgactcgttcgtcatcaacacccccttcggcttcgacgtgtccggcacacatggtgagactgacactccgcacgtcatcgaggcggacggccaggtcaccgcacaatccggcatcgccctaggcatgttcgcggccgactgcctgccggtgctgctgggcgacccggtcaccggcatcatcggtgcggcccactgcggccgtcgtggtctggagcatggtgtgatcggcgccacggtagacctgatgaagagcaagggtgccgatccggcgaacatcgtcgccacactcggcccgcgcatctgcggcgactgctatgaagtgggcgacgagatcgccgaccagttcatcaagcgcttcccgctgaccaagacgaagacccgcttcggtggtgccggcatcgacatcgccgaggcggcaataatcgacctcgctttcgccggcgtacatcaggtggtcgattcgatgccgcgcgtgcacgccgccacccagtaccttgaggaagacccggaactcgccgaactgtgccgcacggacggcgaaggcccggccgagctcgcggagcgcatcgacaacatcagccacagcatgtgcacgctcgaaaacccactgtggtactcgcaccgccgcgccgcgctcgccaacaaaacacacgaaggccgcctcctcgccctcatcgtgcgtgactaaacggagaatgcgggcacattccgtggagaagatgtgatgcagttcacggacggccagccctcaccctacggtggtgcctatgactgagagagatttcgatacccccgtcgagacgcctaccgtccagccggcccccgctcagggcgccaaaccggcacaaaccgtgccggtggtggccgtggtgctggccgccggcttcggtacgcgcttcgaccccgacaatcccaagcagcttgtctccgtgggcggcaagcccatcgtgtgctggagcattgatgcctttgaacattgcgatcgcgtcagcgacatcgtggtggtggtcaatcccaaggtgcgcggtgaagtggaaacgttggttggcgagatgggctacaccaaggtccgcgtcatcattgacggcggtgacgaacgtgtggacagtaccgccgccgcgctcgacatgctggctactgctggcattccggacgatgccaagattctgatccatgacgccgtccgtccgttcgtggaacagtccgccatcgacggttcgattgatgcgctcgaccagttcacggccgcgaccgtggcctacacctcaaccgacaccgtgctgttgaccgaggatctgggcgatttgaaagtggtcaagtcggtgccggaccgcccgaacaccttccgcgcgcagaccccgcaatccttccgcttcgcgacgattcgtcacgcttacgatctggctgccgccgacccggacttccatcccaccgacgacacgcgcgttgtggtcgattatctgcctgatgaacccgtcgccattgtctccggtgcggaaaccaacctgaagatcaccacgctggaggatattcccacagctgagcgtatcgccgaggagattctcggtcgtgatcccaaggaagaggcccgcgcccgcatgcacgccctgctggcccaagcggccggccagatgcatcgctagactggcattatgcgtgaactcaatgttgtgatctccggcttcgaccactatgacggcgtggaggtcaatcccgccgtcgaagtgcccaaggccatcgccgagcaggggttgggcgtctcctctgctccggacgatccgttggagcaggtcgccgtcaccgtccatgccgtcagcatcccggtgagcttcgccaaagcctggcccacgctgaaagagacgattgaggccaccaagcccaatatcgtcatcgccaccgggctcaagcacgcagcccgaggcgtgatgcttgaacgatgcgccaccaacctgatggacgcgatcaagccggacgcggacaacgtgaccccacgccgcgaacccatcgaccccaatggcccggccgcctattggacccgcctgccgttgcgctcgatcctgaatgatttcacggacgattcgattccggccaccctgagctcggacgcaggcacgttcgtatgtaattcgctgttctacaacttgctgaactggaccgccacccaggagcgggtgctgggcggattcgtcagcttcccgccggtcgtgccggcggattccagccagcatggtctgccactcgaccagcagatcgccgctggccgtgatgtggtgcgcgaagccgtgcgctactatctcaagccctccagctccggcatcctcatcgcctagcacgctgcgcgccacgccggaatagaacatggttcgcacgcattgtaacgattgcgcgtcactcaacgcccagcgctagtgcgatgcgctacagtgcttcaaggatgtgccaagagctttatgcgtgtgcgaaaggaataaacagcgatggtggatcgtttcccggtggtgctgcgaggatatgacaaggagaaggttgatgctgccttcgacgctactcaggagagtgtgaagcgtgcgcagcagacgttggccagcatgcgtgagcagattgcggcggatgacgaccgtattctgcaactgcaggcccagcttcaggaagagaagaacaagaagccggaaggcaacagcttcgcttccctgggggcgaacgcccagcagatgctcgcctccgccgagcagacgagtaccgaactgttggaacgcgccaagcaggacgcatcctccatccgtaccacggctcaggctcaggccgaaacgctgatcaacaacgccaagctggatgcccagcatattgttgacgacgccaatgccaaggccgcctcgattctgacgaacgccaacaatcaggccgaatcagtgaccacctccgccaacgaggacgccgcacaactgcgctccgaaaccgccaagaccatcaccgaacagcgtcagaccgtcgagcttgagctcagcaacgcgcgcgaagagcacaccaagaagatggcttccgaacgctccacccaagagcgcgaaatcgccgatatgaaggcggaagctacccagcaggtcgccgcaatgcgcaaaagcgccaatgaggagatcaccaagcttaagtccgattccaacgatcagattgaggcggcgctcgccgaggccaacaagaagctcgccgacgtgcgcgagcaagtgtccaagatgatgaccgaagcccagcgcaaggccagcgaaatcattgatgcggccaaaaccaagggtcaggaaatcactgatgaggccgaggtcaagcgcaccagcacgatgagccaggtcaacgccgaagtcgagcagatccgtcacgacatcgccgctcagcaggatgaggccacgaagaaggtcaacgaactcctgcagcacctcgaagagcgtcgtgtggcggccaagcgggaagccgatgagttggtcggccaggccaagaacactcgcgaccaagccgattcatatgccgcgtccaagcgcgaggaggcggacatccaggccgccgcaatcgtgcataaggcgggcgaggaagccgatgcgcagatcgaggagcgtcgtgccgccgcccaaagcgagcttgacggtctgtccaagcgcatcgccgatctgcaggaacgcgagtccgtcatcacccagcgtgtttcggaactgcgttctatgttctcgcaggcgttctccggattcgctttcggtggtaatgcggcggcctctggtcagagtcaggaagccgctgccgtggcgtcattgccggtggtcgcgcccgtcccggaagtcaagcctgtacacaacgaggccgatgatcagccgggtgagttgagcggaaacgagtcggctgccgacgatcacaatgagacagatgcggcaccggctgattcggctgattcagctacgcagaatgagcagtccgaatcgtctgagccgtccgagcaccagacacagggcgaaccggaggccccgactcaggagaatccagccgtatctgagcagaacggcgaatgacaggccttcgattagactactagcggtaagaattacggcacctgcgctttcgagccaggtgccgtattcgtttggatctgcgccacaagcgcaccatcacagaaggagtatgacatgagtgaattgacgcctctgaccggcgaagcattgaataccctgcgcggcgatttcgcacagagcggcaccaaccgtctggccatgaacgcggtgaccgccgccggcatcgacaaggtggctcgcaattatgaccgcgctcgtctgatgcagcgccgtttctccaccatcgttgacaatggcgaagccacccatcaggatcgctccggccgctgctggctgttcagctccctgaacgtggcccgtttcgtggccaagaagaacatgaacctgaaggagttcgagttctctcagaactacgcgatgtactacgacaagctggagcgcgtcaactacttccttaaggatgtggccgctctggtggctgccggagagccttccgactcccgcctgatgcagcacctgctcgccgacgtgatgggcgatggcggccagtggaccatggccatgaacgtgtacaagaagtacggcgctgtgcccaaggacctgttcccggagaccgaatcctccaagaacaccggtgaaatgaacacccagctgcgccacatgctgcacaccgccgtggcgcacatgtacgccgctgacggcgatgcctccaaggtcgaggcgattattgccgacgccactgctgccggccaccgtattctgaccatccacctgggcgagccgccggtctccttcgactgggaatggaccgacaaggatggcgaattccaccgcgacggcgagattacgccggttgagttctggaagaagtacgtgggtccggctggtcttgaggactacgtgtgcctggtggatgatccgcgcaccgagcacgccaagggcaagaagatcggcatcgagcacctcggcaatgtggctggcggcgacgccaccgagtacctcaacgtgccaaaccagttcatgaaggactgtgtcaagcagattctcgttgagcagggcatcccggtatggttcggtgccgactgccacccgttcatggaccgtgagaacggcgcttgggccaccgacctgttcgagtacggccgcgtgtacgacgtggacttcgatttggacaaggaagcccgcgtgcgcttcggtgactccgccatgaaccacgccatggctttcgccggcgttgacgtggccgacgacggcaccacccgccgctggcgagtggagaactcttggggcaccaagatcgccgacaagggctacttcaccatgtccgacgactggttcaccgaatacgtctacgaggtagccgtcccgaaggccctgttgccggaggaataccagaaggctctcgaagagccagccaccatgctccccgcatgggacccgatgggcgccttggcctgacttcgccagcctcccggaatcggcctgacggccgatgctgtgttttttcgcagcctgccggctgctagggtctctccctctgtcagcgcgaagccgctgacgggggggaggccgcggtcgcaggccgcacaacaacacagcatcgccgcaggcgagtccacgcaggcgagtccacgcaggcgagttcacccaaagtccataaccgccggcccaacaagcagtccccgtaacagactgctatagttgggcttttgcgtctatagcgccataccgacggtacgtatacaaggaaaggagtcgagcaatggcagcactacgtggtccggatagttccgaggatgaacgtcgtttgggggagcaggccgtctttcccgagaccgtcgatgtcaacattcgtcagcttgaccccattcccgcgccgcgtgccttcctcagggagcagccgctcaccgatgagatgagcgagctcgtgctccactcgcggcaggaaatccgcgacgtgctcaatggccgtgacgatcgattgctcgtcatcgtgggtccgtgctcgatccatgatccgaaggccgcgcacgaatacgccgagaaactggccgccgtcaagcgtgagcttgaagaccgtctcgtgatcgtgatgcgcgtgtatttcgagaagccgcgcaccacgatcggttggaaaggcctcatcaacgaccccgatctggacggtcgcttcaatatccgtaagggcatgtggctggcccgcaaggtgctcaccgacgtgctgagcctcggcctgcccgccgccaccgaatggcttgaccccatcaccccgcagtacatctgcgacgcgatcagctggggtgccatcggcgcgcgtaacaccgaatcccaagtccaccgcgaactggccagtggcctgtccatgccggtgggcttcaagaactccaccgacggctccatcaaggccgccgccgattcctgcttcgcggccggcttcgagcatcacttcctgtccattaacttggacggtcgcgtgatttccgccgaaaccaaaggcaacccggattgccatctggttctgcgcggttccagccacggcccgaactacgatgccgaatccgtgcgtcaagctctggaagacctcaaggtttccaaagcgtccggcccgagccagcatggcctcgtcatcgatgccgcccacggcaactgcggcaaagacgaaaaccgcgaagccgaagtcatcgaagagatcgctgagcgtctggcgcacggcgaacaaggcatcaccggcgtaatgatggaaagcttcttggtcggcggtcaccaaaagccggccccgctcgaccagttggtctacggtcagtccgtcaccgactcttgcgtgccgtgggaacgcaccaacgagctgctgcacaccctagccgacgccgtcaccgctcgccgcgcggctaaatagctttgtctttgtaaaaatgctcactgagacccactcagtgagcattttttgccaataacggtggtcatgtcagtttgttcccgtgacaccttatccttgggaaagatactgatccaaggagagatgttatgcagcagcaggaggaagcagcacattcgctgcatccgttgcaagtcggtccgcagccgttgaacaccccggaagagcttcgcgccattcgtcaggcgatgggggaggggaagaacccgctcgttgccactgatgtgccgcgctgggaagatcaggtgggtgtcagtcgcatcatcaaccgccgcgtattggagctggagccgctgcccacgcccgcgcaagtgctcgctgaactcccgctgaccgatcaggctcaggaaatcgtcgcctactcgcgtgatgagattcgcgcgtgcctgtacggccaagacgacaggttgttggtcatcgtcggcccctgttcggttcatgacccgaaggccgcgctggactacgcgcaccgattggccaagctgaaggacgagctcggtgagcagctgctcatcgtcatgcgcgtgtacttcgagaagccgcgcaccaccatcggctggaagggcctgatcaacgacccggatattgatggcagccacaatattcgcaaaggcctgttgcttgctcgcaaaaccttgcttggtgtgctgaaggaaggattggcggccgccacggaatttctggagcccaccagcccgcagttcatctcggacgcggtgagttggggcgccattggtgcgcgcaacacggaaagccagatccaccgccaattggccagcgggctttccatgccggtcggcttcaagaacgccactgacggttcggtgaaggcggcggtcaacggttgcttcgccgccgcccagcagcacacgttcttcggcattgaccatctggggcgtgcctgcgcagtcgagacccttggcaacccggactgccatgtggtgttgcgcggctcgattcacggcccgaactacgatgccgagtccgtggccaaagccatggaagacgtacgcgccgaaatgcccgccgaatccgcagcctcgcacggtctgattgttgattgctcgcacggtaactccggcaaggacgagcatcgtcaggccgaagtcgtgcgtaatattgccagcagaattgcagctggcgaacagggtattaccggcatcatgatggaaagctttattgaagggggcaatcagaaggccgcgccgcttgatcagctggtctatggcaagtcgattaccgacaagtgcatcagctgggaagaaaccgaggccttgctgcgcgagcttgcggaagccgtggccacgcggcgttggcactgagttgcgtcatcggctctctcggggggagcaatgtgacgaaacgtctgactacccctcagcccgccattcggcggccagctcccctgacaaggggaaccgaaagtgttgtgaaaggaacttacgtatgggtatgaaaactgtagctattattggcgcattggatgaagaagtggcactgatcgccaaatcgctcacgcatgtgacgcacaccgccaagggcagccttgacatcgtgtccggcacggtcgactccttcggttctgacgtcatcaaggttgccgcaacggtaggcggcatgggactggtcaatgcggccgccaccacgcagctgctgattgacgagttcgccccggacgccgtgattttcagcggcatcgccggcaacctcaacacccacctgcacatcaacgacgtggtgctcggcggcaccctgcgctacctcgacactgacatgcggctcgtaggccagtggaagcccggcactgcggacgctccggtggaggaattccactctgatgaccatctgctggaagttgccgacgaggcgcttgccaatgcgggcattacccacatcaccggcatcatcgcctctggcaactacttcgtggacacgccccaaaaggtcgaggaggtcatccgactcaccggggctgacgccgtggagatggaaggcgccgccgtggcacaggtcgccgcccgcaatgacgtgccggcactggtgattcgtgccctttccgacaacgccgacaccgattacgaggtattcaaggagttcgacatctccgagtacgccgataccgccgcccgtctggctgtcgacatcgtcaagcgcctgtagtcggcgggctggcccatctcaccatccacgttttgggtatgatgaccacaatatgagcgttttcaaactattgcttataacctgagccatactcggtgttcggcacagcgatgtgcggggttcatcgctggggccacaagccgtaccagttcttctcccgcatgccggtcgctgtgctcaattcgttaagcgacgacaacaccgtcgcgaagcattgaatacacaatgcgcacgctgcactggggtttatctgcagcatgaggagagaaaaaatgactgcaagcgcaaccgcggctgtgaccaaaccggtgaagaaggattcggttcctgagatcatcgccgcttccatggtcggtacggccatcgaattctacgataactactgctattccattgccgctgctagctacttcggcatgatcttcttcacggacgtcgccaagtccaaccagaccctcgccacgctgatggccttcgtgaccttcgccgtttcgttcctcgcccgtccgttcggctccatgctgttcggccacttcggtgacaagctcggccgtaagaagacgctggttatcgccctgatgaccatgggtatcgccaccttcctggtcggctgcctgcccggttatgagcagattggcgcatggtccgtcgtgattctgtgcatctgccgtgcctgccagggcgtgggcctcgccggcgaatggtccggtgccgcgctggtcgccactgaaaacgctccggccgacaagcgcgccctgtacggttccttcccgaaccttggcgccccgattggcttcttctgcgcttacggcctgaacctgctactcgaatccaacctgagcaaggaacagatgattgccttcggctggcgtatcccgttcctgtgctccgccgtgctggtgatcattggcctgtacgtgcgtgcccgcatgtctgagaccccagtgttccagaaggccactgaagagaagcgcacctccaagcacccgctgcgcgacctgctgccgtactggaaggaagtcgtgctcggcaccgtagccatgggtatcacctataccctgttctacgtactcggcacttggtcgctggcctacggcgtcaagggcttgggcttccagcagggcgagtacctgctcatgcagatgtgctccgtggtgttcttcgccatcttcatcgtggtctcctgcgtgtacgccgacaaggtgggccgcaagaaggtcatgattgccgtgaccgccgccgccttggtgttcagcttcttcgtgccgatgctgctcgtgcactccgccgcccatatcatgatcttcctgtgcgtcggcttcatgatcatgggtggtttgttcggcccctgcggcgcctacctgcctgagctgttcccggtgcacgtgcgttactccggcgccggcctgagctacaacctcgccgccatcttcggtggcgcattcgctccgaccatcgcccaggccctggtcgcctccaagttcggcgttgccggtgtgggctggtacatggccatcatggccgccctcgctctgctcgctctgttcctgattaaggaaagcaaggacaaggactacgagctgtaaatagagctccccatattatgctcccgctggcgggagctgtccacgaaagcggactgagggtggccaatgggatttcggttctttgaccaccctcagtctcactgcgttcgacagctcccgccagcgggagcattttgttatgtcgtcccaccaaaaatgaacaatagacgaacttacgtagtttgggcatctcactacgccttgcacgttttactctggaaatcatggatatctggcagatcgtcgtgattgtggtgctcgccgcgctgatactggcgtgggttgccgtcatcgcctacaacaaaggccgcgtttcaggtcggctcgccgccgaacaggacctgtccggcgacgaggatacgcgttctctattcggtgatgatgcgcccgtgcgccccaccgagcgtcgcctgattgaagtcctgcccgaagccctgattgttaccgaccgcaacggcttggtccaatattcaagccccggctcagtgccattcggcctggtctccggcgaccgactcaactcgcgcgaagtcgaggacatcctcactcaggccgccgccgacggtggcgtgcgtgagcgtgaggttcagctgccggtcaatcgcaattcctatccgtcctctaatggccgaggactggaggccggccagtcacgcccgtccaacatgctgtatttgcgtgtgcgcattggcgatatcggcgatgacctgtacgccatcttcatcaacgacatgtccgagcagcgccgtttcgaggccgttcgccgtgactttgtgaccaacgtttcgcacgaactcaagactccggccggtgccatctcgctactggccgaaaccgtgaccgacgccgccgatgatccggacgccgtacggtatttttccggccgtatctccaaggaatccgcgcgcctgaccgaactggtacatcatcttatcgacttgcagaaagcccaaagcccgcaaagtgtgattgatgcgcggcgcatttccgcgctggatgtggcacgcgctgccatcgccgccaatcagacccaagccgactcccgccatgtggatattcgactgagtgtcaacggacagtcagtgcccacgaaggtcgaggagctggccgatggcgaaggttccttggaagaatcaggcagcccggccacgagcggtccgatgatcaaggccgacaaagaggccatgcaaaccgccgtcaagaacctcgtagagaacgccatccattactcgcccgaacacaccactgtggcggtcggcgtgggggagcgcgatggcaaagtcaccattcgcgtggtcgatcagggcatcggcatccccgccaaatcactggaccgcattttcgagcggttctaccgggtcgacccggcccgttcgcgcgagaccggcggttcgggactcggcttggccatcaccaagcactgcgtgcaggagaacggcggtcggatttcggtctggtcgcgtacgggggaggggtcgacgttcaccatcgagctgccggccgccccggatgaggatgacgacgaggcccggccggacgagtcgacacaagcgtagggccttggttggtgcccgatatggtgccattccattgccgcacaatcacacagtgggcgaggtgcgcacaccgtgcgtagcacaattacgcaattacgtactttcaggaaacagcaggctaacggagaacaaatggttacgatagtatcggaaaactttgcgcctatgcgcacgggaacatacccaagaaaggctactatggcacgcattcttatcgtcgaagacgaggaatcctatcgcgagccgctggtataccagctcacacgcgaggggtacgacgtgtccgccgccgccactggcgaggaaggtctggaactgttcaccaagggcggcatcgatttggtgctgcttgatttgatgctgccgggcattgacggcactgcactgtgccgtcgcattcgtgagcagagccgtgtgccgattattatgctcaccgccaagagcgccgaaatcgataaggtcgttggccttgagattggtgcggacgattatgtgaccaagccgtactctttccgtgagctgctggcccgcatccgtgccgtgatgcgtcgcaatcaggccacggcccaggcttccggcactgtggatgacgatattccgctggtgtgcggcgatatcgccatgcaggtaggccagcatcaggtcaccgtacgcggcgaaaccgtgttcttcccgctcaaggaattcgaactgctcgaatacctgatgcagaacaagggccgtgtgatgacgcgtcaccagctgatcgaccgcatctggggttcggattatgtgggcgacaccaagacgctcgacgtgcatgtcaagcgcgtgcgctccaagatcgaggaagatccggcgcaccccaagtatctgactaccgtgcgcggtctcggatacaagatcgatactcccgcggagtaaatggaaggcggccttcgggccgccttttttgttgtggattgtgggctcgccgcaggcgagtccactccaaaaactacgtagcctcaacgtagcccacaaacatccaagtgttcatcttctgtttactgatttcggttttgggcccttgaaaccaccaatacgcttgtagttgtcatgaattgaccgggcagcgctgagccgcccgcgaatagttgatagagggattaagtaataatcatgcagaagaacatcctcattcgctccattgccgctctgtccggcattgtgatgctcgcttccgtggccgcctgcggcgataacaccgccaccacgaccgacaacagctcctcctccgattccacttccaagtccaccccggtctccggcaacttctcgggcgccggcgcctcctctcagcaggccgccgttgaagcctggatcgccggcttccagggcaccaaccctgaagccaagatcgcctacaacccgtccggttccggcgctggcgtgcagaccttcctgaccggtgccaccgcttgggccggctccgataaggcccttgccgatgacgaagttgagcagtccaagtccgtgtgcactgaaggcaccgccttcgatgtcccggtctacatctccccgatcgccgtggtcttcaacctcaagggcgtttccgatgccggcaagcacatcaacatggacgctgccaccatcgccaagatcttcgacggcaagatcaccaagtggaacgatccggccatcgccgatcagaacaaggacctgaagctgcccgacaccgccatcaccgtcgtgcaccgctccgataagtccggcaccacccagaacttcgtctcctacttcaaggacgtcacccctgacaactggacctacgacctctccgagaactggccgaacgaggttggccagggcgccaagggcacttccggcgtgatctccaccgtcaagcaggccgacggcaccatcggctacgctgacttctcccaggtcggcgacctgggcaccgtggccgtcaaggtcggcgacaagtacaacgagatttccgccgaggccggctccaaggtcatcgaggactccaagcaggacgacaccgttaagggcgacaaccgcatcgtcatcaagatcaaccacgccaccgaggccgagggtgcctacccgatcgtcttggtctcctacgacatcgtctgcccggcctacaaggacaccaagcaggctgagttcgccaaggcttggctgacctacgtgacctccgacgagggccagaaggccgctcaggatgccgccggcaccgctccgctgccctcctccctgaagtctaagatcaccaagtccatcgaggccatcaagaccaagtgatgacgtcggcccgcaagggtcgtgtggactggacctgacaactgaacgatagactgtagtagtaagagcagtcgccgccaactttaagccgcagtcgtaaaccatacggctgcggcttaaagcgggtcaggacccgaacggtttggcaaagtcacagacgaaaaccgcaccacttgaatacttgataaccaccctatataaggagaatccgtgagttcgcaagacaaaacggctgtgcagccagttggaggcaagaccgccgacaaggtgtttcgcggtgtggcatacgcctgcggcatcctgatcctggttgtacttgccgctgtgttcctgttcctgtttttccgcgcctggccactcatcggtggcgatcaggccgccaacagcgacaccgtgtccagctttaccggcggcaaggccagcagcttctggggctacgtgctcccgctgttgttcggtactgtgctcgtgtctttgctggcactgctgattgccttcttcgtgtccatcggcattgcgctgttcatttcgcactatgcacctaagaagctcgccaccgcgctgagctatgtggtcgatctgctggctgccatcccgtccgttatctacggtttgtggggcggcctgattctggtgccggccatctacccgttctggaactgggttgccaaccacttgggcttcattccactgttcgagggcccggccgccaacccgtcgcgcaccgtcgccaccgtggctgtggtgctcgccgttatgattttgccgattatcacctccatgtcccgcgatatcttcatgcagaccccgcgcctgcacgaagaggccgcgctggcgctcggcgccaccaagtgggagatgattcgtctggccgtgctgcctttcggcaagtccggtattgtgtccgcctccatgctggctctcggccgcgcgcttggtgagacgatggccgtgttgatgatcctgtccccgggcctcaactactccatcaagctgctgcaggcctcgcagaaccagaccatcgccgcgaatattgccgcacagtaccctgaagccaacgatctgggcgtctccacgctgattggaaccggtctgattctgttcctgatcacgttcgtggtcaacttcatcgcccgtaagcttaccgagaaagcgactgcgtgatgactgctgctgagaacactgaaaagactccgatggacggcacgcccgaaatcgacttcgatcgtttccgcccgacccgttccgccatccagcgccgtaatatcatggaccgcttcatgtgggccctgatcgcggtggcgtttgtgatcgcctgcatcccgctgatctccctgctgtggaccactatcgtcaacggcatcaagcgcctgaacctgaacttcctgagctacaacatgaccggtgtggtcggtggtagccagaccccgtccggtggttacggcggtgtgctgcacgccatcatcggtactctcgaaatcaccgctggcgctatggttatctccattccgatcggtttgatgtgcgccgtgtacctggtcgaatactcgaaccgcggcaagctcgccaccacgatctccctgctcgtcgacgtgatgagcggcatcccgtccatcgtggccggcctgttcgccttctcgatgttcacgattctgctgggccccggtaccatcaacggtttcgaaggctccgtggctctctccctgctgatgctgcccaccgtggtcaagtccagcgaggaaatgctgaagatcgtgccgaacgatttgcgtgaggcttccttggctctgggcgttaccaagcagcgcacgattaccaagatcgtgctgcgcaccgctctgccgggcatcgtctccggtgccattctggccatcgcccgcgtgattggtgagaccgcaccgttgctgatgaccgccggctacatctccagcaccaacgtgaacctgttctccggccagatgaccaccctgccggtgttcgtctaccaggagtactcgaagctcagcgcgaactgcccgcccaacgccgacgccacctgcgtgaccacgattccgatggaacgtgcgtgggctgcggctctcgtgctgatcgtcatcgtgctgctgctgaacctcattggccgaatcgtggcgaaggtcttcgccgtcaagaccgagcgctaagccagtcgctaagcctaagccttaagaacacaaggaaatataaggaaacatcatgggacaacgtattgacgtcaaccacgagaacatctattacggcgactttctggccgtggaagatgtgaacatcaacatcgagccgaacaaggtcaccgccttcatcggcccgtccggctgcggcaagtccaccgtgctgcgcaccttggaccgtatgcacgagatcatccccggcgctcacgtcgagggcgaggtgctgctcgaaggcaagaacctgtacgacaaggacgtggatccggtggccgtgcgccgcgacgtcggcatggtcttccagcgcccgaacccgttcccgaccatgtccatccgtgagaacgtgctggccggtgtgcgcctgaacaaccaccacctggccaagtccgacgccgacgatctggtcgagtgggctctgcgcggtgccaacctctgggaagaggtcaaggaccgtcttgacaaccctggcatcggcttgtccggtggccagcagcagcgtctgtgcatcgcccgcgccgtggccgtccaccctcaggtgctgctcatggatgagccctgctccgccttggacccgatttcgaccttggctgtcgaggatctgatcaacgagctcaagagcgactacaccatcgtgatcgtgacccacaacatgcagcaggccgcccgtatcgccgactacaccgccttcttcaacctgaaggcagtgggccagcccggtcacctcgagtacttcgcggacaccatcacgatgttcaacaacccgcaaaacgaagaagccgagcgctacatctccggtcgcttcggctgatcgtttcctgcgcgcagcgtaatgatttgtgcgtaggagaaacggcaaagcccgccgcaaggcgggctttcgcatattcaacgcgagtattgccgagtattatcgttctcgcaacggagcgagctggaatactttgtcggactgggcggcgacttcccgcttcggtcgatcgacgggagaacggcgggtaaagcggtacaagacaagtccgcacgatgaatactctgtgatgaatcttctgtttacggtgcgagtgtggaagaatggtcacagcaaggtccagcaaaggagcataggtgagtactggtctgatcgtcggcattgtcgttgtcgttattatcgttgtcttgattggttggggcgtcagcgcctataacaacctggtgacgctgaagaaccgtgtgaagaacggttgggcgcaaatcgacgtgcagttgaagcagcgtgccgacctcatcccgaacctggtgaataccgtcaaggggtacgcatcccacgagtctgaagtcttcactcaggtgaccgccgcccgcgccggcgtagtggctgtggccagcaacccgagcacgaccactgctcagcgcgccgccgccgaaaatcagctgtcccgcgccctgttcaacctgcaagccacggctgaggcatatccgcagctgcaagccaaccagaacttcatggatctgcagaaccagctcaaggaactggagaacaagatcgcctacgcccgtcagttctacaacgacgtggtcctgaagctcaacaccgccatcgaaaccgtgccgacgaacatcatcgccggtctgttccactttgagcaggcgcaatacttcgaggccgatgacgcttcccgtcaggtgccacaggtccagttctgacccgcttcaggcccgtccggtaagccgccggccgggcccgtattgtcttaagagagggaagatatgcggatacgattcattcgcgccggaatcatcagcattgttgccacggtggtgttggcagttatcaccttggcgataatcgggacttccgcgttcggcgattcggccggcctcagctaccgcacgctggactatgacgtgaccgccaccgcgaacggtgatttgaaggtcacgcagcatatcgacgtcaagatgcgtgagcgtaccgacagtgacgacaacaccaagccgtggaagcagctgttccagcaatacacgctgaactccggcaccttgactgatatcagcgatatcagcgtgcgcaacgtcaccgacggcatcgactacgcacaacagagcgagcccaagctgcccagtgacgtctcttccgacaaggaatggaacagcgactacgccaaccattggtatgtcgccgatgtgagcgatggcagcgaccatccaaaggcatacacgcccggtaccgatggcctcaagcccagcgcctccgccaccgaagatgacacaaccgtggagatcggctggaatattccggtcaccaccgaggccgacagcatgaagttcgatgtaagcttcaccatgcacgatgtggccaccaaatggaaagacgtggcctccttccaatgggagccgttcggcaagaagaaccaagtgcctatcggcacggtcaccggcaccgtccatttccccaacggcatcaccggcaaaacctcatggacatggctgcacaccgagcgcacctcggaaaccaagcgcaacagcgacggcagctacacgttcacggcctacaacatccacaatggcgactacctcgatgtggtcgcggcgttcgatgccgccaaagccaagggcatcgcccgcaagggaaccggcaatcatctcacggacctgaaacaggacgaatataagcaacagcagcgctggctcgacaagcaacgattcgctgccagagctcgtctcgtgttctggattgtcagcatcgtgctcggcatcgcgttgtgcgcgtggggtatctgggctgtgatctccagcaaccggcgtgcgcaatacagtggcagcgtcgaatactggcgcgaccagcccggcatcagtccggcttccgcagcccgtctgattcgcgtggtcgatccgtcgacgcgccaatccgatgaagaccgccagctgaccgccaccatgctgtcgctcgccgtcaagaaggccatcgccatttatccggggccgtcggacatgtatcgcggcatcgacatgagccaggccacgccggtgggcttgagccaaatgattgccgccgaccaaggcaagcagtatgcggcaggcatcaccagcaccatcgtgattctgccgctcgccattgatgaggcacccaacgcgcaacagttgggattgagcgaatcggaagatgcgctgctgaacctgctcatcgtcatttctcagcgcgtgggcagcccggtattcgacctgaaccagatgaaggcgacctgccagaactggcaagacggctatattgagctcggcaaattcaccggtgcatgcagcatggaataccagcggctgggtgccacgcgctctgtgggctggcaatggatcctacccggcgtattggccgccgtgctgggatttggttcgctgctggccaacagctttatcggatacccggtggctggtcttatcgggctgccgatattcctggtcggactgttctgctcgatggccggcgcgatgaccgtgctcactgatcaagggcaggatatcgccggccggactctgggccttaagcgttatatggaagacttctccaacttcaccgaccggggtaccgccgatttggccttgtgggattggtatatggtctacgccgccgcgtttggcatttccgatcgcgtgatgcgtgaactggccaaagcatatcctcaggtcaacgacccggcttggctggatgccaacgcctccaactcgttgttctactggaactaccgcccgtatggctggtacagccaccgtcataatggtccattcgaccacgatgctgccgggcagacggacctaggcgttggcggcccagctccggcttacggaggcacgtcgtttgccggcggattctccgacctcggctcgcagctgaactccggtctggcggacatcagctcgaccatcagcgcggcagcaccatccgccgattccggtggcgatttctccagcttcggttcgggcggcggctccggtttcggcggctcgttcggtggctcaggtggcggctcgttcggcgggcggtagcgcatgcctatgtcgaaacgcattgttcgtgccctgggcttaagccttgtcggtgcgctgattcttgccgcactctgtgccggtgccttgattctcggcacagatggtgccgacctgagctaccgcacgcttgattacgatgtgaccgccaccgccgacggcgatcttaaagcacggagcatatcgatatcaagttgcgcaaacgcaaggatgacgatggcaagaccaaaccgtggagatcggctggaatattcccaccaccgtaaaaaccaacagcatcaagttcacggtgagcttcaccatgcatgacgtggccaccaagtggaaggacgtggcgaccttccaatgggagccattcggtgagaacaatcaggtgccgattggtacggtcaccggcacggtgcatttccccaaaggtgtgaccgcgagcaactcgtggacttggctgcacactgaacaaacctcggaaaccggccgaaccaaggatggcagcttcaccttcaccgtaaatgatgtgaaaagcggcgagtacctagacgtggtggccgctttcgacgcggccaaggcgggagatatggctcgtgtcgagaccgacgatcatctgcaggagttgaaggaagacgaagccgacgacgaacggttctggcgcaatctggaacgccaacgcgccacaaggcgcctgaacaactggatgaccaccatatcggccggcctgatattcgggattattggtgttgttgcagccttacgctcctccggacgttcacgttaccgtggctccatcgaatattggcgcgatcgccccgagctgagccccgcatcggcggccaaacccatcgatatcgtgacttccggcgacaaacccgacatttccgagcgccaactcgtcgcgaccttgctttctctggccgtgaagaaagtcattgctgtgttccccggttcggcggacctgtatatcggcgtggatctgaaacaagtttctccggtggagctcagtcagcgaatcgggtccgatccatacaagcgcaataatgcgcgtaccaatagcacgattgtgatgctgtggcagtacgattacggcgtatctgagggatttgatgaatcagtattcgtcgaatccgtatttgatggatctggatctggcggatctggatctgccgcatctagcgtgtccgatgcacaccagcccgatctcagtgcttctgagcgggcattgctctatctgctcaccgtgatttccgagcgcgtaggtcgtacggcatttgacatggatgacatcaaagacgcctgcaaggattggaaagatggctacaaggaactcgaaaagttcaccaatgcgtgcaagaccgaattcgcggcggcggatatcgcgccgaaaaccgagaacggatggctcattcccggggcaatcaccgtgctgatcggtggcgccagcatattcatcaacggtttggccggatatctggtggccggggccctcatcggcattcccctgatgacggtcggcatattctgcttcctgatggggaattcctacgtgctgaccgatcatggtcagcagatggccgggcaatgcttgggtctcaaacgatatatgcaaggcttctcgaacttcaagtaccgtggagtcgcggatttgacgctgtgggattggtatatggtctacgctgccgcatttggcatatccgaccgggtgatgcgggagctggccatggcctatccgcaagtatccgatccggaatggcttgatgccaatgcctccgacacggtgttctattggaattatcgtccgtacgactggtatgggttgcgtttctacaatggctcggcgttcgcggattccgtggctgacagcggattggccggagcggtgccagcgttcgggggcacgtcgttcgcggctgggttctctgacctcggcacgcaattgtcgtacggatttgcggatatcaccgcgacaatcaatgcggcctcgccatccggtggctcaggcggctttggcggtagcaacggcggttccggcggcggttcgttcggtgggcggtaagcgatgtgcttctgaaagtccctatagctttgaaagtaaaaggtccggtgtcataagacatcgggcctttctctcaaaatcgaggtgaggagacctcaacagtcaggtccaacggggcgaaagtctgtggcgccgccgagaagattgcctcgaagctagcgtgacctttctgctacaacacagcataccagcctccaccgaagctcaccagtacactggactgaccaaaccaaggtctactagcgtgccactttggcgcggtgtcgttgtgtcaaccggcataatgacgtctcaaaattcaagaggaggttctcacggtaggcaacaaccatgacaaccgtccgagacaagaccggcaataccgggaaggtctgatgaccggcctgttgatcgccctggccaatcaagttggacagtggcggtcgacggccatcatcattgccgcactggtattgctgggaatgagtctcagacgaggccactgatctatcagcggaacagccggaatccatggggttccggctcctcgttttcgctgaactgggtatgagtaagttgcgttttctattccgtgaagttgcggaaatttcatagattgattgtgcgggcaggccgagagtgtgaaatccaacgggatgcttaggcttgattgtggatatcgagtttccataagtttcacgaagggaatcaccatggcattgttccgtaacctcggaccgttctccaccaccgccatcggccacggcgaaatgccgctgaccatcgaaaacaaccgcggccatgaggtcggcatcgaaaccctgcatgcctcgctggacgccggctgccgccacatcgacaccgcttgggcctactactgctccggcggcgaggagcagaccggtgaaaagctggtgcgcgaggcccttgagacctggaaggggccgaaggacgaggtgctggtggccaccaaggtgggccacttccgcaacttcaccgacggccgccccacgtgggatgtggacggtcgcccggagaacctgattcggcgcggcaaggagagcgcactggcgctcggcgtggacaccatcgacctgctgtacttccaccgcccggacccgaaggtgccgtacaacgagtccgtcgaagccatcaagcagctggtggacgagggtgtggcgcaggaggccggtatctccaacgcctccatcgagcaaatcgacattgcgcgcggcattctgggcgacaagctcgtggccgtgcagaaccagtactcgccgattcacctggagacccaggacacgctcgactactgcgccaaggtcggtctggccttcgtgtgctggagcccgctcggcggctaccgtcacccctatgatgagaccaagttcgacccgttccgcgaggtcgcggcggcccacggcgtgagctaccagcaggtcgtgctggcatgggagctcgccaagggcgaccacatgttcgtgattcccggcgcccaccaccccgagaccatcctcgactccctcaaggccgaccagctcgaactcacccccgaagagctcgccaagctcggctgattgcccattccccatcctcccgaatttgtgccgctgacgttggcttaacgtcacaaattcgggaggattgattcgtcttgaaggaaccgccatgcgcaaaaaactcatcctcgacctcgataccggcatcgatgacgcgctcgccatcgcatatgccctaggcagtgccgacgagatcgatctgatcggtatcacggccacctacggcaatgtcgcggtgccgctggccgcgcgcaacgcgctggcggtggtgcacttgttcggccgtgacgacgttccggtctatcccggagtcgaccatcccatcgccccggcaacattgccgaaaatgcgtggcaccacaccagacgagcggacccaggcctacgcgcgctggcagaacggcggcgcggacggctggcaaacggacgcttcgtgggcaccaactcccggctcggtggcggtccaccatcccaacggcatcggcggcgcaatcatccccgactccccgcgcgctccggaagcaccaggctcggcggtcgatttcatcatcgccgccgcgcgcgaatacggcccggacctgaccatcgtacctacgggcgcgatgaccaccatggccaccgtattccgcaacgctccggacctgaaggattccggcgtgaacgtgacgttgatgggcggtgcgttgacgctgcccggcaatgtaagcccggccgccgaagcgaacatctcccaagacccagagtcagcagactatctgttcaagtgtggcgcacgcaccaccatgatcggcctcgacgtgacccaccagaccgcgctcacccgtgagaa

SEQ ID NO: 2914 - DNA, 35937 bp, Unknown
  R19_24m  MAG No. k141_1280
agcggagtgcggttcaccatccagccgacatcatcggcatcatgccgcagcgggtcaacgtatcggccagcgcatcgtccagtgcttggatcggtcatagcaacgacgccaccgaacgacgatggacagtatggcgcctatcgccagagctgacacggccagaaccgaggcaagcgacacatcgccacccgtgacgggcagtgacgggcgagtgttgggcgtggttgcctccgccggcgccggtggcgtctcgggtttctccggttcgcacggtttctccggctcgcatgggggcaacacccgcacacgctcccaggcatcgtcataccggctggacgccggggaaacacggtcatccccctcgaaccgccaaacgaacacgtaccacccatgccgttcggcggtcagatgcatgggagcgccatgcgcgtccaacgccccggcgccgattttgaacgtgccgttcatcgcgggaatctcccaggtggccagcagtcggtggttgtcgtcttccgtgggagtctctcccccggatggcttgtacgcctcatcgttggaggggttgtcgggatcgccggaccaccatacgctcaccgtcgcatacggctgatccgccgcgaaaccataggtttcatcgcccatgaactggccgtggtccgccgggaaccccgatacggtgatggtgtcgctgagttcggcgccgatatccgccgaatgttcggtaaccgtcgacatgacttcgaccttcccgcgccccacgttgctttccgaagcctccatgaacgggctcacccagtcgccggtaaggtattcctgcgcccgtttgctttgctcgctccgccggaacacccacacccaggtgccaaagccgccggtcttcggagtcagataggcggcgtcaccgtccggcttggccatggcccgcacacgaacccgctgccccacaccggtgaaggacgccttgccataagcactcggctcataacccgaggacgccagccgggcgagaaaagcgtccgcgctctcccgtgcgttcggcgcgatgaccttgcccagatcgtccttgccgagcccgtcgaaatagtatccacgcgcctgcagcttcagaccgggcacccaatgactgccctcgtcccccacgccgctggtcacatcatcgaacaccggcgaagccgcatcaagcaccttatcggacacctgcgtggacaccgacggaacgaaatccttgcgcacctggaacgtcgacgacgaaccgccggcggaagccatcgaatcgaaggccagcatgtcctgagtgctgtccatgacgtgcatccgcccatactcgtatgtggtgttcgccgtcacctcgccggcgccggtcgcctcccacgcgatcgaggatccggcgctcgtcgacacccccgagaacgtgttgccgccttggatgaaccgcgccggcccctgcaaggtgacggtgaacggcactcccgcgatcgcgtcaccgtcgcggttcaccactttcaccgagatggaaccgctgcgcaaagcctcggcatcggtgcgttccaccgtcgtgcccgcaggcgtcttgccggccgattgatcccatatccgggccgccttcgccacgatctcgggataccggccttgaatgaccgccatctgtctcgcccactcgtcccgatcgcgcccgaagtgatcctgcacgatgatgccgatcgccgcatgggtggcggcatccgtgtcgcggtaccggtcaaggatccatgccatacgccgggcgttctcatcggaggcaagcaccgtggtggggcctatcacatagtcgctcagtttccccgcttcgatgcagtagtatttgttgcccgaagcgtccagccccgcgacaccgacgtaatattccatatcgttgtatggaaacgtcacgtgatatctttcgtcggcgggcgtcaacgtcgcggcatacgccgtattcgccgagccgaacaccactcccaccattattatcagaccggtcagcatcgctacgatggccatgccccgttgccgccatgtcgttatcatcattcgtcctttcctggtacgttccccgcatactgcactgtgtgcgggtaggccacgatcatggcagattttcattcgctacagccgatttttcggcctatgtggtccgagcttgccgtttgtcggcgagttgtggataactcttccgccgagttatccacctcatgcggttgaccgaacgtttacctgcaagttatccacaatgtgcaacatatgttcaaaagcctctagaatagggccttatggcagcagtacaacatcgcgcgaccacgcgcactagtaataccgataacaacaccacgaagacgaagtcaaagacgacttctgcccgaaagagccccgcaaccaagcgcaagagagtcagcgccgaaacggcacgcgccgcagcagcgctgaaaggcctggctgtcgaagcccccgcaccgtccatcgaagcaaacgagcccggccagttcggccgcatcaatgtcatggacatcactcccaccgaggagcgtggcatcttccccgcccgtgtggaactcggcgaaccgtttgagatgaccgcccaagtgttcatcgaaggccgtaccaaggtgggtgccaccgccatcgtgcgcaacccgcgcggcaaggaaaccatgcgccgggccatgacctgcgtaaatcccggcctcgatcgttggaccgtgatggtcaagtgcggcgaacacagcgatctgaagccttgggaggatggctacgcggccgtcaagcgtcagctcggcgaatggaccgtgaccatcgaaggttgggaagacacgtacgtctcctggctgcatgacgcccgtatcaaggtgcgtgtgatggacgacgtggacaacgcgctcaattccggcgccgagctgctggcccgttgggccgcaaccccggacgccggcctgaccgcacgcgatcgcaagaccttggagaaggccgctgagaccatggccgatcagacgctgagcgccgaggatcgcctcgccgccggcgacaaccctaccatcgccgccctgcacgagactcacccgctgcgcgatggcatctcccccagccagccccagcgtttcaaggtggaacgcccgaagtccagcttcgcggcttggtaccagttcttcccacgttccgaaggcgccaccatcgatccgaacaccggcaagatcattcagggtacgctgaagacctcgatggccggcctcgaacgcgccgctgccgaaggcttcgacatcgtctatctgccgccggtcttcccgattggcgtgaccaaccgcaagggccgcaacaacacgctggtcgccggccccgatgacccgggctcgccgttcggcatcggctccgagctgggcggccacgacaccgtggatccgctgctcggcaccatggacgatttcaaggccctgtgccagcgtgcacatgaactgggtctggaaatcgcgcttgatttcgcactgcagtgctcgcccgatcacccgtgggtcaaggcccacccgaactggttccgtcacaagccagacggctccatcgccttcgccgagaacccgccgaagaagtatcaggacatctacccgatcgacttcaacgccgacatgcccggcatcgaaaaagaagtcgaacgcatcatgaatctgtggatcgaggcgggcgtcaccatcttccgcatcgataacccgcacaccaagccggtgcgtttctggcaggacgtgattgccgccgtgaccaagaagcacccggagatcctgttcctggctgaggcattcacccgcccgggcatgatgcgtgccctgagctacgtgggcttcacccagtcccactgctacttcccgtggcgcaacaccaaggacgaactggaagagtatctgccgatcaccaatggcgacgacggctactaccagcacaacaccttctggcccaccacgccggatattctcaccgcttacgtgcgagacaacggcgtagccggccactgcgtgcgtgcggtgctggcagccatgggctcgccgtcctggggtatctacaacggttacgaactcatcgagaacaagcagcgccccggcttcgaagagcagatcgacaacgagaagtacgaggtcaaggttcgcgattggagcaaggccaagcagtacggcgtggccgagatgctcaccgcgctcaacaagattcgtcgcgcccacccggccgcgttgagctatcacaacctcaccgtgctgcctacgtccgacccgaatattctggctttcgcacgccacacgccggccgaactgaccggtaccggccaagcggacacgctgattgtggtcgtgaacctcgatggacacaacgcacaccagtcgatgattcacctggaactcggcgagctgggtctgcccaccgaccgcccgctcaacgtgcgcgacgagctgaccggccgcgaattccagtggggttgggacaactacgtgtctctggcgccttgggcggatgtggcccacatcctgtccgtgcagtgatgcggtagtgcaacggtaatgcaacagtgatgccgttgacgtgcatgggtttatcgtgtgcgtaaaccgctagaaatcctccccttgaggggaggatttcgtctgtttagacatagtgtcggcataatctcagcacggtttcttgagttccgcacctgttttgcaggcgcaaacagggtattgtggtgagacgataacgtaactgtcgattttcaaggagaaatgacatggcagaaaccttcaacgtcgttgtggaaattccgcgcggctccaagaacaagtacgaagtcgatcacgagaccggtcgcgtcttcctggaccgtaccctgttcaccgcaatgggttacccggatgactacggctacatcgacggaaccctgggcgaggacggcgatccgctggacgctctcgtgatgattccgaactccgtgttcccgggctgcgtggtcgagtgccgcgccgtgggcctgtaccacatggtcgacgaggccggcggcgacgacaaggtgctgtgcgtgcccgccgacgttcgtttcgatgacatcaaggacatcgacgacgtcaacgagtaccacaaggctgaaatcaagcacttcttcgagcagtacaaggctctggagccgggcaaggaagtcctgccgggcgactactggaccggtgctgacgccgccgagaaggaaatcatcgcggcacgcgaacgcctcgccaacgaaggcaagtgattcgattccgaatcgtcggcgggagacctctccggaggcctcccgcctttttgattcgacgtgcatcgcgtgatatagtgctggtgtatttttcagctaggcgtaggcggcgtgtaggaacgctggtcgaggcccatcgcacggtaatccggcgatgaaccttctgtcgcaccatgattccgataatcattcaaatcctgcttatttctgtttccgtagctatggatgcattcgccgtatccattggcaaaggtctgaccgtatcccgcgtacgagtgcaagacgccgcgaaaagcgccctctggctcggcggattccagatgctgttccccattctcggctatttcgcggcatctacattcagcaaatacgtaacccgattcgatcattggatcatcttcgccctgttggtgttcatcggcggtaacatggttcacgaagccttcgaagaagatgaggaaaactccaaggagaccgcccagttcgattggaagcatatgcttcccctggccgtggcctgcagcatcgatgcgttcgccgtgggcgtgagcctgaccttcatgttcaccaaagcccatatggcattcgccatcctcagcatcggtgtggtcaccggactgttctccgctgcgggcctgtacattggccgcgcgttcggctcccgctggcaggagccggcgcagatcgccggcggcgtggtgctgattctacttggcgtcaaagtgctgttggagcatttgggcgttatctcgttctgatttagtgtcataagccccttcaccagaaagggctattttgtttgatttcaccgttccaatgcccgacgtaggattgggatggaaattcgattatctgagaggcgtatcatgaccgagatcacccaggagggttggaagaacaaagccctgagcatgttgttggcccaactgacgtcctatgtactgctcatcgcagccacggtcattccctcccctggcaccgtccccatcatccctttgattatcgccgctctgacgttggccgcatttgtcgtgttctggccgttccgcggcagcatgctggatcgtatcgtcactttggtgtttggcgcgatttctctgattttcgtcatcgtacctttcccgaccggcaaggttccgccggatcagaccgctgcggatggctcggtacttccttggtattcatgggcactggccatgggcctgctgctggtggtgctggtggtcttctccttcgggcgccagatggctcgtgagaagcgcgaacatcttatccgcgcactctctcacgccgtgacttcaggtgtggcggctctcgccgtggccggctggtgcttcctgcctgatttgggcgcgatgcttgccaagggcaccgttgcgggaaccgttgccctgatcatcctcatcgttttgggactggccttggccgtggcctccacgttgtgggtgcgtgacgccgatccggacccggatatccgctatccgtggatcggtaccggtctgatgccggtaatgctgatgggcgtgaccatcgccgcaaccgcactggtgctcggccgtgtcatcggttgatggacgtctgccgttccatattccgcaaacttgtaacctatgtgtccactacaagcgcgtagaataatgaaaaaccgcgcgaaagcggcataacgccgctgacgactcgtacagccacaccaagcaattgcgtaacacattgcaggataaagggggattagcgtgacggatcttacgttgatgactttcgccagcgaccccgccaccgttttgccatcactcgccctgctttctcatcgcgtccgcgtgctgccgatggatgcagccagcttggtgaagatgccggagaacaccattctgtttctggatgcacgcgatgatctggcgaccgccaaaaccttgtgccgtctcatccacgcttccggcctgtccacgccaatcgtgctggtgctgaccgaaggcggcttcaccgtggtcaactcccagtggggcattgcggatgtggtggtcgccaccgcttccccggctgaagtcgagggccgattgcgattggtctccgagcgcggcaacgctcccgcagccgcagcagccggttctcccgccgaatccaccaccacggtggaagatggccagattcgctccggcgacctcattgtggacaccaacggctataccgcctccctgcatggacgccccatcgatctggcatacaaggagttcgaactcctcaagtacttggtccagcaccccggccgcgtgttcacgcgcgcccagttgctgcaggaagtatggggctacgactactacggtggcacccgtacggtcgacgtgcatatccgtcgtctgcgcgccaagcttggcggcgaatacgaacacctcatcggcaccgtgcgcaacgtgggctaccgattcgacccgccggagacggataaggaaactgccgccgcacagcaggccgccaaagcatcctctgccgccatcggcaccgatgacgatacccccgatctcaacaccgccgcctgacagaccagcagcgctacaaaccatcaatcatcgacattacgccgcttaggtccatacgatgagagaaaccaaatccgcgcgtctcacgcgcatgcatgacgaatacgacattctgcgccaggtgattccggcacccgcttgcgcactgcatttctcgaatccgctcgaattgctgatcgccaccgtactcagcgcccagaccaccgacaagcgtgtcaacacggtcaccccggaactgttcgccacctaccccaccgcccgtgacttggcggccgcgaacccggcccaagtcgaagacatcattcatctgctggggttctaccgttcgaaaacccagcatctcatcggactggccacggcactggacgaacggttcggcggcgtggtgccgcgcacgatggatgaactgaccagcttgccgggggtcggccgcaaaaccgcgaacgtcgtgctcggcaacgcgttcgatatccccggattcccggtcgatacgcatgtgatgcgcgtaaccggacgactgcgttggcggtcggattggcggtccgcacaccctgatcccgtgaaaatcgagaaggaaatcaccgcctgttttccgcccgaagagtggacgaatctcagccaccgactgattttgttcggccgggccacctgccacgcacgtacccccgactgcgccaactgcccgctgtccgacacctgccctagctatgcgccgcccgccggcaagagcacgtccaagcgctaactcatacctcatcatggtgaattgcggattctaggctgaatccaccgctagactgaaaaccatgcagcacagcaagcggaacaatacatggtccaagtgggggatttttctcggagtcgccgtggcactcggcgcactcgtggttgcgggatggacgttcatgcaaaaccggttccagccgggatcatccctcgatgccgatgtgaccattggcatcgacgatatgccgcaatccttggatattcggtccgattcctctgcggcagccgagcgcctgctcgtcgacaatgtgtatgagacattagtgaccgtcgatcaagacaacaagattcagccgggactggcgacaagctggaagacttccgatgacggactgaccgtcaccctgacactgcaatcgggcgtcaccttctcgaacggtcatacgttggacgcctcggacgccgtgtggtcgttgcaacagaacgtgaccaacaaggtggcggacgtcgacgaattgggcgatctgacgtcggtcgccaatccgaacgccaccacggtggtcattacgcttgccaagcccaatccgacgctgctgcgagcgctgtccggcaaactcggcattgtctacgattccgagtcgtccagtgccgattatcaacgcaaggccataggttccggaccattcaccgtggccgatttccagcctggccattccctgaagctggcgcgcagcgatacctaccatggcaccaaagcggccagcaatatcgttgaatttatgcaatactccgacgccgatgcgctcagcaaggccctgaccgacggcagtctcgatatggcggcaccggtttcggcttcgacggccaccggtttgaacggcaaggatggcttgaccgtcaaggagggggccactacggataaggtgctgctggcctacaacaacggcatcgattcgctgctctccgacgaacaggcgcgtaaagccttccgctatcaaatcgacgcagccggcatcgcctccgcccaacccgacgcagccggagcattgggcggccccatcagcccgctggaacccggatacgaagatttgaccggactgtatccgcatgacgaaaaccaagctgggcagatgttctcctacttcggtgcgcaatatctgactacggtgaatctggtggttcccgaagaataccggtcgttggccgaaaccatcaagcagcagatcgagcggcagccgcgccccacggtgaaccttgaagtgctctccgatgaggattatgccaaacgaatcaaggacggcaaatgggaactgaccgtgatgagcatggacggcacggatgatgccggcatattcgccgaccccgattccatgttccattacgaccataccgaagcgcaacaggcctatgcggatgctcgcgccgccactaatgacgccgattatgaggcacgaatgaaggcgtacgcccggctgatcagcgaggatgcggccagtgattggctgtatacccgcaaatgcttcactgtggcgtccaccaaggtctccggctacccgacctcgatgatcaatcgtcgcatgccgctggccgggttgacggtgaagtaggcaaccttcagtcacggacgggctacgcccgatagtccttggctcactatcgttcgatcgttcgtatctcgcctgcgaacagcctactgggctgtttactgtacagttcggcttgtcatgcaacgtgcataaactttggctttatgactgaaggcaaatccatcatcaacgccaacctcaccccgctgcccgacaaggtcggtgtggacggacttgaggacaagtggcgcgccgtctgggatgaagacggcacctacaaattccgcaatacccgcgaccgcaaggccgtctactccatcgacaccccgccgcccaccgtctccggttcgctgcacgtgggtcacgtgttctcctacacgcacaccgatgtgattgcgcgttacaagcgcatgcgcggctacgacgtgttctacccgatgggctgggacgacaacggcctgcccaccgagcgccgcgtgcagaactactacggcgtgcgcgtggacgtgtccctcccctacgacccggacttcaagccgccgttcgagggcaccgatggcaagaagatcgacgccaaggatcaggtgccgatttcccgcaagaacttcatcgagctgtgcgagcgtctgactgctcaggatgagaagctgttcgaggccctgtggcgcaagctgggcctgtccatcgactggtcgcagacctaccacaccatcggccagcacccgcggcgcgtggctcagaaggccttcctgcgcaacctcgctcgtggcgaggcctaccagcaggacgcccccggcctgtgggacgtgaccttccagaccgcagtggctcaggccgagcttgagtcccgcgaatacccgggcttctaccacaaggtggctttccgctttgaggacggcaccccgatctacatcgagaccacccgccccgagctgctggccgcttgcacctcgctgatcgccaacccgaatgacgaacgttacaagcagtacttcggccaggaagtctactccccgctgttcaaggtcaaggtgccgattctggctcacccggccgccgaaatggacaagggtgccggcatcgccatgtgctgtacgttcggtgatgtgaccgacgttgagtggtggcgcgatctgaagctgcccacccgcccgatcattcagcgcaacggccgtatcgtgatggacaccccggattggatcaccgacccggccggccgtgaggtctttgccgaaaccgctggcaagaccacgttctccgcccgcaagatcatcgtcgacaagctgcgcgagtccggcgatctggacggcgagccgaccccgaccaagcgtatgacgaacttctacgagaagggcgacaagccgctcgagatcgtcacctcccgccagtggtatttgaagaacggcggtaccgacgccaagctgaacgccgagcttatcgagcgcggcaaggaactcgagttccaccccgacttcatgcgcgtgcgctacgagaactgggtgcacggcctgaacggcgactggctgatttcccgccagcgcttcttcggtgtaccgttcccgctgtggtacccggtgaacgcttccggcgagccggattacgatcgcccgatcaccccgagcgaggatcgtctgccgatcgacccgaccatcgatgtgccggaaggctacgacgagtcccagcgtgatgtgcccggcggcttcaccgccgaaaaggacatcatggacacctgggccacctcttcggtgaccccgcagatcgtgacccactgggccgagccggacgaggcctccaaggccctgttcgcttccaccttcccgatggaccttcgcccgcagggtcaggacatcatccgcacctggctgttctcgactgtggaccgcgcgcacttggagaacaagtgtctgccgtgggcccatgccacgctgtccggctggattctggaccccgaccacaagaagatgtcgaagtccaagggcaacgtcgtggtgccgaacgagccgatcgagaagttcggcgcggacgccgtgcgttactgggccgccgccgctcgcctgggcctcgatgccacgtacgacatcggccagatgaagattggccgtcgactggccatcaagctgctgaacgccaccaagttcgcgctggccatcggccgtgaggacgagaaccatcacgtgggcgctgccgccgagacctcgtggaacccggccgatgtgaccgaaccgctggatcgcgccgctatggccaagctggctttggtggtgcgtcaggccaccgaggcgctggaatcctacgagcattccaaggcgctggaagtcatcgaatcctacttctggcagttctgcgacgactacatcgagctggtcaagaaccgcgcctatggcactccggacgagcacggcaatgtgccgtccgagaaggctgtgaagtccgcccgcaccgctctgggtctgggcttggacgccttcgcacgtctgctggccccgtacctgccgtacgccaccgaggaagtgtggagctggatgcacgccggttccggttccgtgcatcgcgccgcctggccggtcgtggacccgtatgtcgaggccgccaccggtgcttcccccgagctgctgacttgggccggcaaggccgtggagcagctgcgtaagatcaagtccgaggccaaggtctccatgaagaccccaatcctgtctgtggcactgtccgctgcttcggaaggtgtgaacgcgattcacgccgccttgggcgatatcgcgcaggccggtcgcgtggtcggcaagttcgacttggtggccaagcacgccgaggaatccgccgccgaagacgcgcccgaaaccgaggtcgccgtcgaagccagcgagctcggtgagccgccagccaagaagccaaagcactgagcgttgcgcacaacaacagtaggtctcacggcaatgccgctcgttccgagcctacgggaagcccaccgggcttcccgcttaacggctcggccagccaagaagccaaagcactgagcgttgcgcacaacaacaaaagaggggaacctcctattgaggttcccctcttttgttttttgacgttcggatgacacgactgtgggacggcacgcaaatatcccgcattgtaagctggcggcccacaatagcgtgggccaccacgcgtgtcaaacgttttatatacgcggcgtcccacagaccgaatcaacaaatccttggaatttagccattcttcaaactatagttagctctgacttacaagagggtgtgggacgccgcatcgaaaaagccagtttttgatgcggcgtcccacaccgataacgcactttacgcgtattgggcacctgtcgcatgcggattttcccgcatacaccatcacaccgtcggaatcacgatgaggtatcgggtttcggcggttttttgttgcgtattggggctatcgagctgcgcgacggcctgcgccaagagcgtgccagcatcgctgatctccacggtctcattgatcagcgcgctcatgtcatgcttgagcagcgtgccgccagtgccaaagccgaacagtactggagcggtgtcaagattgttgccggaatcgccagtatcgctcgacttggctgagtcgttcgttcccgaaccatcgctcttggacgaatcgaacttacctccaccaccgatggccgaagtaagaccacccgcatagttcatcacatcgccagcagacatggacatggtgtcatcgaccagtgaggccttggaatgctgcgactgctgctgttgcgcggctttggcctgcttacgggcggcatcggccttacgcttggcttgggaggcccgggtcttgccgtagaacgattgcgattgcgaatcgaccaggccagtcagtgcctgagcctcggtcaccggaccggaagagacatcaccggacgagccatcgccatcgctgccggaagccgaggacgcgactccttcgaactgatcggagaatcgcaatacaatctggcgcaaggccgtggctttgcccgtatgctcggaggcggtggcaagcgtgctcatcgcggcatcgaccttggattgagcgtcggcgagttcatcgctaccgttggtttcggcgatggcttggctctcgtaagcggtggcgcccgaagacgtgccgccggtcagggcgctcaaattggccgtgtagacgtccgtgtatttcatcgaatacggaatcattgcggcggagagctggctctggccatcggcgtattgcttggagcctcgagtggcttcctccgaagcctcggcggtcagatcatccaccagtccggtggtgccttgctgctggatgcggcgaatcacctcatccaacgcatcgaccgcaccggcatgctgatgtgcggcactgacgttgttcaccgcgttggccaagtcgagtacggcttgcgccaaaggcgtatccccggacagttcgccggccgtgcccatcaacgccggcaactgggtggaggtaccaatcgatccagacaggtgcgtggtatatgagcccacatacgcggccatatagtcttcaaacgtccgcttatgggcggtttcgcgttcggccactacggacttgtccagcgcacgctcattatcgcgcagggtttgaagctgctcgatgagctgttgatgctccccggaaccggcgtcggtcagtgaatcgaccagtatggcggcagaggcgacgagttgggcgacatccgtatcggcagcaggctgtgcggcggcattcgcggcatcgggattagcaccaaccaccggactgctggaattggaaggcaatacggcgagcgccacggaactcatggagaagtctttggcgttcatatagcagctgaattccaagccggttgcggcttttccagctgcggcgactacggtattggaaccttgcgtggttaccgtaatggagttgtcagcggaaacatcatcggctacctgcgtaggcacggtaaaggcgacaaccgggatcgtacggttggcctccttggtttgcggcttaatatcgatatacacgccgatcagtccagatgcgccggcaacctcgtttgcctcgacgtttggaccgtcaagcgagtaggtgacgctgactttccatggcagggtggcggcggaagcggggatacgagaaaccttggacgtgccggaatcactattggcggaatcggtatcagtggaaccgctattgccggaatcggcactggcgccattgccggcaccgcccttccctaccacataccaacggaccggctccccttcggcatcggcgacggcgtacatatcacttgccgtagcgagcaccggaccgtaatcaaccggagtcggacgagacatccaagcaccgccgagaatcgaagccacgcacaatgcgcaactgaccagtgcggcaccacatctcatctacgtatcccattcatacagtcggccactatgggcattccattcccgtattaatgtagtcgctgccggcaacttgccctatagacgaatatccgaaaggtgcccattcgctgcgggcgaatcaggcgaatacgtcgagtacgcccgggtcaccaccggcatcggcgatgcgctggtggcgcttcttggcttcggtaaccacgaattcacggtacatttcggcaatttccggatcaagcccggcatcgatggcgatgcggtggaggcgttcgatctgatagtcctcacgcttggtgtcttcgggcgcgaatccggcgttggctttgagcacgccgacctgcgaggtggccttgaaccgctcggccagtaatgcgatggccgccgaatcgatgttatcgatggtttggcgcagcgttttgatgcgcgccaccgcttgtgcggtttccgggtgggccgccgcctgggcggagtcgatggtggtcctttgccagccgctgctcgtttcgctcatagattcgaggatactcccgattgcggctttgcacgatgcgcaaagtcagatatctcagatgtcatagtcgccgtaggggatatggctggcatccgcatcgccgaacatggccgcaccattgcccactcccaaaacaatcgaacccattgatacatctttcatctcatatatcgtcagcgtgcatgtgaacgttgacggcaatactacaactgcaatgtgatagttgatgtatttgcatcatatacggcaagggctgcgccccgtatcaatcggggtgcagcccttacactattgttcagcggtctggtcagttgccgttgaccgcgttgccggtgttggcctgctgcacgatggcggcgaggaagtcgcggttggtggcggtcttcttgaggcgcggcaccaacgtctggtaggcctgctcgggctccatgccgcccagcagtcgacgcagacggtagataatcggcagttcctgcgggttggtgatgagctcctcgcggcgggtgccggaagcgttgatgtcgatggccgggaacagtcgcttgtccgccagctcgcgggacaggcgcagttccatgttgccggtgcccttgaactcctcgaaaatcacctcgtccatcttggagccggtttccaccagcgcagaggagatgatggtcagggagccgccgttttcgatgttgcgggccgcgccgaagaacttcttcggcgggtagagggcctgcgcgtccacaccaccggacaggatgcggccggaggcgggggcggcgatgttgtaagcgcgagccagtcgggtcatggaatcgagcagtacgaccacgtcctggccgagctccacaagacgcttggcgcgttcgatggccagttcggcaaccgtggtgtgatcggaggccggacggtcgaaggtggaggagatgacctcgccctggaccgtgcgctccatatcggtgacctcttcggggcgctcgtccacgagcaccaccataaggtggacctcggggttgttggcggcgatggagttggcgatgttctgcagggtgatggtcttaccggccttcggcggggagacaatcagaccacgctggcccttgccgatcggggaaacgatgtccatgatacggccggtgagcttgttcggggcggtttcctgcttcaaacgctcctgcgggtacagcggcgtgagcttggagaactgcggacggttgagcgcttcttcaacgctttggccgttgatggaatcgatggcctgcagtggcacgaacttctggcgttggttgcgacgatcgccttcgcgcggggcgcgaatcgaaccatggacggcatcgcccttgcgcaggccgtacttcttgacctggcccatggaaacgtacacgtcgttcgggccgggcaggtagccggaagtgcgcacaaaagcgtaggagtcgagcacatcgacgatgccggccaccggcaccagatcctcctgcggctcttcgcggcggctatcacggtcattgcgatcgctacgattatcgcgatcatcatagcgacgatcatcatcggcgttgtcgcgatcacggccacgcatgcggcggttacggcgatcgttgcgatcattacggttatcgcgatcgttgcgatcgctacggtcgcggcggttacgacgcacaaactcgtgatcgtcgttctgctcgccgtcttcggacgtttcctcgtgcttctgcgtgggcagcgtggccaggatatcgtcgaggtcacgcacggtttcttcgctgttttccgcagtgcgacgacggcggcgaggctgctcgtcctcatcatcacggactcggcgaatcagcggaacttccacgtcctcatggcgctcgcggcgacgctcggtaggcgctgcatctcccaaatcgagcgtggccagcagatcgccggcctcatcggccttcttgcgcggcttgcggcgagcgaaatcggactggtcgtcatcgcgacgatggcgggccgcacgcggttcggatgcggcatcatcggcggccttacgacgggtgcgtcgcggttcggtctcgtccttcttgacatcgtcggccacgggaagcggcaaatcgagctgcggttccgtggcggccggagccggagccggcgactgggtggccacgtcagcattgtctgtggtattggcctcagcggcatcggactgcggagccttgacgaccttggcggttttggcggccttgggagcgcgcacggtcacaccggccggcggctctccaccattgcgcgccgcctgcagggtggcgagcagctcgggcttgcgcatggtcgacgtgccgcgcaggcccatctgtttagcgagctctttgagctcaggcagcttcatatcctcaagattctggctatttgccactggttgccctttccataccgaacagacccatgcctatccaggcgttaagagtgattattgcggttgcaccgctcatgaatgttcgctgcgtctctgagttttcacgaacttcgtttactgtacaacgccaactcgaccaacgcaaaacggcccgccgaaaaccaaaaaagctccctctgtgacgagggagctcaacaaggtttattcacttttcttcgtggtaggacttttcggtgttgacggaccacacgttcttcttggacgtcttgccggtcttgatgttgccgacggcctccatggcggtggccatggagtggtccatgttgttgtagcggtgctggccgttgcggcccacgcagtagaggttgccgaagccgtcgaggtactcgatgagctcgtccatgtgctcgtaggtgtcgaagtaggcggggtacgccttcttgacgcgctcacgatgggagtcgatgacctcgtccgggccgttgatcacacgcatgcgggtgagctcggagatcgcgaacttggtgacgtcctcctcgctcatgttccagaacgagtcgccctcctcgcagaagtactcgaggccgacccacacggtgtcgtccacgttcttgaccaggtacggactccagttgttgaagatctgcagacggccgaccttgtagcccgggtcctgcacgtagatccagcagtccggcacgatcggcggattgccgagggtggggatgttggtggtgttcttgagcttcaggtgcttgaccagcaggcccacggtcacgaagtcgcggtacggcaggccgttggccacctcggtcatatcggccggggcgggcttggaatcagcggcctcgggatcgtcgccggccgcgtcgatggcgttgaccaggtccttgaccggcatcgaggagatgaactggtcgccggaaagctcggtgcggttgccctcggaatcctcgtacaccacggaagacacggcgccatcggtctggcggacctcgaccaccctggcgtcggtcagcaccttgacgccggcggcctcgcaattggactcgacggtctcccacagctggccgggaccgtacttcggataccagaactcctcgatcagcgaggtctcgacctccgcgttggagcgcttcctggggctaagcttctggaaggcgttcttgagcacgcccatgatggacaggcccttgacgcgctgggcgccccagtcggcggagatctgggaggggtggcggccccacagcttctccgtgtagccctcgaagaacatcgaatacagcttgcggccgaaacgattgatgtagaagttctccaggttgtcttccggcagcttgtggaacatggacttcaggtagctgaagccggccaccatggtgagcttgaagcccatggccttcaacgtgttggggctcagcgaaatcgggtaatcgaagaagtggcggttccagaagatacgggacacgcggtggcgcttgagcatcaccttgtcctccgtctccggatcggggccgcccggctccatgtcgtggtcgcggccgagcttcttgtcatcataggagggtgcgccctgcaacggcagaacggtcttccaccaatccatgatgcgttcgtctttggagaagaaacggtggccgccgatatccatgcggttgccgttgtgcttcacggtgcgcgagataccgccgaattcgcgggtcccctccagcacggtcacgtcatagttttccgcgccgccgtccttgatgagttcccatgcggcggtaagtccagccggaccgccgccgataatcactacggattgcttgtcggtcattatgctccttataaacgcaaaatcagagacagtttactagaagccccggaatcgcacaccgaaagatgagcgaatgcttacagaattctcccgatatacgaccgatgcgccgtcttccatcagcagaaaggcgacgcatccaatcgtgaggtaggggtattcggcaacgctgcgtcacgcacagcgcggcgaatccggtttggtcttgggctaattcgtcagcgacgaaccttccatagattcagcgagattcctgcaagtgcaagcagcatcataatccccgtaataccagtaacggcaacaccggtacgactcaactcgttttccgtaccattagcctgagtgttactgggctgatgagttcccacaccattgttattcggagtggtactcgttccttcgccagtgttaggtcctgcgcccggctgcgttgtggaatcatcagtcagacgcgcatcgtcgcctagggtttggtggctggaagccaagcaacttttgagctcagtgagcttataccacgtggaaccatcggcaatcggcgtgcactcggagcggaaagcgatttcctgctcgttgtagagcatacgaacgagcggcgtgtaggcacggccggtcttcgggtcgttgccggatttgacggcaacatcccactgcacattggcagccatcggagtcaccgattcaccacgccattcattgttggcgtaggtgtacacgtcggtggtgctggcggccgcctgctgggtggaaccgggaaggccaagcagcgcggcgaacggcatcatcgtttcggcgtgggcaaagcggaaagtagcaacggtggatccgccgtttacgcgctcatcaatcgacgaaaagaaatcgtcaagcagcggctgtgcgattgtgtaggtctcgtcttggccggcatagctcgggcccttctcatagaagtcctcggcgtcaagcgcccaggcgaacaacttggcgtcgtctgcctgctcaccttggaagtactggttgaagtcgaaggtatggctgccgatgttctcgttctccatatcagcggcgatgatgtacaggttgcacagatccatcgcggcatcgtattcggaggcgatcttcttcttggcttcgccgcaggcgtcggcatccttgctggggtcggctcccggcgcgcagttggcctcgccgcccttggtgccatcggcagtgttgtaccaagtgtatgtgccgtcggccagtttggcgaggaagtcgtcggtgaagatctgcgcaagcaggtcgtgcgaggccgttttcacgtcgccgttctcggcgatggtcttttccgcgcccgcgatggtctcgtcgttctcgacgaagttctggtagttgtcggcgagctgtttggcctcgccggttttctcggtgccgtccgggttctcggacttgtgggaatacagcgtattcggcgttttgtcgaaggccgccgcctcaccggtgccggcagggtcggcgggcgttacggtgctgttcgccagctcattgttcgaggccgcgttgaagccgcgtgcgaagttttcgccggactcggtggcgcgggcttcgccagaggactgataggcaatcttgccaccgtccttggctgcgttgtcgaacagcgtcttgttgcgctcgtaggcacgtgcgccaatgccctgatgttggtcagcaccctgaccggtgagcataccgtagccattctccacatttgcggcggtgatggctttgagattcttcatgaattcggacttgatggcatcagacttaaaaccgttatccgcttcggcggcttcggccatcttcgcaagcaatgcgtcgtatttgtagctggacaggccgcgtgaaccgtggcgagccatcgactcggtgtataccgtttcgtagccttccggtgcctggctatagctggcagtggtcgcttcgctaggggccacatatggctgcttgctgctgtaatactggccatcggcctccaaagccatggcgtgcggaacggtcagaatgccaccggccagcaatgtggtggcaacaaccacgcctgcaatggagcccttaatgccctgctgcatatggtgtgtattcatgcagcatcttctatcaaccgcaagcaaacaagacacacgatggcaaggttacgaatctgaacttttgctatgcgttgtatgaacaatgcgcgacgccccgccgtaagatgacggaatgccgcgcattgtcaatacaggctgtatcagacgattgcctgtcagtgaatatcgtcgggaatgtcgatatcggttttctggacttcctcgacgttcacgtccttgaaggtcacgatgcgcacggacttgacgaaacggctggaacggtagacatcccatacccatgcgtcagtcagctgcacatcgaaatacacgtcctgaccagcggaacgcacgttgaaatcgaccttattcgccaagtagaagcgacgctcagtctccaccacataggtgaacagcttgatgacgtcacgatattccctatacagcgcgagttcggcgtcggtttcgtaattgtcgagatcctcggcactcatgcttgtttactcactcactttccgtatcgcgtttgcggccgcggcccagcgtacgccaccatgcttcctttgagggcttgcgttccgcctggccgtacggccagttgctttcctcttcgagactgtggcgcgtgttcttctgcgtatcatcgtggtgcccggcctgtggctcgactggctgtgcggccgccggcgtctgggcctgggactgcacgtcactcgtcgtgacggcggctgcctcaccacgctgtgccggctcgggttccggcttgttctgctggatggcgatggaatgctcacgcgcggacagcgcttccttgacacccgggttgtcctcaatcaagtgcatgccaaaagcgtcaagcgaacgaatcggatcgtactcgtcgaccaacgtgtccatgacgataaggtcctggtatttgttgttttcgacatcccacaacgcgtcgcgcgaggtgccggacggcacgaagccgagcgactggtagaccgaaatcgaacggctgttcttttccggcacgctcacccagatgcggtgcatgcccaggccggccggttcgggcgcaaagccgtaagtcatcacacgcggcatggcgtcacgggagtagccgcggccacggtactcacggcccaagatgatctggatgcgggcggacttggaccagccgtcgatgtcgataaggaaaatcatgccgatgacattatcggtgctggccgcatcgagctgaccgtcatcgtcatggtcggcgtcagtcaatacggcccatgcgatggtacggcgggattccgggtcgcccacgccggattcggcgggtgcctgaccggcttcccaggcttgggagcggcggacccatgtgtgtacgatggcgcgttcggtgaccgcatccttgccggtgatcttggatgcgccatagaaggcatcaagttcatccaaacgagccaggtcctcgacggtggcggggcgcaggtgcaccatttcgccacggattggcggaatgacgatgctctgtggcagatcgcgcttcagttgcgcttcggtagccatgctcagcgtctcgttggttgcggtcatcggtatacatcccccggttcggcttgtttcggctcacggtccagtgccgaacatatcttactcgactgggtgaacgctggaaatgctctgagacgactttcttacagaatcaataaaggctcccgctggcgggagctgtccaacgaatttgaactggaggatttccctacaaataagtgctcccgctggcgggagctgtccgcgaagcggactgagggtggtcatccgtacatggcgaccaccctcagtctcactccgttcgacagctcccgccagcgggagccagtgaatctaatcagcccttgatcttgcccatgacgaccttggtgacggccttggcgtcggcctgaccgcgcgtggccttcatcacggcaccgatgatcacgcccatcggcttcatgttgccgctcttgagcttctcgacgacatccgggttggattcgaacgccgcgtcgacggccgcctcgatggcaccgttgtcttcgacgatcttgtagtcgtgcttcttgacgacttcatccggagtgccttcgcccttaagcacgccttcgacggtctgcttggcgagcttgtcgttgagcttgccggaggcgatgagcttctcgacctcggccacatcggccggggtgatcggcagctcttcgagggacatacccttggcgttggcttcgcgggaaagctcgcccagccaccacttgcgggcaccggcggccttggcaccggccttgacggtttcctcaatcaggtcgagggcgtcggcgttgaggatgtcgcgcatctgcagatcgctcaggccccactcggacttgaggcggttgcggcgctcgcgcggcatttccggcatctgggccttcatctcctcgatgtgctccttggtgatgtggagcatgacgaggtcggggtccgggaagtagcggtagtcgtcggcatcggacttcagacggccgccagcggtggtctgcgaagcctcatcccagtggcgggtctcctgcagaatctccttgccgtcgtccagacgagcggcctgacggcgaatctcgtactggatggtcttctcgatgccgcggaacgagttcacgttcttggtttcggaacgggtgccgtagggggcgtccgggctcggacgcagcgagacgttcacgtcggcgcgcatgttgccctgctccatgcgggcgtgggagatgttcaacgcacgcacaatgtcgcggatggcgcgcacataggcaccggcgatttcgggagcgcggtcgcccgcgccctcgatcggcttggtgacgatctcaatcagcggcacaccggcacggttgtagtcgaccagcgagtggtcagcgccctcgatacggccgtcggcgccacccacgtgggtgttcttgccggcgtcgtcctcgatgtgggcgcgctcgatcggcacacggaacacggtgccgtcttccagttcgacgtccaggtagccattgccgttggtgggcttgtcgtactgcgagatctggtagtcacgcggcatgtccgggtagaagtagttcttgcgggcgaactggctccactcggcgatttcgcagtgcagggccaggcccagcttgatcgcgtaatcgacggcggtcttgttgatcaccggcagggagcccggcaggccaaggctcaccggggtcagctcggtgttcggctcgccgccgaactcgatgtgggccgggcagaacagcttggtgttcgtggacagctccacatgggtttccagaccgaagaccacatcgtacttcttggtggcatcggcgtacttcatcagtttttcagccatgatgttgtttctttccttccgatgctcacttgcctagaccgtcaagccacggggtcttgaggtcgttccagatcgggccgttccagctgtcttccagcgcggcttcgagggccgcagccggcttgtacatgacttcgtcgcgctgctgcggggcgatgaactggaagccgacgggcaggccgtcgtcggacaggccggccgggatggacatggcaggcacgccggcgaggttggccggaatggtggcgatgtcgttcatgtacatggccagcgggtcgtccatcttctcgccgaacttgaaggcggtggacgggctggtgggggccacgagtacgtcggccttctcgaaggcgttgtggaagtcccggatgatcagcgtgcggaccttctgggccgaaccgtaccaggcgtcgtagtagccggcggacagggcgtaggtgccgaggatgatgcggcgcttgacctcgtcgccgaagccggcttcacgggtgtaggccatcatgttggcggcggtctgcggcacgccggtcggcggcatcacgcgcaggccgtagcgcatgccatcgtaacgggccaggttggagctgacctcggacggcatgatgatgtagtaggcgcccagcgagtagccgatgtgcggaaccgagacctcaacgacctcggcacccatctccttgagcttgtcgacggcctcgttgaagcgggcctcgacgccgggctggaagccgtcgccgccgagttccttgatgaggccgaccttcatacccttcagatcgcgcttggcgccttcgcgggcggcggcgaccatcgggcgcgggccttcggggatggaggtggagtcacgcttgtcgtggccaccgatgatctcctgcagcagtgcggagtcgagcacggtgcgggagaccgggccgatctggtcgagcgaggaggccatggcgatggcaccgaaacgggagacgccgccgtaggtgggtttgacgcccacggtgccggtcagggcgccgggctggcgaatcgagccaccggtgtcggtgccgagggcgatcggtacctcgaatgcggcgactgcggaggcggagccgccaccggaaccgccgggcacgcgctcggtatcccacgggttgtgggtggtctggtaggcggagtgctcggtggaggagccctgggcgaattcgtcgaggttggtcttgccgagaatcggcatgccggcggccttgagcttttcgatgacggtggcgtcgtacggcggcacccagccttcgaggatcttggaggcggcggtggtctcaatgcccttggtgacgatcatgtccttgatggcgatcggcacaccagccagctcaggcagggcggccttgtcttcggcggacttggcgtcgaaggcgtcggcctgctcgagagccagatcgccggaaaccttcaggaaggccttgatggacggctcggcggcttcgatcaccttgaggtgggcttcgacgagctcacgagaggtgacgtcgcccttcttgatggcagcggcctgctcggcagcagacagtttgacgagagttgcggtttcgttgctcatcgattactcctcgcttcccaggattcgcggtgccacgaacatgccggcctcggtcttcgggccaccggcgagcgcctcttcctgcgtgagcggggtttcggcgacgtccgggcgcaggtaggcttccagaggaaccgggttggcggtcggcggcacatcgtcggaggcgacttcctggaccttgttgatggagtctgcgatgacgttcagttcgccctgcagacgggtgatttcctcatcggtgagcgcgattcgggccagatcgcccaaatgcacgatttcttcacgtgaaaatgttggcatggccataactatatgagccgtatgtgacacgcagttgtcgggaagcctcattttcccgcctactggagcccttcagcgaatcagaagctcaagccggtcgagcatttgccccgctgctggcttcttcggcggggcaaaaccgttgccggaccgcaagttcaccttactgagacgactcgcagcagagcagaaccgcgagctgaccgatgaaacgccccgctcagccatcccagcaaaacaaaaccgcggtccaaccaataaaacgccccgctgagacgccccgcagcgaggcaacgccacggcccaacctcaaatgtgccccactgaagtatctgcatggccaccctaataagctcacaatgagcccaaacacacctacatcgaacatatgaacgacaatcgccctgcgcacctcgccagttatccacattttgcatacccacccaaaagaatccacataatcagtccaatacggtcagatgcctgataatcaggcaaaaacacacatctaggcaccgaagctagaaccacataaccccagacagatagacaccgtgttcaccattggcataccgtcgaatcatgaaacatcacaaagcagtggacatactcatcacgaaggctgaagcaacgcaacagtgcgcttatggaacaaccaaggcacaccgctcggcgctggctcggcgcgtgcaggcgcgcgaactcaaacgtgtattccccaacatgtacgccgcttcggaatactgggattcgctgcaacccgacgaacgtatcagacatattgcacgaactcttcataacagacatccggattgggtgttcgccggggtcacggcagcggccatccacgattttgaacaccaatggcatcttcatgctggcaccatcactctcgccacaacatcacgaggccccaacgccagcagtgcaaaggtcaaacgcatcttcacgtcaagcagcacgccagaatatgccaatggactcccggtgaccagcaaagccagaacggtggtggattgcgggctgtccgtcgacttccgatttgcactgcccattatcgattcggcgctgcgcaacggcgtcgccatcacggacattctgaatgtgtgcagcactatgcgacgtgattgcacgccgatattccgcctactgcattatgccaatccggcgagtgagaatggtggcgagtcacttggacgaggcaccatcatcgcaggcggcctattagccccagaactgcaacaaaacatcaccgacccgcaaaccggtgctctgtatcgcgtggatttcctctggcggctacctgagaatcggcttatcgtgggcgaattcgatggctatgaaaaatatgtgaacccggatatgaatgaccgcaagggtgttcgtggtgcagttcaggcggagaaagaacgggagacggcactgtaccgggccaaagtcgacaccattgtccgattcacctatgaggaggtgatgcaacaacatcctttactcaataagctgcgggcagccggcatacctcatgctggaacagtgatgggagctggttaagcgcagtgaaccacggtggtcaaatccatggggtcagagtcaccagaaccatggtcactgcagaaccgccaaagccatagccatgacaaactgccaggaccatgtccgaaccggcagaactgccaaagcagtaacccgcgttatttgatatctgatatccgcttttccggtgatgatgagaccgccgatccatgcggcggcagcccaggcgatgagaatcaggccggactgccaccattcgggaatccagtagtccggtttaacggcttcggccagtatggactgcgcggagctgctgatgcctgcggcgagcaggatgccgacgatgccggcggcaaatgcgaattaatgccgcggcgatggatttggtggcgtagatcatgcctctaatgtggcccatattgggcagatgcggcaggattgtcggcgcatggctacacgcctgatacggcgtgttgggcaatccatgcgtgcatggccacggccgccgcagcgcctgcattaatggagcgcacggaaccgaattgagagatgtagaccacatcgtcggccaattcgagggccttctcgctcaatccggggccttccgcaccgaagagcagcaggcaccgcttggggaaggtataggtttccatcggcactgcgccgggaatgatatcgagggcgatgacgcgggcggcttgaagctccttgatgcgcgcatcacaagcatcgatttcggccagcagctcatgaaggtgcttgttgtctccatccacagccacatcatgcgcatggatggcggcggcaccggccttggctcgttcataggcgatttcaccggcgatgcgatgatgccagctttccaccagttcggcgatggaggggtggtgttcgacgtgctggtacagttcggtcatcaacgcgcccttgcgattccacttatgtggaccgacaatgtgtacgcgcttggcctggaaggcgttggcggtgcggaccatggaaccgatgttgaaatcgtgggtccagttttccaccgcaacttcgaagtcgtgacgccctcgagcgtcaagatcggccttaatggcagcgacggtccagtagcggtaacgatccaatacgttgcggcggtcgccgtcattcaacagcaccgagtcgaaacgaccgtcataattcggagaagtcggatcgtcgggacgaggctcgccgggatgggtctcagaccacggcccaaggccgatttcacggaattccggttcacctgaagctttggcagccaaagaaatctggttgggtgcgtgcaatctttctcctcgataacgctattcaccggttcctcttagtcaacttcgcggctcagcccggctgactttatgcgagggaagtcaaaggtggatttaccgcagttcggattcgtcgaagacctggatgaaggggagcgtttgctcgtcgccggtggaggggttgaccacattgatgtctttggcaccgccaccgaccagcgaggcgatggccacgaccttggcacccagctgctccactatgccaaagtcgaggctcagctcattgccgttgcgcagggtgaccagcgagctggtctgcacgtacgacttttcggacagccaagcatccaacagcaccacacggcggccttcgatggaggggcccttgatggacgggtagacgaagtccatcacgaatccgtctaggtcctcgccacgagaggcggcggcctggatcatggcggacaccatgggcacagatgctgcggtcaaggcaccaacagcatcgaagtcatcaaccgaatagcccgcatcttccaaagcgtcaatcagtacatggcccatgacggtggcggcatggtggtcgaaagtcaccgcggcaagttcggagaacggacggcccaccacatgctccctcagcaaggtggctagctgctcacgcggctccagcatggcaaagtcattatggctcttcgcgacggcgaggtccggggtaccagtggggcggaatccagattcagtcatgactccagactatcgcctgaggcagtcagatgagtatcaccttcatcggccggcaccacttcaggggcggacagttcgctcacattgcctttgtctgattcgatgatcggtacttcctcgatgatcttggtcggttcgattttttgcagcttgcgagcggtgggcaacacacggcgttccaagctggacgcgaacttgttgtaggcgctgaccgtcttggtgatctgggtgcccaatttgatggcataatcacccaacgtggagaaccgttcgtaaagttctcgggacaaatcgaacagctgcttggcgtcatcggtgagcgactgctgctgccaggcataggccacggatttcagcacggcccacagcgtgaccggcgaggtgagcgccactttgcgagagaacgcatcatccatcagtgtggggtcggcttcgagcgcggcctgcaacagcgcctcattggggatgaaggccaccacaaaatcgggtgccacatcaaaggcattccaataggccttttcgccgagagcacgtacatgctcgcgcaacgccttggcatgggctcgcagcaaatcatcgcggcgggcaatatcctcggggctggcggtgtccgggatctcgcaggcacgctggtaatcggcataaggcactttggcatcaatcggaatggtcttgcctcccggcagatgcacgatcatatccgggcgcaacgtacgtccatcggcatccgtgaccaccacctgaatgtcgaaatcgacatgttccagcaatccggcggactcgacaatgttcttgagctgggcctcgccccacgcgccacgcaccttgttgttgcgcaatgcggcggacagggaactggtttccttgtccaaacgggcctgctggtcgttgagccccttgagttgggctcccaatgcgcccatttccctcttgcggccctcttcgatctgcgtgaccttgttctgcaaggtatcaagattcttggccactggcgcaagcgcctcgagtaccttgctctgttctttcaaacgtgcttcctgttcagcacgcttggcctcggcggcctgagcatccgcctgacgcttccgttccgcctccgcagctgcacgctcacgttcctgctgaatgcgaatctgctcagcctgctgcgcctgggcaagttgtgacttggcgaaagccaattgctggttcacgccttcaatctgagcctgtgcggcagcattgcgagcactgagctcagcattctcgaatcgcgcattctccagcgaggtcttggtctcctccagctcctcgcttttgacgcctcgagccatctcctgacccttatggcgccccagcacgaagccggcgaagaggccaagccctgcaccaaccactagcacgacgatgacgataaccacggttcctatttgctcaaacatggtacctagtatgtcatcgatggtgaatgacggtaaatttttaccgaattcgacggtttcaagccgttaaacggatgctcagcagcccacattggacatttggactcatcgcagtcgagcatcaaccgttattgcgctgtgtcacacccgaacgccggatgtccttccatgatttgccagcgcgcgtcatcatgcggcagaactcgtcacgatttgacgagacgtgcgatggccgcggaagcctccgcaagtttttcatcagccacctcgccgccctggaccgacgcctgccgcacgcaatggttgagatgatcgtccagcagcaataacgccacggatttcagcgccgagttcgacgccgaaatctgtgtcagaatatcgatgcagtatttgtcatcctccaccatctgtgtgatggcgcgcacctgcccttcgatacggcgtaatcgtgcgatgaccttggccttgtcttcgtcataaccatgcatcgcaacccccctgatacttatccgtcagctgaacacaccccattatataccctctaggggtatagggtatacactgttgttcagtacatcaggagtgggaaggaacagttatggagttcagcatcttctcgaccgtcgcggcgctgatagtggcggccgcattgacatggctggtcctgcgattcttcttcggaacgcagaaggcaacggccggggccatggacgcttccggcgaacgccaatccgcaacaatcactgtcaagggcgggtactcccccgccgtggtgagcatgcgtgcgggtacgccgatcacactagccttcgaccggcaggagaccggcgaatgcacctcgcatgtggtgtttgctgatctgggacttgacgccatgctgccgggcaacgccaccaccgacgtggaactgccggcgttgccgccgggcgagtatccgtttgcgtgcggcatgaatatggtgcatgggatgttgaaggttgagggagaggacggctcggatgagaacacgccccttcctcatcctgatgcttcgtatacggcacctaccgccgtggatgcggcggaggccgatcgccgggaggcggctgaacgcgccaatgagatcaaggcgctgacgaagctggtgattgtgggcgcggtactgacgttgccggtattcgccgtcaccatgctgcatatggccaatcccacgctggtgccgcattggatggtgaacccgtggttgcaggccatcctgatcacgccggtgatgttctactgcgggcgtccgatccacacggtcggcttccccgcgttggcgcatcgctcccccgacatgaactcgctggtctcactgggcacttcggccgcctacctgtattcgctggtgacctgcatcgccccgtgggtgttcccggaaggctcgcgcgaaccgtatttcgaatcggttggcgtggtcatcaccttggtgctggtcggccgccttctggaaaccaaggcccgcgaaggcaccggcaaggcggtgcagtcgctcatcaaactgcgcccgcgcaccgcgcacaaactcaacgccacttccgcagacaatgtggacggcatcgaatggcgcaatccggcgtatttcacggacaccgacatcgacgccatcgccaccggcgacctgctggtcgtcaagaacggcgagcgagtgcccacagacggcatcatcgtggccggcgaggcgcatatcgacgaatcgatgatcaccggcgaatccaagccggtttccaaaaccgtcggcgatccggtaaccggggccaccgtgctgctcaagggcgactgcgtgatgcgcgccacccaagtcggcgcggacacggtactctcgcagatcgcggcgatggtggcccgcgcccaggcgaccaaggcgccggtgcagcagctggccgataagatcgcccggtatttcgtgccggcggtgatgatcatcgccatctggacgttcgccatctgggtgtcactgggcccggtgccgcaactggcgcatgcgctggtcaccgcggtcagcgtgctgatcatcgcctgcccgtgcgcgctgggactggccacgccgctgtcggtgacggtctcactgggcttgggcgccaccaacggcgtgctggtcaccagcgccaaggcgctggaacaggcgcgtcgcatcggcaccgtggtgttcgacaagaccggcaccatcacgcgcggcgtggtggacgcggccgccgactgggacaagccgagctacgagcaggacacagtcaaggaaggctcgcgcgaggccatcgcggcgttgcgcgcacgcggcatccgcacggtgatgctatcgggcgacaaggccgaggtagccgggcgcatcgcccgcgaagtcggcatcgatacggtgatctgcgaggtcaagccggacggcaaggcctactggatcgccaaactgcagcgcgaacgcgacgaggccgccgccaagtccgcggatggcgcctcccgcacggccgcgcaatcccgcactctgattgcgatggtgggcgacggcatcaacgacgcccccgcgctggcccaggcggatctcggcatcgccatcggcaccggcacggacgtggcgatgcagtcggcggacgtgaccttgatgagcggcgacttgcgcggcgtcatcaagaccatcaacctgtccaacgccacgatgcgcaacatccgcgagaatctggggtgggcgttcggctacaacgtcatcggcattccggtggccgccggcgcactctacccgttcaccggctggctgttgagcccgatgatcgcgggtctggcgatggcgttgagctcggtgtgcctggtgctgaacgcgaacaggctgcatgggtcgaacatcaacgcgggcgttgtcgatggcaccgctggctcgggcagcagcacggcggatgtcgaatcaaccggatcggccgaatcagccaacgccgccaacatcaccggctccgccacatccaacgcgcctcacgagccgaccgtcatcatcgacgatcgcaccacgctgaatcacaccaatcacgcatctgaccaatccaataatccaaccaacaaggagaacactatggatatgggaatgcacatgcaccacaccgcccccgcggacggcgaaaccgccatcgacccggtgtgcggcatgaccgtggcggtgaacgccgacgcgatcacgcgcgagtatgagggcaagtcctattacttctgcggcgaacactgtgccacgaacttcatgaaggccccgcaggtgttcctggagcagtagtctctgcgtttacctgattcaacgacaatggcctccgcccaaaacgagcggaggccatttgcatatatgaatcaatcaacgaatcagctggcgaagaagaacacgaacagccaagcgccgatgatggcgccgacgatcggggccacgaccgggatccaggcctcgccccagcggga

SEQ ID NO: 2915 - DNA, 5994 bp, Unknown
  R19_24m  MAG No. k141_1357
acgcgctccggctcgtcgggctcgtcaatcacgattttggcgaagccctgttcgatggccagcgcgatttcctcatcggacttgttgttgccgtgcagtaccagacgacgtccgggaacgccagcggcgagggcgattttcatctcgcccatcgtgcaggtgtccacgaacatgccggcctcggtgaccaatcgcacgatttctttggacaggaacgccttgccggcaaagctcacgtgcgtagtggatgtgttgaatgcttcggcggcagcgcgcacgaagtgcctggcacgtgcgactacttcatcagtgtcgatgagatagagcggcgagccgaactcgtcaagcagcgattcggcggtacgaccgtggaatgtaatggcaccgtcggcattcacagccgtagcggccggccaaattggagaaatgggcataatcacatcttttcgggggcggtgacgccgaggaggtcgaggccgttggcgatgacctgctggacggcgtcattgagcttcaggcgggcggcggcacgggccggctccggattcttggcgatctccaaggccttgcgagcctcatcgtcgccacgggtttccggatcggtcagggccatcggcaccacgcgctctacgttgtaccacttgtgataggtggcggccagctcttcgagataacgggccaccttgtgcggctggcggtcgtcggccgcagtggcgagcacgctcgggaactgggcgagggcggcaagtacctcgccgtcggcctcggtgtcgagcagggccaggtcggcaccctcgtagctgatgccggcggcggctgcattgcggtccacgttcttggagcgggcgtgcgcgtactgcacgtagtacaccgggttgtcgttggtgtgcgaggcgagcagggccaggtcgatgtcgaagttctggttgtagtcggagcgggccagcgagtagcgggcggcgtccacgccgaccacggagaccagatcgtcgatggtcacgacgttgccggcgcgcttggacatgcgcacgggcttgccgtccttcatcacgttgaccagctggccgatgagaatctgcatgttcttgccgggctcgtcgccgaaggccgcgcacatggccatcatgcggccgatgtagccgtggtggtcggcgccaagcatgtagatggccacgtcagccgggttttcggcgcgatggcgcttgtcccagtagtaggcgatgtcggcggcgaagtaggcgaactcaccattggacttgatgatcacacggtccttgtcgtcgccgtgcttggtggattcaaaccaagtggcgccgtccttgtcgaagatgtcgccgcgggacttgagctcttcgatggcggcgtcgaccttgccgtcggcgtacaggctgttctcatggaaccagacgtcgaagttcacgcggaagtccttcatggacttctgaatctcatcgaacatcatcggcacagcgcgcttgcggaattcctcgcgcacttcggtgtcggcctcgccgagcggttcaccgtcgtcgttgaggccttgatcctggtgggccagtgcggtcaggtccacgccgtcggactcggcttcggcctgaacacgggcggcgatctcgttgatgtaggcacccttgtagccgtcgcacggggtttcggtctggtaaccggcctcgccgaggttgttggcctcagcccaagcggcgaccagcgacttggcgaagcggttgatctgctcgccgtggtcgttgaagtagtattcgcgcaccaccttggcgccgttggcttcgagcacgcgggccatggcatcgccgacggcagcccaacgagtgccgccgatgtgaatcggaccggtggggttggcggagacgaactcgagattcagggtctggccgcccagatgggcgttgcggccgtattcgttgaccttgttgagatgcttgtcggtgtcggtcacggcaccggcggcgagtacggtgtccaccacggcggcggccgaggcggagtcgagcgtgatgttgatgaagccggggcctgccacctcgaccttggcgatgccgtcggcttcggcgagcgcggcggcgaacggctcggccagatcgcgcggcttcatgccggccttcttggccagctgcatggcgatgttggaggcccagtcgccatgcgcgcggtccttcgggcgcatcacggcgagcttgtcgacgggcggaatcagctcgtcggtcaacgcgccggcctggccggcggcgacgaggttgtgggcaatgctggaaatcagttcacttaaggcttcagggctcattcttctaaggataccggcgatggcgacaccgtgccgcgtccggtcattgtcggcggccataatggaacgacgcgcgaaagaggtgcatatggccgggctcaacccccaatcattggtcacgttgtggcagatcgaacagtatggttcgttctccgccacggccaaggccacgggttggtcgcagccggccatcagccagcagatcaaaaagctggaggcacagtgcggttcgactctggtgcaacgcacctcgcatggtgtggaactcaccgccaccggttcgatgctcgcccgccacggcgaggccatcgccgatcggctggagcgggcggcccgtgaggtcgaggattatcggcatcatcggtttgctcacctgcatttggtggccccaccgtcaatctgctctactatcgcggcccgtaccgtggtcaagctcagtatgttcacggacatcgagctgagcctgattcagatggagccgccggaggcgatcggtctgatttcccaaggcaaggccgatgccgccgccgtgttccggtacagcagcatcccgaacttcctgcacatcggcgacgatctgaccttccagtcgctgggttacgatccgatgcgattgttggtccgccgctccagcgacatcgccaaacgattcgaggagaccggcgaacccgtgccgctgtccgccgccaaagacgagcattggatcgccggctgccccacctgccgcgcaaatttggtgaaactggccacccgtgccggattcaagccggatatccgccactgcacggatgattactgggccacgcagaacctggtcgaggttggcatgggcgtctcgctggtgccggcgctcgatacacatatcaatctgcaaggcgatctggtggcctgtcccatcgccgacgattttgcggcgcgcgaggtcggcatcgtgactcgtgccggcgaccatcgtcccgcgctcggttcattgctcgaagagctcgagcgcacggcactcaaatatttgagtgccaagtagtcggacagcgataagcaagcttgcgaacgccatcacgatttcggggagccagaccgttgagcagcccttctgtaccaggaacaatgacatgttatgagcatgaacaacgtttcccagtcaacgactttgagcagcgcaaccgccggcgcctcttgctttgatgccaatcacatcgacgtgacgaccatcgaagatctgaagcaggtcggttcggacaaatggacccgctaccccggctgcatcggcgcattcatcgccgagatggattacggtctggcgccgtgcgtggccgaagccatcgaagaggccaccgaacgtggcgcgctcggctacattcccgacccgtggaagaaggaggtcgcccgctcgtgcgccgcatggcagcgtcgatacggctgggatgtggatccgacgtgcatccgtccggtgccggacgtgctggaggcgttcgaagtgttcctgcgcgagatcgtgcgcgccggcaactccatcgtggtgccgactccggcctatatgccgttcctgagcgtgccgcgcctgtatggcgtggaggttcttgagattccgatgctgtgcgagggcgccggcgagagcagcgggcgcaatgatgaatggctgttcgatttcgacgccattgagcaggcgttcgcgaacggctgccatgccttcgtgctgtgcaacccgcacaacccgatcggcaaggtattgacgcgcgaagaaatgctgcgattgtccgacctggccgccaagtacgacgtgcgtatattctccgatgagattcacgcgccgttcgtctaccaaggccacacgcatgtgccattcgcctcaatcaaccggcagacggccatgcaggctttcacctccacttcagcctcgaagtcgttcaatattcccggcaccaagtgcgcgcaggtgattctcaccaatccggacgatctggagctatggatgaggaacgcggaatggtccgagcaccagacgtccaccatcggtgccatagccaccactgcggcctatgacggcggcgcggcatggttcgagggcgtgatggcatatatcgagcgcaatatcgcgctggtcaacgagcagatgcgcacgagattcgccaaggtgcgctatgtggagccgcagggcacgtatatcgcgtggctggatttctcgtcactgggcatcgatgacccggccgactatttcttcaagaaagccaatgtggcgttgacggacggccgcgaatgcggcgaggtcgggcatggatgcgtacgcatgaacttcgccatgccctacccgctactggaggaatgcttcgaccgcatggccgccgcacttgaggcggacgggctgttgtaaaaaatcgcggctcccctcagagaggggagccgcggaacgcccgaattaatcgaagtcggcacccaacgcttcgagtttgccgcggaagtcggcgtagcctcggtcgatcaggctgatgccgtgcacgtccgaggggcctgacgcggccaaggccgcgatcagatggctgaacccaccacgcaggtccggcacgtcgatgtcgcgtccggtcagcggggtcggtccgaagatcacggcggaatgcttgtagttgcgctgccggaaacggcacggcagcgagcccaggcactcgcggtacaactggatggtggcacccatctcgaccagcggcttggtgaagccgaaacggttctcgtacacggtctcgtgcacgatcgacaggccgttggcctgggtcagggccaccacgagcggctgctgccagtcggtcatgaacccgggatgcacgtccgtctcgatcgccacgggcttcaagtccccgcccggatgccagaaacgaatgcccttgtccgtcacctcgaatttgccgcccaccttgcggaacacgttgaggaacgtgatcatctccggctgggtggcacccttgacgaaaatgtcaccgtgcgtggcgagcgcggcggacgcccaggacgccgcctcgatgcgatccgtcagcgacgtgtgcgtgtagccttgcagctccttgacgccttcaatgcggaaggtgcggtccacgtccacggaaataatcgcgcccatcttctgcagcacgcataccaaatccatgatctccggctcggtggccgcgcccgacagttcggtcttgccctcggccagcacggccgccagcagcgtctgctcggtggctcccaccgacgggtagggcaggtggatcttcgcgccatgcaggccgttgggcgcggtgatgtggatgccgtccttgtgctccttgtccaccgtggcgcccagcttgcgcagcgtctccaaatggaagtcgatcgggcgcccgccgatcgcgcagccgcccaatgcaggaatgaacgcctcgcccagacggtgcacgagcgggccggagaacaggatcgggatgcgcgaggagccagacagcgtatccacgtcagccacatcggccagctgaacatgagaggcatcgatagtcacaatgcccttttcgccgtccacatccacgtccacgccatgcaggcgcagcaaatcggacaccacatgcacgtcacgaatctccggcacgttcttcagcaccgacttgcccggtgccagcaacgcggcgaccatcgccttgctcacgaagttcttcgcgccacgcaccttgatcgtgccattcaaaggc

SEQ ID NO: 2916 - DNA, 17044 bp, Unknown
  R19_24m  MAG No. k141_1490
actgacgacgccagacgatactggccgtcggcgctcgaacaaataatggcgcagtcccgacgctactggccttcagcatcggtgcccttccaatccttggcgcaatagcgacgatataagctccactcgcatcgttagatttccaacgcttggcgcagcaccgacgccagacacgctcatcgtcgtcgttccaccaatatttggattggtaccgccaccacctataccaggcgtcgacactcggccaacaatcggcccgttaccgacacaaaactgcatgaggtctcattgctcttaatagcagcaatgggcctgataatcactttcaccaactttcgccgctgccgtctgccgccctacagtcgcagacgaacaaacgctgaaaggaacaacaatgactatcaagaccatcgatgagcatgcttacgagatcgttaccgaagagggcaccttcgccgtctgcaaggacacgctggccaagttcgacgccaccaagcacgagcacggcgtggccgcctgtggccgctgcggctgctgcttcaccggcgactgctgcgacgacaccggctgcgagcacaaccacaccgaagagtgcgggggcaaggcttgcctgcacgcttgccacgagaaccgcgaaggccacgagtgcgccttctgccaccttgccttcgacaccaacgagaagtgccacgatgagatcctggccgacctcaaggaactcaaggccgagctggctgtctgagttttaggtttccgatttctcctgcggattgactcctctcagggaggggagccagattccgacacgaaccaccgcgcttaccgtatgatgtctacgggcgcggtggttttgtttttctcgatgatggcgcagatttgctcgggcgcctccttgcagccgcgccggacccatagccagataatcgatgagacggcggagaccagaatttccagcgcataggcgcgcggaatgccgccgtagctcagctcggcacccacacgggccgcctgcccaagcagcatctgcttcaacacatccttgacccggtcatacatctgcatatcgttgcccgaacgggacagtgcgtcgaagaacgcatactcacgcttgacatagcgcaacgcctcggcttcgtgttccagttctacaatctggtggccaacctcacggccaaggagaacgtggagctcgcctccgaaatcatgaaagacgcgcaggaaccgacccaagcgcttatcgacgtggggcttcaggaccgtatcaacaacttccccgcgcagctttcgggcggcggacagcggcgcgcggccatcgcccgagcggtggccacgaacccgaagattctgctgtgcgacgagccgactggcgctctggactacaacaccggcaagcaggtgctgcagattctgcaggatcagagccgtaagaagggtgcgaccgtggtcattgtgacgcacaattccgccatcgcgccgattgccgaccgtgtgatccacatgcatgacgcgcgcgtcaaatcgatcgaagtgaacgagcacccgatggatatcaaggatctggagtggtaagcagtatgaccgatctcaatgatttcaccgaaacgaccaaccttacgcccgcgaccgactccgcagccgattccgccgcaaattcagcaaacgactcctataccgcgcccggcagaacgccccacgcgcacaaggccaagcgcaaccgccgacgcaacgggtcattccatagcgcatgctatggaaagacacccgcgtcaccatggccaaatccaagggtcgattcgcctccatcgtgagcctgatgacgcttggctcctttgcgctcgtaggcctgttcgtcaccggcccggacatgcaaataaccggcaccgacttctttaatcagaacaatctcgctgacataaccgtcatcagcgattatggcctgaccaaagctgacgaaaacattattcgcagcgcgccgaagtggccaaggcgatgaggggcggggccgtctccgagtccgcgccgatctactacgaggagatgtcgaaagtggccggcaaggagaacgacaaacagtcgattaccctgatcgccactgatgacgcctacaatttcggcgactacatcactgcgttcgcgcaccgggcacaagccgcaggtgctcaccgaccgtggtgcgatcatctccgaacgtatggcggggatgatggacgccaaggtaggcgacacgattaccgtcaccgattcgagcggtaccgagcgcaaggtgcgcgtggacggcatcaccgaaatgcatatcgggcatttcatgttcatgacttcgggtggctgtaagcacgtgttcggcgaacagtaccagtcgaacgcctatatggtgaggctcaagaaccatgagacctccaatgtggagtcgcgtagcgccaagctcataaagttggacggcgcgaagggcattgtgcagaacatgacttcgaagaaacaggtggccacaatcgtcgacttgccggatcagatcatggaagtgctgattctcgcggctgagctgctggccgtggtgatcctctacaatctgacgaatctcaacgtctccgaacgtatccgcgaactgccgaccatcaaggtgctcggcggactcggcgtgctggtctaccggcggttgaagacggtcgacatgctcggctccctgaagtcggtggaatagcagcggaatagcaaatgggatcggctttgaagccgatcccattcaattattcgctcactgctttctgagccttctgcgctttctgctccttttggcaatcagggcatagtccgaaaacctccagggtgtgggattcgacggtgaagccgtggccgtcggccactttgcgcagccaagcctcgctgggcgggtcgatttccacggttttgccgcaccgcttgcacaccaagtggtggtgatgtccgtcgtcgccgcataggcggaacagctgctggccgtccaggcggatcgtgtcggcggcaccggcatcggccaaggcgttgagctggcggtacacggtggccaagccgattttcgagccttcgtcctccagcctgcggtgcaggtcctgagcggagatgaactcctcacagtcggccaaggcggcgcgaatcgcgtccttctgcttggtctggcgttcgatatgttcaaccatcgataaggtcacgccttctttttcaggtcgtcccagcagccggtggcctcaaggtcagcaaccgtggcatcagggttgtcggtgagcacggtgatgtggcccatcttgcggtcgtgacgcacttcggccttgccgtagtcgtgcacattccactccgggtgggtggcgatcagcgcgcgcgtcggctccacatgctggccgagtacgttgaccatcacggccggcgagagcagcttgggcttgggcatgggccagccggcgatgccgcggatgtgggcgtcgaactggtccatcgagcaggcctcgatggtgtagtggccggagttgtgcgggcgcggggcgagctcgttgacgatgacctgatcgtccttggtgatgaacagttcgatggccagcgtgccagccagttcgaagcccttggccaagcgaatcgccagttcatgcgcttcgcgagccacatgttcggacacttcggcgggggcgatggtcatgtgcaggatgttgttgcggtgctcgttacgcacgatggggaaggtgacgaagtccttgccgttgccggagaccaggatcgaagcctcgaatgcgaagtcgacgaagccttccaggatgctcggcgggaagccgccaccacggtcggaacgggagcggatcttctccaagtcggcgtcggaacgcagcacgagctgaccgtggccgtcgtagccgccggacacggtcttcagcacggccggataatgaatatcatccaatgcggcgtcaagctcatcgaagttgttgacggcgcgccacggtgcggtggcggtgccgtggtcgttgatgaaccgcttctcgtgcacgcggtgctgggtcacgcgcagcaggtcggtgccctgcggggtggcggtgatgccgcgcacctcgtcgatggcatcggcgtccacgttctcgaactcgtaggtgagcacgtcggactgcacggccagatcatggatggcggttttgtcatcgtattcggcggtgatctggaagtcggccacctgaccggtcgggcagttcggcgtcgggtcaagcacgccgacgcggaagcccatgtagcgggcggacaaagccatcatgcggccgagctggccgccgccgatgatgccgatggtcgatcccggcatcagcatcgaaacacgaccgcctgtttcctcagacaagctgggcattggattcagccaccttttctttcagttcgttacggtaatcctcaagcttgtcggccagttcgggctcgaaggcggagagcatctgcacggcgagcaggccggcgttggtggcaccggagttgccgacggcggtggtggccaccggaatgccgccgggcatctgcacgatggacagcagcgaatcccagccggacagggcgtgggagcgcacgggcacgccgattacgggcagtgtggtctgcgcggcgatcatgcccggcaggtgggcggcaccgccggcaccggcgataatgaccttcaggccattggcgcgggcgttgtgcgcgaactcggccatgagctcgggcgtgcggtgcgcggagatgacctgcttgtggtaggcgacgccgaactggtcgagaatatcgcaggcgcgcttcatggtctcccagtcgctggccgatcccatgaccactgcgacttcgggcttggattcatttgccattatcatttactccctagttattgagaataaggcccactgtacgcttgggcgcttacttcggcaacgccttgcggtttttcccgggtcagccccgccgacccgctcccccggcccgtggagccgggctcctacaatgcgatgacgatcttgccgaacatgtcgccggcgatcatcctggcgaacgcctcgggggcgcagtccaatccgtcgaccacggaatcgatcaccggatgcaggtcggcgtgctccacgaagcgcagcagccgggcgaaatcctcgcgcgaacccatggtgcagccctgcacgcgaatgtcctggaagaacaaccgggtcagttcggcaccgggctggtcgccggtggtggcgccgcagatggcgatggtgccgccgggacgcaccgaccgcaccgaatgaccccaggtagccgcacccacggattcgatcaccgcatcgaccttgcgcggcaaccgcgcaccggtctccagcgcggcgttcgcgccaagtttcagcgctttggcgcgcttgtccgcgtcacgcgagttgacgaacacttccagaccggcggcatgggcgagttggatggccgcagtggacacgccgccgcccgcgccctggatgagcacggagtcgcccggcttgatgccggcggcctcgaacaacagcgagtaggcggtcagccagctggtgccgagtgcggccgcctcggccgtggtgaggtttgcgggcttggcgaacacgttggcggacggcacggaagtcttctcggccatcgtgccggggtatttctcggagaggatcgtacggcgctcacccggggccacgcccgccccatcggtgccgacgaacgtgtacagcaccacttcgctgccggccttgagcccatgcttgccggggatgtcctcgtccagaatgcccacggcatcggtgcccaggatcatcggcgtctgttcggcggcgagacccacaccctgtagcgaccagacgtcgtgatggtttacggtcaccgcgcgcaccgaaacggtcgaccagaacgggcgggcctggggttcgggctgctcgcccaccgccaacgcggcaagcggatcgtcatggttgacggtggatgcgtatacggccttcattgcgcgctccttggtatcaaaaggaattaccgcattcattgtcccacatcgcgcagcgaacgaatcacccatttacggagatgttgggggcattgattcgtcatgtggacctcggacaatgccgggcgttagcattcaacttcggaaagactagcgaagggagattcgagggtatgcgcaacgcgtcaggaaacggatttgattcaagcgattccttcgccgtctccggtgccgccgagggggccgcgcgccttcacgacatccccccgagcattaccccttcccatggcgacgactcccatctgctgagccgcattgccagcccggccgatgtcaaggcccttgcccccgacgagctcgccgaactctgccgtgagattcgcgccacgctgctggcatatggccaccaacacggcggtcatatcggctccaatctgggcatggtggaggccacggtggccctgcatcgcgtattcgattcgccgcgtgaccgtatcgtgttcgatgtatcccaccaaagctacgtgcataagatgcttacaggacgggccggcgcgtatatggatccgaaccgtttcggcgaggtgaccggcttcaccaaccccgacgaaagcgaacacgaccagttcgtgctcgggcacaccggcacttcgatctccttggcctgcggcctggcgaaaacccgcgacatggaggggccgggcagcggcatcggcaatgtggtcgccgtgatcggggacggttcgctcagttcgggcgtggcgttcgaggggctgaacaacgcggccgagcagggcggcaatctcatcatcgtgttcaacgacaacgagatgtcgatcgccggcgatttcggcggcatgtacggcccgctcgcccgtctgcgcgcatccggcggcaccgcccagccgaacctgttcaacgcgtttggcttggattatcggtatgtggaggccggcaacgatgtttccgcgctggtcgcggctttcgaggaagtgcgcgatatcgaccatccggtggtggtccatatccacacgctgaagggcgcgggatatgacagtgaggagactcacgccaatcaacaaaacgcctcgaccttaccggtctcactcgactcccccaccggcgtgcaccccaccgataacgtgaaccacagcgagccgtggcattcggatcactgcaacctgtccgatcacgaaccgcatgaaggccagtgcgaggcctcgcattggcagaatccggatgccgcaatcggcaagccggacgatccgcgcaagcattacggcaaaatggcgatggccacgctcgaaccgcgtttcgccaccgagccaggactcgtggtcatctcccccgccacgccgggctccaacggcatcacccacgaattccgcgaacgcgcgggttcgcattacgtggacacgggcatcaccgaatcgcatgccgtggcgtacgctgccggcatcgcacgggcgggtggcacgccggtggtggccaccacggcgtccttcttccagcgcgcgtacgaccagttcttccaggagatgagcctgaaccgttcgcgagtcacggtacttgattttctgggcggcttgtccggttcggacaatacgcattccggcgcatatgacgtgacgatgttctccaatattccaggggttacgatgctggtgccgacttcggctcgcgactatctggctgatttggcatgggctaccgcgccggccggttcggcggacgcccctgctggtccggcggtgattcgggtgccgggcgaggcgattctggcggcggaacgggatgcgacgctgctgccggtgacgggtgggcagattgctgaccgcccccagtcagcttcgctgccagcctccgccagctccgccagcgggggcatatctgccgcaacagtccgcgggaccgttagcgtaacggctcagcatgccggtgcgcgtcacatgctggattggcgggtcaatcagacgggctcgcaagtcgcgatcatcggactgggcaatgcgtatccgttggcggagcagacggccgccgcattgtctgacgattatggcatcacggcaacggttatcgacccgcgccagtgcacgtcgctggattcagacgtactggagtcgttgcgtgatggccaccagcaggtcatcacccttgaagacgggcagcttgaaggcggctggggcgagaaagtgaccgcatactatgcgaatcatcatgtctcggacggcagccgtaatcctcgtgtgctgaacttcggcgcagccaaggaatttaccgaccgcgtgtcgctgggcgaactgaacgaacgttatggactaacggtggagcaggtgacagaggcgatcactcgttgtttttgatggcgtctagggccgggattttaacggctttattggccgggccgaagccgaatagcaagccgatcagcgtggaaaacagcacggcgaacaggaacagccaccacggaatcaccgaataacgggtcacattctcgccaccaactatcgcctgccagagtatggtccagatagatgttccgccaccggtaccgtcgccggagcccccgccggcaccgctgaccataccgccagacatgccgccgctcatgccgcccgcatacaacgcgccgacaacgttgatgcccagcgatatcagtccgctcagcacgcagccgatcaatccgccgaagaatccgatcgcgccggcctccgcaagaaacatgacgcgaatgtcacgaacgtagcagccaagcgccttcataatgccgatctcgcgcgtgcgctcggttacggacataaccattgtgttggcgatgccgatggccgcaaccaacagcgaaaccgcaccgataccgcccagaatcagctgaatcgcgcgcgactgttcttccaacgacttacgcatgtcttcataggaggaggtctcgtagcccaacgctttgatctgtgattcgacttcgggcacggacttgaggtcggcggccttgaccagcacttgatcataggcggtggcttttttggcggcggctggatcgactttggcggccagttccttcaacgcctgcaaatccatgaccagaccgtcggaggtggcatagcccttgttgtagtcgcccgccacaatgccggaagcccgcacatcgagggtgacgttttccgactgacccgcggcgctgccgcttgcgccgcccgcgccgccaccgccgcccgcgccgccaccgccgccgtacatgttcatgctgtactggtcgccctgataattggtgccggtggtcagactgatttgcgtggcgagcgggtcgaagaacggatcttcgtcctgatctttctcgcactggccggtggcctggttaaacgtgcatgaggaatactgaccgccacgtgtgctggtgcgttgttcgccgttcttcagggtgtccatgaaaccataggcgaaccattcgccggcaagcacctggtcttttttgaccggtttctcgccaccgacgagcttgtagcccatctggtcgagctgggtcatgtcgatgcccatgatctgcacgtaatcatagatgtaacggccgcccgcgccggctctggccgtcacgttataagggaagttcatcatcggcgtcacgccggatacgccgctcatcgcgcggaaggattccacggccttgtcgtcgagcttggtatcgcccatcttggacgagccgccatcgtccatcggaccggcataaccgttggtgtacacggtgacgatggacagatcgcccatcgatttgagcatcttctcgttctgctcgttaatgccttggcccaaagagaccatgagcacaatcgagcagcagccgacgataacgcccagcacggtcagaatcgtacgggatttacgccgccataggttttgtctgcagagccgcagtatgtcgccgaatcgcatggtcgggcctttcaggccttgtgggatgagccggctggtgcgactgatgaggctggggtgactggtgtgataggagcggtgtctgccgcagcaccatccgtcacgccggtatcggtcttatcatccttgccttcggaccaatcatcccagtcctcatcaatatcgttcttcttggccttctgcttgcgccggcgacgcaccagcagcacaatcaccacgataatgaccacggcgatcacgacgatgaccacatacaccagcaccggcaatccctgattggcgttctggtccatgttcggatcggccatgccggaatcatccatcggctgcatatcggttacgggtatggtgagcgggaattccttggtcttggtctgtccgtcggaatcctcgtacgtgactttgagcgtggtcttcagctcgcctgacgcgtgcggtgtgaaggcgtaaccaatcgtgccggtggcgccggaagccacattgcccacgtactgggttttcatcgtggcatcgaaaccttcgccctccatcgtggcctcgacgttggcgatatcgcctttgcccttgttcacatattccatcgtgaccgtgttttcctggccggcgatcacctggtcgggcactacgggatcactgatttcgaaccggtcaggctgactgatcggcacggaaatcttgacgtcagactggcttgaggagcgggcgctggcgtccacatactcgtatcggaagttcacggtcacggactgggcaccgcttttcgcggaggcgagcgcctgcatcggcacgctttgcgtcatggcgtaaccggcccacagcgcgtcgacgtagaacgtgttcgtgcctcccgcgatggcgaagctctcgccgccgtccacggtgacgaccatgttcgtcaccgccacctgccccttgttctggaaggtgaagtcgagattgaatttggatccggcggccacggaatcacctccatacgcgaagttggtgatgatgatgttgggcaccggtccggcgatcggcgcggaatcgccgtcgcttccctgagacgtactgttcgtgccgcttgtgccgtctgtgccgtcgaccgcgtacgcctgatgcggaagggagatgacggcaagtgccagtgacagcgtggagagcaacgcgacgatgatggcgatggtgtggtgggagaggtgcttcatcggtcagttccttgggttctatgggcggacggcgtggacggtgtagttggtgtggttggggcggacggcgtggacggaacagttgggcgggaaaggtcggtgttgagccgatcgctggtgatgcggccatcgagcaaggtgacaatgcggtcggcgtatgaggccatctgcggatcgtgtgtgaccagcacgatggtctggttgaagtcatgggcgaatgcgcagatcatcgtcatgacctcggttttggttttggagtcaaggttgccggtcggctcatcggcgaacaccacctcgggcttggtcacaaacgcccgggcgatgccgacgcgctgctgttggccgcccgacatctggcgcgggtaatggctgagacgatggccgagcccgactcgtttgagtacgccacgcgccgcacgttcgcgctgttccttgggcacgccgcggaacatcagcggcattgccacgttttcgagcgcggtcagattgggtagcaggttgtacgactggaatacgaagccgagatgcttctggcggaaggccgccagctcacgctcgtcgagtttgctgacgggtacgccgccgattctcacgccgccgtgcgtcggtttttccatgccggccaactggttgagcagcgtggatttgccggagccggattcgccgaaaatgcagcagatctggccttgcgggatactgagattgacacggtcaagcgccaccaccgtctcatcctcgacggggtattccttgcgtaggtttcttacctcgatgattgctcgcggcacgggcccttcttccttcgttcgtcgccattggcggacgcgcgatagctggttattatccagcacatctcaagtcagtgtataaccgttatgcaggagccgcaccccttaagggtgttcccggatggcagtgataagcatataaccgctgatctcaaggtcgacggttcaggctccagacggacccagaccggcataacgtccaaaagcccctgtcccccacaaacgatgaggaaccaagggcttattacatcgtgaccccggacgggctcgaaccgtcgaccttgagattagaagtcacatgctctatccagctgagctacggggccaaactcatgtaagtctagccgtaggggtgtaaaacacctcggcgtaacgtcggcttgcaccggtaccatcggcgatatggggacaacggagagcaacgtagatcacgccgcatcgggccagaccgtcgcaggcgatagtggtgagctcactttcacatacgcacagggtcgttttgccagtgaaggcagggattgggaaagcccggttgtgaccaacatggctgcatccgtctctgccgatgccggcaatgcccccgccggcagcatcaccaacaccggcaccaacaacaccttcaccagcgccaccgaatcgtcgcttgccaccctgctgtccaaccaatgcccgttcgttatcaaggccaccattttcgagggcaatggcaaaaacgccattcgcgaacgtcacacattcaccggctcggtgctgcgccagctcgaccaagccagcgccctgctgaacggcatcaacgaatccggccaacacccggccatagccctgcgcgaagcattggtcaacgcactggaacatcgcgattacacgtactccggccccacactgatcaatatcttcgattcccgcctggagatcgtgtcgctcggcggcctgaccgatggtttggaaatcaacgatctgctcaacggcgtatgccagccacgcaccccgcgtttggctgaattgttcgccgatttgggcctctgcgagaactgcggtaccggtatccaacgcattatggacgcctacgcgcagagcgcggtcagtccgcaactgcgcgtaggccccacttcggtggcgatggtgctgcccatcccggtctcggccgaggccgcatccttgcatcggaccgataccgatgcttccgccgcgcccagcaccactgacgaagcgcagcgcgccaaaatgtattcattccccacgattcagcgcatgacggataacgccgcagatgctttggccggcgcacgcatcatcggctgcgcgccattgcagacgctgattctcggcagtggattcggcgagcgcccggacggtgacgaccaggtcagtacccgcccgctcgatacggcgacgctggaaccgtcgcctcaaacgttggagcagttcacgctcaatttcctcgcgttccgcggcgtgaagctcagccgcaaaaccatgcagaaagcgcttggcctgaacaaggatcagatgacgcagctcttggaccagctggagttgagcggcaagatcgaacgtcatacgcacgccaagtccactacgtattcgctggcacatgcctcaggacggtaacgaccagagcggcaacaaagcggcaacgaccagagcaatacagcccaaggcacgataaagcagcagctcagttctcgaatacgcgatcgcgaatcatgcgaccggattcgtcgagcgcggtggagaaacggccgtagtcggacagaatcacgcccatgtacagcatgtccacgagcgcggtatcggccacgcgcgagaaaatcgcattgccatagatcgtgtgcgagtcacgacccgtcagcaacgtcacgtcggcccagctggccagcggcgcgccgatggcattggttatggcgatggttttcgcgccatgcgatttcgccaatcgcaacgctttgaccgtatccgccgaactgcccgaatgggagaaggcgacggccacagcgccgtggggcaggtgcccggcaccgatctgctgcaggtaagcgtcggtattgagacggcatgtcagtcccaggtagccgagcttggtgaacagatccatcgccggtgtcaacgagttctccacgccgaaaatatcgatgaactccgattcggcgagtagggcgaccgccttgcgataggccttggggtccaacgcactgtgcagctcatcgatcagcgccttcgcgacataggccgctttgccgggaatctcatcttcgccatcccacggattcagatcgaatccagccaacggattgaaggtcactttgtgctcggcggccggatggcgcaacacgtaccgcagttcacggtaaccgccgaaaccgagcttgcgggcgaaacgaatcaccgtcggctggctgacgtgggcgatgtcggccatctggccgacggtcaggtcggccgcctcctcgatatgatcccgaatatactgggccacggcgcgctccgccggacgcagcgacggatacacgtggtcgatgcgctcgcgtattcccaccgaggattgcacagccgcgctcctagtcgtccgtattttccattcctgtttcgagggtaccggctgtataccggcgaacagtcgacttggattgaccgcaacatgaacggtgagcgaactcttccgtttacctttccgctccattccctctacaatcaaaaccatggtgcggattagcgtgggaagccccacccatcacacaagcgggcggctgtacggcgtgttcttcgaggacatcaaccatggtgcggatggcgggctgaacgccaacatggtgaacaactacagttttgacggcgtctatctcgaccatcacacgtggcgtatggccggcgccgaacgatggcgtacacaggccgattccctgcgtttctgggatttcatcaactgttccgccgccagcctcggcagtgagatacgcgggattcacggccagcaggtgaccaccgactgccccgccccgccaattcacgcacatagccgatacgctcgcatcacgtccgatgttccttccgaaaccggccctgcatatctggaaaacctcggctataacggaggcggcgacaacgggggcgagcccgcgttctccatcgtcgccgaccacacctattccgtcagtctcgcggtacgtccggttcatgggcgggccaagctgtccgtcggcgtggtcgataggtacggtctgccgctcaccagcaccactcgattgtcgtatatcgtggacgcagatccgcttgacgatacggaagagaccggtctgaggcaggacgatggtgccaatgcgcaggattccggcgtttcgatcagtccggattcgtcggatggtgccatcgccatcggccgtgacggctggtaccggttcaacgccgacgtaaccggcctgaacaccgattacggcaagctgcgtatcaccattgacgccggcgaacgcaccacgttcgatctggatctggtgcagttcatggatgcggactattggggcgcgggcgacccgaaatggcgttacggcaagctgcgccgcgatctggtggaaaccattcaggcgttgcatccagcgtttctgcgattccccggcggctgcatcgtcgaaggtgtgacgcccggcaatgaatatcgctggaaggataccgtcggctccctggccgcgcgacgccaacagtattcgatgtggtcgttcaagatgccggatggttccagctattcgcagagctatcagatcggcttctacgagtatttctgcctgtgcgaggacctcaaggccaagccgctgcctaccctgttcgccggcatcgcatgccagtcgcccggccgcgatccgcgccacatggatatcaattcggccactttccgcaacaatgtgattcaggactacctggacctcatcgaattcgcgaatggcgatccggagtccagctcgtgggccgcggtccggcgtgatatgggccatccagaaccgttcggcctggacatgatcggcgtgggcaacgaaaacttcggggctgactacgtggccaagtttgacatgatcagcgaggccattcacgaacgatacccggatatgctgtgtgtgatgagcgccggactgttccccttccagccgacgatgaaacgcagctgggaccatgcgcgagcgttggccgcaaccgattccggggcacatgattccgccaccggtgacgcgattatcgtcgacgaacattcttaccactcccccgaatggtttgcataccaagcgtcacgattcgacgcttacccgcgttgcggcgccggcgtctatttcggcgaatattcagccaacggctattttgccggccaaccgcagaccgaacagggcgcgaacacgtggaagtcggcactcggcgaggccgcgttcctgaccggttgcgagcgcaattccgacgtggtgcgcatgacctcctatgcaccgctgctcgcgcatatcccggctaaggggtgggcgcagaatcttatcgaactcaatccggcgcatgtgaaccccacggtgaattatgaggtggagcggctgttttccacgcatctgggcgacacgacatatgccgtgtccatcgagcagaccgcgtcacgccccgccaaacatctgtatgtcagtgccaccgggcatgacggggatgacgcctgccgttacatcaaaatcgtcaatacctccgattccccggtggatgtgacgttggaaatcgcgcgcggactggccgggctgggcgcctcgccatcgcgaccggtgcgtttggaggtgacgacgttaagcgccagtccgacggcgaaaaccactatcggataccgcggcgaggcttcgggggcgattgtgccggaacgtcgggcttacacattgccgtcgccgtcttcattgctggcgatgaagatcaagccgtacagcgtcacgctggtggcttcgcgctgattgacatcggccattaggccgattcctttgccgttagaatcaccctcaaggatgagggggaatcgtgcagattcagggaataataggggctatcccccatagcgaatacaagcacgggagggcaggatggaaaccacggcggccagaagaccgccggccaacgatgaaggagtatgcggtatgtttatcaatctgttccgcaggcagcgccctgcgctcgcccgg

SEQ ID NO: 2917 - DNA, 3402 bp, Unknown
  R19_24m  MAG No. k141_1513
cagaaaccagccacagcaaccccataacagcgttatagttctgtttgtcggcgtcgacaagagccagcagcgccgatgaaatgcacaccaaggatgtttagcgaattgttcgcagttcgcacgattcgatttgattcgattcgtgcagcccggatggttcacgggggcatgccgtcgtgatgtgcgtggatatgggcgatacgactctcgttcgggtcggcaggtcatcgtacaccagttacgaaaggatccgtccatatatggcaaggtttaccgagaatcgttggaccagcgcgattattcccgcactgctgattcatatcccaatcggtaccgtctattgctggagcgtgttcaagcagcttatcgctgaccgtctccacgccagctccgcctccgtggaatggggcttctcactcgccatcttcttcctcggcatgtccgccgcgtttgccgggccaatggtggagaaaaacatcaagaaatccgcactcgtctccatggtctgcttcgtggtcggcttcgccggcacgggcgtgagcatcgccctgaacttcctgccgggcgtgttcatctgttatggcgcgatcatgggcatcggcctgggcgtcggttatctgactccggtcaagaacctgatgctttggttcgccgacaacaagggcctcgccaccggcatcgccgtcgccggcttcggcctggccaaggccattgccagcccactgatggaatatctcatcggcacggttggcctggtcagcatgttcttcatcctcgccgcggtctacgcggtgatgatgttcgtcggcttcctgctcatcaagcgtccggccggctgggtgtacgatcccgcgacctcacacgtcagccgcaagacaatcctcaagaagcccgtgttctggggcatctggatagccttctatatcaacatcacctgcggcctggccctcatcagccaagagaaggacatcctgcacgatgtgctcaaggccttcccgcagtatgccaacctgagccccgccaagtttgccgccgccatctccggcatcatcggactggtgctcgccgtggactccgtgttcaacacggctggccgcgtgggcttctccacactctccgaccacctgaagcgccgcgaaaccgtctatcaggtaatcttcatcatgtcgattgccgtgtgcttgctgcagatcttcaccaacagcatcgacaacgctctgctgtgggccgtgctggccatgctgttcctcgtcaacgcgggctatggtggcggtttctcgacgctgcccgtgctgcttgatcagcacttcggcaccaaaaccgtctccaccacgcacggtctgacgctgagcgcctgggcgttcgccggtctgtccggcaaccagttggcctcgttcgtagttgcccacgcgcctgatcaggcccaccgctacgccgcactcatcccggtgctcaccggcctgttcgttgtggccctgatcagcatcagcctggtcaagtacctcggcgacagaaacgtcacgaaggccgtcgaagaccgaggctgagatgccgcaaaacaacgattctgccggagtcgggcgcatcaatcgatgtacgtcacgattttgacagaatcgttgttgttgctgttgagtacctgaggtcgtgcggcttacgcgccaaccagttcgagcatttgggggatgctctttttgccgaattcgacttgctgggtgccgtcggcgtgggtgatgacgatgcagggcacgctcatcgcgccgtactggtccttaagttcggggaagtgcgagacgtcgtaggcttcggcgcgcacggccgggctcagggaggcaatacgctgggaagcaagcacggtttccgggcacatcgtgcaggtgagcgagacgaggatcatgatgttcagcgggtccgtgatggacttcgcgcgttcgaccaggtcatcacccagcggctggccgggaccggccgcattgtacaggccaagcacgaacgagttgaactcgtggccggaaggtatgccgtggaaggccagaccggtgaagaccagtgaaccattgccgtccttgccggccttgccgtcgccctcagccggcacgcagatgcgcacagttgggcgggcgagcggcaggacgccggcgacgtcgaatgtggcgcggccggaatcgtccaacgaaccataagtgggcagttcggtgccgtccggcaaagtgacggccaatggctcgccaaccaccaaagaagtaggcacagaagcaccatccaccgccgtgatcagccctgcggcatcgacggcgaccgagttcagcttgccattcgacaacgcgactatctcgccgatgaagccctgcaattccgctgaaagcggggtgctgtccagctcaagggcaagggtgaccgggcgggtcatgcggccgaagaccacgccaagctgctgcttgatggcggcggagaacagttcgccgggcttcttggcggcgctggctgcggctgcggcatcggcgctgcgtttggcgggagccggggcgggcgtcgtgccagcggccgaggcggcggaggcggctttggcctcggactcctcataagcggaagcagtgggacgcggcggcaccaagccggttttctcgctcatctgcttggcataacgctccagttccacggcggcaatcgcaccgtcggcggtggcggtgaccacctggcgcaggttcttgacgcgcagatcgccggccgcgtatacgcccggcaccgaggtttcgaggtagtcgtgcgtgaccacgtaaccgtggtcgtcgagctccaccacgccgcgcaccaaatcggtggcgggcacatagccggcgaacacgaagacgccgaaggtgccggcgtcggcgggcttccacgtttcggtctggccggtggcaaggttcaggatcgaggcttctcgcaggcctccttggccggcggtgacgcccttcagctcgacctgataacgcacgtcgatcttcgggttgttcttggcttcggcggccactgcggcatcgcaggtgaagtccggttcgcgcacgagcacggtgactttggaggcgtatttggtcaggaacacggattcctcggctgcggcgaatccgccgccgaccaccagtacttccttgccggtgaagaactcgccgtcgcaggtggcgcagtaggccacgccgcggccggcgtattcggcctcgccctcgaagcccagcttgcgcgggctggcgccggtggcgatgaggatgccgaaggtcttgaggtcgccgcgtgaggtgtgcacggttttgatgtcaccatccacgtcgagaccggtggcttcggcggagaggaattcggcaccgaagtcctgagcctgctggcgcatggtctgggtgagtgcgcggcccgtggtgcggccca

SEQ ID NO: 2918 - DNA, 12378 bp, Unknown
  R19_24m  MAG No. k141_1573
aaagaagtagtacaaacacgctcttgagttctcaaaccaccaccacaccagcaagacaggaaaccaaccagaagaaggaacccgccgcgccgagcggcaacaggtgaataacttacacgcaaccacgccacaacgcaaatcaaagcgcacaagaacccaaggaatcggcataacagcgcggttccttcggcgtgtcgcacagagcccaatttgctctgatagggctagcgtaacccctcgaatgtttccggaaaacatcgaatccattattcggctggcgtgtcgcacgagttttcggactgtcagctccatgttcatcgttcggcaaccacaccaccggcgcacaatcaatgcatggcaacaacgctccatcatcggatttcgttcatgaatcacgggtatacctgtagttatgaccaagaagattgctgtattaaccggggcgggcatttccacgtccgctggcatccctgatttccgcggtccagacggtgtgtggaccaagcatcctgaccaaatgagcgtttacgacatcgatctgtttctgcgtaacaaagaagaccgtgagtactcctggcgctggcagaaggaatcaccagtatggaacgcacagcccggcaccgcgcataaggcgctggtcaagctggaacaagccggcatgctgacgctgctggccacgcagaacttcgatgcgctgcatgagaaggccggcaacagcgacagcgtcatcgtgaacctgcacggcaccatcggcacctcgcattgcatgaagtgccatcaggaatatgccacggcggacatcatggcccgtttggatgaagaacccgatccacattgccatcgcaaactgaagtatcgtggcgatatgccatgcaatggcattatcaaaactgatgtggtgtatttcggtgaggcactgccggacggagcgatggagaagtcgtacagcttggccaccaaagccgacgaactatgggtaatcggatcgacccttgaggtgtacccggcagcgagcattgtgccggtggccgcgcaggcgggcgtgcccatcaccatcatgaatatgggtcacacgcaatatgaccatcttgcgagccgcttgattcatgaggatatcgccgtcgcgctgccgaagttggtggacgagacgattgcggagaacaagtagtcctcagcataacgaaagcgccggcgggtggttaagcaactgatgattgttggttaaccacccaccggcgctttcgcgccacctcccgctagcgggaggtattggagcacacttctgcgcggcctcccgccagcggtattggaatcagtagatgcgcttgggctggaatccagcttccctgagtgccacgaggatgcggtcgatgtgctcggggccgttggtctcgaccgtgacgccgagagacaccgcgttggtgtagtggccggatgccttgaactggtcgtggtcaagctgaatgacgttggcgcgctgctcggcaagcagggtggccaccttgacgagctggcccggagtatccggcagctcgacctcgaagttcatgatgcgaccgcgggcgatcatacctttctgaatcaccgcacccatggtcacggtgtcgatattgccgccggacataatcggcaccaccacgtgcgggccggtggcggcggcgaacttgcgcgaacgcaggttcaggtgttccagcgcggccagcgagacggcgccggccgcctcgaccaccagcttgtgcttctcgagcatgagcagaatcatttcgttgatgtcgcgctcggtgacggtgaccagatcgtccaggaactcgttgatcagagcgaagggcaggtcgccggggtgcttgactgcgacgccctcggcggaggtgaccacatggtcagccggagacatacgacccgcggccagcgagtccttccaggccggggagccctccggaatcgcaccgattacgcgcacttcaggcttgaacgtcttgatggcgagcgccacgccggcacccaagccaccaccaccgagcggcacgaccacgtcagtgacgttcggcacgtcttcgaggatctccagaccgatggtgccttggccgcagatgacttcgtaatcgtcgaacggcggcacgtaaatcatgccttccttgtcggcgagctcagcagcgtgggcggcggattcgtcgaacacatcgccgtacagcaccacatcggcgccgtaggccttggtggcatcgaccttcagcggcggggtgatctgcggcatgcagatggtggccttcgcaccacgctcacgggccgcataggccacgccctgggcatggttgcctgcggatgcggtgacgatgccacgggcgatctgctcttcggtgagcgatgcgatcttgttgtacgcgccgcgaatcttgaaggaaccggtgacctgcaggttttccggcttcaggagaatctcatgaccggtcatctcgctcaataccggcgaagggataatttccgtatgacgggcagtccctttgagtcgtccggcggccaacttcagttcggctgcatgatcacgctgcagcgccttcaaaacatccttttgttccatagcttttaattgtatggcgcggggacaccgaaaacagtggcttatctcgctaacgagtgctcatttacggtaattcccgttcgtaatcagctttcgaggggctgatttggcttcgcggggaggtctatctcctcttcgaggggctgcccgatcgtgcaatgcgtgagtatgacacatcatttgcagcggtattatgcggttttcggagcccggctattcaggcaccaaccccctgaaacggagatagacctccccgcgaagccaaatcagccccttgaaatggagataccgcctagcaacacttataggctgacgacgacgccctcccatggtgcaagctcacggccggcaagagcggccacagcgtgcgcggcgtcatacgtgctgatcaccacgttcgactcggcaaggccatcggccactgccaacagttcggcggattcgcgaggcaaatcaacggttcggccggacatgttgaccacgaccagcagcttctcatcgccgagggtgcgggtgaaggcgtagacatgcgcgtcatccgcatcgagcagatgccagtcgccggccgccacgacaggcatgtcgtggcgcagcgcgatgagctgcttgtagaaggcatacaccgaatccggatcgtcgaattcgccggccgcgttgatcgccgcatggttgggattgacggagatccatggctccttagcggcatccggcgcagtgaaaccggcatagacagagccgtcccattgcatcggggtacgcgaattatcacgaccgcgcgcggcgatacccgccaacatcgattcgggcgactgcactttggcttcctcaaccctttgacggtaagcgttcagggactcgaggtcacggtactggtctaggcgcgtgaagtgggcgtcggtcatgcctagctcttcgccctgatatatgtacggggtgccgcgatgcatgtgcagcatcaggccaagtgccttggccgaacgcacacgagattcctccgaggagtcatcaccccaacgagaaacgacgcgaggctggtcgtggttaccagtaaacaggcttgcccagcctgcattcttcacggccgcttgataaccggccataatgctcttgagcttcggcaggtcaagtggcagtggcttccatttgacgccttcgcagtcaaaatcaacgtgctcgaataggaagagcatgtccagctcgccgttggcggggtcggtgatgtattcgttgcgctgtgcggtaacgccgggagcctcgcccacggtgaggaagccctcacggccttcgaacacttcacggcgcatttcggccaggaattcgtcttggcgagggccgtccgcgcagaacggattcgggttggaatagccttcctcacccacgggcagatcgtccagctcggaaccgtactcgccgggcagcttgccagacaggtccgtgcgcttggaaatcagcgtaatcacatccatgcggaagccgtcaacgccgcggtcaagccaccagttcatcatgtcgtataccgcgcggcgcacagccggattttcccagttgaggtccggctgcttcttcgagaactgatgcaggtagtattcgccacgctcagggcaatactcccatgcagaaccgccaaagtaggagccccactggttgggctcggcaccgggctcgccggcagtggtgccgggacgggcgggacgccaccaataccagtcggcgtgctcatcatccttgtttttggacgcttcaaaccaggcgtgttcatcggaagtgtgattgacaacaagatccatcacgatcttgagcccgcgcttgtgggcctcggccagcagctcatccatatcgtcgagtgtgccgaacagaggatcaatgtcctgatagtcggaaatatcgtagccattgtcgtcttgcggagacttgtataccggggatagccacagcacatccacgccgaggtcggccagatagtcgagccgtgacgtaatgcccttgagatcgccgaggccgtcgccgttggtgtcttggaaggaacgcgggtaaatctggtaaacgaccgcattggaccaccacggatttggggtggcaccgttggtgcggatggaatctggaattactgtgcgttgtgaagtggtcatcgttggctcctccattatttatggtctacattgcctgttgctcatagtctaaaaagcgctgaattacatttccattggggaactgcgttggtgtgccggaaacaaaaaccgcaaagagccggaaggcactgctacggctcaattctcataagctgcacatgctatttagcaacatatgggccctttcgctgtttgtggtgggtgactgtgccgtggggtgatgttggtcgggtaggttggaggcatggatgcctctcacctgttcaccgccgcgcttcggctgcggtcgccttggagggtcgggtccgcggacttccgtgacgccgacggcgacgggcgggagccgcacatcacgatcggcttcgagcccggcagagggttcatgctcctgttcgaggcgtgggtgtggctatatcgcctgtgctcgtggatgatgcactcgaggctcgaacctatgaaggagctcgcccgcttgttccgccgccataatctacctgacctgcggcagctcacatattaacggttcttctgattgcgacgcgcaagagcaacttcgggcgcgcttggattgcctgcttgaacccactggtgcggggatagatgatttagttgacacgcctgcgggaatctggtggggatttcgctggcacaccggatttcaagcaaaccccgcctcgggaaccgctccggacctcggcgttggcccggttcgtatgtcaatcgattgccgtctgaaccgggacagaatccgctgtcccggttcgcgatttttgtccttttttacaaacagggacaagccaatctccgcagttcatatgctccgtaatacaaaatcggcggaatagagccgatcccggaatcaacatgttgtcccggttttcacataaaacgattgacattcataccgggacaatgaaaattgtcccggttcgtgaaaatcgcccgaaaccgcgaaccgggacagcggattctgtcccggttcgcgcgtcaaacggttgatatgtggaccgggacaagccagtggcacggcgacacagcagatgcgctcaattgcaccgtaagccgtacggtttcgtcactttttcattcgcacaacgagcaaaaccacatgacctttgtgcgccaccgccacatcaaccgaccgtcgcctttattgtggcggtttccagtatggcaacaggacagaaaagcctcctccggtgagagccggaggaggcttgggtggaagcggacctttacttcacagagtcctgcaattcaggactggcctacggccagacccaacatgacctcgcgagtacgcgacctatccggccgcccgggccgggaaacagcccacggggctgtttccttaatcggctcgtctcgctcgacgcggtgaagtaaagcagcgcctgcgctgttttacttgaccgctcccctcatcacaccaccgacgacccacttttgggcgaagatgtagacgatgaggatcggggccatggccatcaggtagctggagaaggccatcgggtagttggtggcgaactgcgagctgaagacgtactgggcgagcgggatggtctggttcgactggtcggtcagaatgatcaacggcaggaggaagtcgttccaggcccacagtgcggtcaggatggcgatggtggcgttaatcgggctcatcagcgggaagatgatggtccagaaaatgcgccacgtggatgcgccatcgattcgggccgcctcctccagcgaaaccggaatcgaacggatgaagccagtggcgatgaacaggttcgtgcccaggccgagcaccgtgtacaggatgatcaggccgacctggttgtccaggtgcagggagcccatctgcttcgcaatcggcagcatgacgaccgggaacggcacgaacatggcggcgatgaagaagtagtacaggaagcggaagaagcgcttatccatgttgcgggccacagcgtaggccacgaaggtgttggtcagcaaggtgagcaccacggcggccaccgtgatgatcgcggagttgagcgcggccttcgggtagttgaccttggcggaggcgtcggcgaagttgtgccactgccacgaggtgggcagggcgaaggtgccggcttcggccggagtcttcagcgcggtgacgatggtgaagtagagcgggatcagaatggtcaggctcagcacggccacggcggcggtcagccaccagttgatcttgtggtccctgcggaacttggcgggcttgccggacatggacggggtaactgttgcagtagtcatttcttatcctcccctaaatcagatctgttcctggctgcgggagatgcgcagctgtacgaaggcgatgatcgccagcacgatgaagaagagcacggcgtttgcggtctggtaggcgtactcgccaccggtcaggccacccttccagatgaggtaggtgacggtttcggtggaggagttcggaccgccctcggtcaaggcgacgacctgatcgaaggtgccgagcgcgttcttcatggacagcacgaggttgatggtgaagaacggtccgatcagcgggaatgtgatcttccagaacttctgccaggcgttgacgccgtcgatggcggcggcctcgtagatttcgtcgtcgatggtctgcaggccggcgaggtagatgagtaccgagtaggcgatgccctgccagacggcgaggaagacgattgggatccagctgagttgctcattggtcaacagcgaggtggacagccacttgatgcccagcgccttgccgagctcgggcagcgggttcatgaagatgtacttgaacacgtagccgatgaccagcacggagagggtgtaggggatgaagaagacggctcggaagccattcttgaaggcgatcttcgagttcagcagcaccgacaggaacagggcgatcacattaatcagcaccgtgatgagaatggcgatgaggaacgtgaacaggtaggcgtggcccacgcggttgtcttggaagagggcgatgtagttcttcaggccgatgaacttgtaatcgccgtagccctgcgagttggtgaaggaatactttacgccgtcaagaaatggcaggtacaggaagaaggcgaaaatgatagccgccggaaccaccatccagtagtaggcggggtccaccttgcgggtggagaaggcggagaccttcttcttggccggtttcttggcagcggtcttggttgcggttgcgtgtgacatgatgttctcctctcctaccgatcactcgaaggtcctggcttggaccttgtcccattcggtctgcatctggttcaggaagcggtcggtgttgccggaggtcaccatggtctgcaggtagccgccgatgttgatggacgaaggaatgtagtggtcgcagaagtcggccagtcggttttcctcgaagaacgggcgcacggtttccagcgcatcgttgccgaagtaggtgtccttcagcggcgtgatggcggactgggcgtcggcgtaggcgtcaagctgatccttctgcatgaggaactcgacgagcttcatcgcttccttggggtgcttggtgttcgcaccgatggtgagcatcacgtcgtcgccggcggtgaggatctgctcgctggcgtcatcggtggccggcatctgggcgaaaccaagttcgatatcggggttgatcagcaggatctgcgggatggcgtaggtgccgagcgggatgatcgcggccttgccttgggcgaagttctgcgtgccctgctggtaggtgacgccggtgtccgcagtggagtaggtgaagagctcggattccttctcgactgcggtcttccacagttcctggaacgtggtcttgccttgcttgagctcggtgtacttcgattcgggaaccagcgtgccggccagggaggcgagcggtgcctgggtggtccaggcgtcggccacggaaccctgcagcgggttgatgccggcgtccttgaaggtgttgagcatatcggtgaactcgctccaggtggtcggcggattctccgggtcaaggccaaccttgcggaacagagccttgttgtagatgtagccggaggcgttacccgcgaagggcaggccatacaggcgcttcttggaggaatcggtggtctgcaccagattcttggcgatctgcaccatgccggggttgagggtgtccacaatgggttcatcggtgaagtcgtagaacacaccggaggcggcgaagttgccgaagctgatgtcgccgttgaaggtgatcacgtccggcacacgattcttgacgaaacgggtgcgcagatcggtctgggcgttggcggagttgttgatgttgaccttgatggtcgggttctgcttctcaaagtcggcgaccatggacttgaactggtcggcggcctcggacttgaactggaagaaatccagcgtgacggtgcctgcggtgctggagccgcagcctgccaggccgaacccgacggcgatcgcgcacatcacggcggcggtgcgcacggccagacgcttcagtctaggcgttgcatgtggggaatcggacagcataattgttgactcctttatctttcttttcctccggcttcggtgccggcggttcttccactttccaaggtaacggttcggccatttcattcccagcgccagcgagcccacttgcgcaagcaacaaaaagcgcggtattttgtgattaacgcaataaatacagcgaagggggcttgcatgtctgatgtcaacgcgattccacagtggttttccggatccgagcatacgcatcgcgtggcggcggcaattgcccaatacgggccgatagcccgcactacgttggcacagatgctgggactgagccaaggggccttgtcccgcatcaccagcgatctgatctacgccggggtgatcgaggagcttccggccgaggccggcccgtcaggcaagctgcccgagcgattcacgccaagggaaagttcggatcgtcgcggacgcccgcagacttcgctggtgttgtgttcgaacgcacgcaccttcattggtgtcaaggttcatgggatgtcgattgtggccgctgcggtgaacgcgcatggcgaggtggtgtccggccggcacgaggtgccgatcggggcggatcagtcggctgagtatgtggtgtcagccatcacgcggctggtgcgcgaatgttccgccgatatcgcctcttccggactgccctcccccactgcggtgggcgttgcggtaggtgggcatgtggtcgacgattcgattgtgacgttcgcgccgttcctgcattgggacggggccacggacttggggacgatggtcacagaggcgaccggcctgccgtgcggggtgttcaatgatatcgattctctgctggtggatgcctcctggttcgggccgggtgtcggcgtggatatgttcgccgtggtgaccatcggcgtgggtgttggttattcgctggccgtgaacggcaagccagtgcagtacccggataagagctatggtctggtgggccacgtgcttatcgatccggaggggccgcgctgcaccagcggacatatcggctgttcacaatgcttgactgacgattcgatcgccgaacagtactctgcgattgtgggtcgcgcggtcagttttgaggactttgcgcgcgatgccaagggacgcgtgccgcaggccacgcagttggtgaaccggacgtgtttccggttgggttcgctggtggctacggtggcgaacatcgcgatgcccggacatgtgatgattgccggggagtccgcgtttttggccaagctcggcaccgattcgctgcgcgatggcattcgtttctaccgtcacagccagacccagccggtcaagttcacgattatggaccacgactggcagctctgggccaaagccgccgccagtcgcgtaatcgtgaagcatattgggtaggccgttcttggctcccctcagagagggaagccaagaacgttgcttcgccacagttactccgccacgaccagcaattacggacttgcctatcggcaaggctcaatcccaccttcgctcagctgtcgcttcgctcaggccgtggctactgacagcctactaggctgtcagcttaacgccacagccttgagcaatactgcctgctgggggtggagggacgggggacggatgccgtaacgctgcagggcttcgccggtcaggactacgccttcctcgttccaccagccgagagtgctctggccgttggccagaccggtcaaatccaagctcgggtcgagcgggctgacgcggtaggtgcgctcggggtcaagtccgggcaggtgcacgggcgcggccggataggtctgactggtggtcagctgggtgaagcggtagatggcggcgtcgcggttcggcatcaccatgccatccaagcgcacggccggatcgttggagtcggcgtgcacgcaggtgtcgatggcgaaccagtcgcggtgcttcttgaattcggccacccacacggccagcttggcgagcgcctcgtccggctccttcaacaggttccattcgatgcccatgtggccgaagaacgccatggccatgcgcagttcctggctggtggcacgctgggtggagtgcgcgggactggcacccacgtgctcgcccatcatcgccggcggcaccagcagcgaggtgtagcgctggatgtccgcgcgctcgaccgggtccacgcagtcggagacccagatacggtcagcgtgctctaggatgccgaggtccacgcggccaccgccggaggagcagctttcgatctcaaggcccggatgtgcggtcttgaggcccttgaagatgttgtagacggcgagggtctgcgcgtgcacggccgggcggccggagcggcgggaaccgggctcggtgacgaacttgttgtggtcccacttgatgtagtcgataccaagctcgccgacaagctggtccatgcagccgtagatgtagtcgaacgcatccggattggtcagatcgagcacctgctgagtgcggccctgcagcggcagtcggccagcggtgggcgagagaatccaatcggggtggttacgggccacatcggaatcgtagttgaccatttccggctcgaaccacaagccgaattccatacccttggcgtgcacgtagtcggcgagcgccttcagggacttcgggccatcgggccagacgtcctgcgcaatctgccagtcgccaaggccggaggtgtcgtcgcggcgggaaccgaaccagccgtcgtccaccacgaatcgttccacgccggagtcggcggccttgtcggcgagcgccttcagcgtatcgaagttgtggtcgaagtacacggcttcccaggtgttgaggatcaccggacggccgtgcgagaacaggcgcggatgcagggagcgcacgtaggagtggaagcgggcggcgatctcattgaggccatcgccataggagccgaacagccacggggtgtcgtaggagttctggccttcgccggggccggcgagcgtcacttcgccgccgaacaggagttcgccgccgccgattacgccggtcgtgtagggcagacgttcggcggacagtacggagttgccgctccagcccacgtgcaccgaataggcgtcgccatgctcgaagccgaaaccgggcacgccggcggtcaggagcagggatgcgtcgaagtcagggcggccggcg

SEQ ID NO: 2919 - DNA, 11547 bp, Unknown
  R19_24m  MAG No. k141_2071
gccgcgattgccggttggattgccatgggcgtggcgccgaccctcggcttcatcttcctcatcgtatttatcgaaacgggtgtggtgttcttcccattcctgccgggcgactccctgctgttcgccgccggtgtgttcgccgctcccgatgccgcgaccggcaaggccgcgctgccgctgttctggctgctgccggtggtctggtgcgccccgattatcggcgaccagtgcaattacttcattggtcatttcttcggccgtcgcatcatccagtccggcaaggtgaaggccttgaccccggagcgtttggccaaaaccgagcacatgattgagaagtggggcccgctggccgtgttcctgggccgtttcttcccgttcattcgtacgttcatgccgttcatctccggtatttccggtatgcgttggagccgtttcacgccgttctcagtgctcggcggcctgtgctggtccacgttgttcacgctgctgggctacttcttcggtaacattccggcagtacaggaccacttcgagctggtgatcgtgctgattctgctggtctcgctcgccccgaccatcatcggtctgctcaaggccaagttcggcaagaagaagccggccaaggtgaccgatgctcagttggatgctatggaagacggcattaagaacctcgataagtaagcaagaaatgtagattaccgcataaggaatcgtcgtgaaaatgaaggccctgactgtgcatgtgaggtcagggccttttctgcatgagatgggcgtgaaacagcagcgtggttatccacatttgtcgtggacgacatgccggggtgtggataactcagcaagctagaaccacaatggtcgattcgtgttgagcattgaactcggacacgtttcaatcggcttatgaatagcaacaccacaccccgcgtggcgcgtaggatcacctcgccagcggtagcacctccgggcattccgctgcccacggacgatgcgccaattccagcgtatcgctactacactccgccgcccaggccgttggcctcatgcgaacggcagagatcgggcgaggctccggcactcgccctaactacagacaccagcttccataacattgtaacgatgacgtcaggtcatggaggcgtggggttgagtgtcatggcttccatgcttgcatggacattggcgagacgtgaacacagctgcgttctcatagacgctgatttcgtggccggatgccttgacctgctgcttggtgtagaacgagagccgggcttgcggttcagccaagtcgacgcgcccctcggccgtatcgagggtgaggcgatgaaccatgagctgatgatgtgggagggtgtgcgagtacttccctatgacccttggagcgcgcgccagcctgactggtgggaagttcaagcggccattcgggctttggcggaaacgaacgacgttgtcatcgtagatgccggtcagggtggactcattgagaccgtacccgatctgcgcagtggcctgcaggtgattgccgcggaattgtcggtaatggggctggccagagccaagtcgcaccggtccagattggattcatggggctgtgaagcgccacatatcgtaggtgtggaaccacgtggcgctccacgtgggagaggccacgtgggtattggcgaggcgcaggactatttgactgccacggtattggggcccatcaagccaagtgtcaatctgtgcggagacgtactggaaggcctcggcatcagatcggtgaccaaaggcagtcgcaaagccatgaacttgcttgccgatctcgtagaacaggccattcgcccggtttcgggagcttctcacaaggaccagtgatgctatggctgccgtcagcacgcgagccaatgaggctggcacagcgctcagaaccatattcttcggtctgctggatgacgtggcatctgacccgcaggttaccgatttggcggtgacctgtgatggccgcgtttgggcggaccgcggcaatggcatgcgcgaaacagtattgcatgtgccgttccgctcgccgcaagtagttcgagaatacgccgtccaactgtgcgcgcagctcgggcgcagactggatgatgcctgcccgatagcggatgccgccagtccggatggcatccgcgtgcatgcggtgattgccccattggtgccacaaggtgccgcgatttccatacgattccctgaccgaaccatggcatcgctacagcacctgagcaaattaggcgtattcccggctgcttggctgccgacgttcgtgggattggtgcgcaaacatgccacagtgctgattaccggcggaacaggcgtgggcaagaccaccttgctcaaggcgctgctggcgcaatgcgacgtgaacgagcgcatcgtcaccgtagaggaagttcgcgaactgggggaactgggacgcgacgatcatgtctcgttggtaacacgcgaggcgaatgtggagggcgtcggagccataagcctggcggacttggtcaaagcgacgttgcgaatgcgccccgaccgcgtggtgctgggcgaatgccgtggcgcggaaatcgtcgacctattgcgcgcgttcaattctggtcatcacggtggcatgaccaccgtgcatgcggacggcgtgaaccgagtaccgtccaggctgatttcgcttggattactcgccggagtcagtccacaggcgttgaccatgctggcggcaggcgctttcgacgcggtggtgcatttggagcgagtgaacggacagcggcgtatcacgcagatcggcgaactgcgcgtagcacatggtgaactggcaggaacaccgctggcggtatggaatggctgccatcctcctcggtatgccgccgaatgggggcacttcattgaacgatggggcatcgttcccaggccgagtggtggtgggtgatgatgtggtgtgctgttctggtggcgctcgccgtgctgatatggccggggaacaagtccgggaggctgtaccggctggcttaccgcgggcgcgcggtcgattccgcagccataaacgaacctcgatatgccgactcacctcgcgtgggcgttgcgcaggtgattacgtccgccatcgcgcgattgcgaggtggcggcacattggttgaagcattcgaggaacaatccagcagacgcttcgccactcatcgcattactgtggaacggctcatagcgatgttcgaacagcggcgtctgcccgacgaatcaccagcgcaggtacttgaagctgcacgcggggtcaccgccgcagcggttttgagcgatgagctcggttgccaagcggtgccatgtctggaagcggtattgactgcttaccggcagatgaggctgatgcaaaacctgcgatcgcaagcatgcgccgtgcctaaagccactgtggggctgctgagcgcacttccggccgtcaccgtggcattgggcgagcttctgggagctagaccattggcgttcttgattggatcgccgcgcggtgtggtctgcctgacattgggaggatgttgttatgctgccggcttggcatggatgcgggcattgttgaaaggcagcggattatgagtacggtgtgggtacacgccgcggcaggctgtgcggcgattgctggttggctgtataaggctctgtctcgtcatgacagccgcttgccgggcgaggagccggccgtagcgcatgattgcgggtcgtcatggaccatactcatattgcgtatgttgcaggtgtccttgcgtcagggctcctcgattccccgggcgcttgacatggtgggcaaagccgtcggcggcgactgcggcgctcgcatgagcgaggtcgggaactccctgaccagaggggttccctgggctgatgcgtggcatgccgctatggctgttcagcatgagggtgcgccagctgatagtccatccaagggaaatacgaataccacgcaacgagatcttggcctgctgcaatcggctttggaatcgtcatggacgcatggcgatatgcctggtgtgcgcctcgaatccgccattgaacagctggaccgtgacgagcgtgctgctatcgaacggaatgccgcgaagctgtcggtaaagctactgatgcctacagggctatgttttctgccggcattcgtgctggtaggagtcattccggcgattgcgtccttcatgatgtgaatataggcgtgaactgagtgcgcttaggctgaatcttgttgtattgctcggtattgtacttggctgcgtttggttatccacatttgtggtggacgacacgtcgaggtgtggataactcggcaagctagaaccacataccccgtttttcctggtgcatgaagcgttgatagtccacagtggtatgcaccccgcgtcaacccggcgcgggggccaaccactcacatacgcatggggaaggtgcgaagccactgcgcagcttcccctccttaccgaaaggaacgccaatgaatacccctatccccgtcatcgtcgacgggcaggccggcatctttgcgcacagcaaggctcgtgtggccacgctgaacgccaaggcgaaagaacggctatgcctcatggacgcacgcatccgcgccctcatggctgagcccgaagaaggcgcagccactgcggaatacgcagtcgtactcgttgcggctacaggctttgcggcggtgctggtcgccatcctgaagtcggatgccatcaagacgttgctgaccaacatcatcaaacaggctctgaaagtcgggtgacagccatgaagaccatgagatgccggtggaggctcgccagactgccgccagacctatgcacgggatcggccaccgccgaattcgcgatcgtattgcccagcgttatcgccatcgccgggctgatactggcaatgggacgtgtggtcatcgtttccatggactgccaaggtgccgcgacggcggctgcacgcgagtttgtggttaccggtgacgaatcatccgcgcgcagcatagctgcggacgttgcagggggagatccccgcgtcagcattgcccacaacggccaatcgacgagcgtgatggtcgaatgttcggtactgcccggcccactggatgtcactccaacgcgggtcaccggcaacgctacggcgataagccaataactggtcggctgctggctgggcggccgcaatagaaaggaactgcggtgcagggaatgcgttatgaggagggatcgggcacgatggccggagccatgctggttatggcggtgggcattgcgctcgcggtggcggcaagtgtgggcaacctcatgatctgccagaatcgagcgcgttccctcgccgatctcatcgcctttgacgccgcgtatgcgctgtggcatgtggatatcggtgatccatgcgcgcttgctgcaaacatggctgaagcgaatggcgtcacgctgggctcctgctccgtgcgggatgaagacgtgttggtaaccatcaaggtggaaaccatggttccggtggcatcatccgtggagcggatggctcgggccggaccggtgaattgtacggaaggagacaattatcacaataatggaccgtaagcactgatgctctggcgggcttctggacctttggttaaggtgagagcatgagcgagagtgaacgcacagaacgccgtcgcgtggtggccatggtgggcaatcccacttccgataagggccgtggtgccaaggtggatgcgcgagtattgggactgctggaggacgccggccgtgcccataacttcgacgtcatcgacatcaccggcgtaagtttcgacgattccctgaaccaggcgcgtgaacgcgcgcacgagtacgactatctggtggtggtcggcggcgacggcatgatcgcactcggtgccaatgccgtgggttgcggcggtaagccgctgggcatcgtggccatgggctcgggcaacgatttcgctcggggacttaagctgccggtcaatcgcatcgaaaccgcagtggaaggtatcgtcggcgctatcgtgcgcggatcacacattgatgtggacatgggacgcgtgacctctttggatggtggctatgccgtgaacccatccaccggcggggaatacgagtaccgggagaacaagtctgccgagcacccgattgaccggtactatgcgggcatgctgtcttgtggtcttgacgcaagtatcaacgaccgtgcgaatcattcgcatctgccgaccggcaccatgcgctactttgcggcggtgctggtggagctgacgcatatgaagcgttatgggtaccacgtcaaggccacgctggcggacggtaccacggatgaacgagacatcatcacgccgttgctgacgattgcgaattcgcgtcatatcggtggcggcatcgaggtctcaccgtactcctgcttctccgacgggctgttggacctggtgtggatgaatcatgtgccgaacttcggcgaatgtgcggtggccatctcgaacgcctataacggcaagctgctcgcctcaaaggtgttcgggtggaagcgcatacgcgagatcgaagtcacgcgagccgcagaaggcgacgagccaccggtgctgatggcggacggcgaatacatcgggcatctgccattcagggtagtggccgaggactgcgcgctacgcgtactggtaccgccggccgtagccgcccgtgaggtggactcccgacaggaagtgctcgacgccatcgcccgagacggtcgcgaccccgtaaccggccagttcgcctgacctgattatattggctcccctcattaggctgagccgtaaagcaaacagcccagtgggatgtttgtaggcgagggttcgacgatagtcgaaccagaagaaagtcagccgtaggctgtccgcaattgcggacgagctggccgcgaagcggactgaggggagtgcgggagagcggtaccagagccaatggccgtcagacctcagacgacatagctttcgatatgcagcgtctgcgccatgacctctttgatggttcggtcgctgatgttcggatgcgagcgaaccagcgagataagccccacgattagcgtgaagaatgtctcatggacgttggtgattggcagaccatgcatctgctcgaaatcacgtacggtggtctgggcaatgtagtcggcaatacggtccgccgcgcggtcaatgaacttgatatacagttcggcgttgccatcttggatcatacggtttgagaaggggctctcgtcggcgattagggaacggagcacatgcacgatgtcgtctaatgccttgttcacgttgcctgtttcgcgcgcttggttccactgcttcaacgtggtgaggatttcgtcgatgacgtcatcgagtactgcgtcggctacggcttccttgtcttcgaagtagtggtagaacagcgaacgcgtcataccgacttcgcttgcgatgtcggaaacggtgattttggagaagcctttttccagacacaccttgcgcgcggcttgcacgatggcgtcgcgccgggcatcgccacgggtggggcgtttctcgtcgaggatatcgctcatgggcacctcctgactacaaccgttattgacactatgttaatacaaagaaagcggttaataacaataaaaatgcggtaaccgttgtcagatgaatgtcgttggaatataaagagttttcccgattcggcagctatgagcccggtttatcttgactttttatcggttaattctgagggcaaaggtaggttagtagctatggcacttgcactgtatcgtcgctatcgtccggacaccttcgaaggggtcatcggccaggaccaagtcacggtcccgctgatgcgcgccttggacgaaggcaagcttacgcatgcctatctgttctcagggccgcgaggatgcggtaaaaccagctccgcgcgtatcctggcccgttgcgtcaactgtgccaaagggccgacttcccacccctgcggcgaatgcgaaagctgcaaggacctggccaccggcggtccgggttccatcgacgtggtcgaaatcgatgcggcctcgcacaacggtgtggatgatgctcgagaattgcgagaacgcgctggtttcgcccctgcgcgcgaccgctataagattttcattctcgatgaggcccatatggtcacgcagcagggcttcaatgcgctgcttaaaatcgttgaagagccgcctgaacatgtgatgttcatcttcgccaccaccgaaccagacaaggtgatcggcaccatccgttcgcgcacccaccactatccgttccgtctggtgccgcaggaagtcatgggtccctacctggagacgatctgcgacaaggaaggcatcaagcccgagcccggtgtgctgaaactggcgatgcgcgccggtggcggctccatgcgagataccctgtctgtgcttgaccagctgatggttggttcggtcgaaggcgttatcacccatgatgccgctgtagccctgctcggcttcacaccggaggcgctgatcggtgaggcagtggatgcggtaatcaatcacaacggcgaagccctgtacggcgttatccagaaagtcgtggtcggcggattcgatccgagacgattcgtcgaagacctgctggctcgtgtgcgtgatctgctggtgcttacgttggccggggaccgtgcggaatccgtgctgtccgacacggctgaggccgaggatatggacgatctgcaccgccaagccaaggcgctgggactgggcgcactgaccgccatggcagacatcatcaacactacgttgggtgccatgaccggagccatttctccgcgtatgcgcttggaactgctggccgcacgattgttggccggcagtgaatcaggctttgcaacagccgctcccgcgccagcttcttctggcatgccgcctgcggctgcttcttcgacttcgactacgtcagccgcttccggtacgggtgccagtggttttgccggcgcatcgcgaggcgggtttgccggagcctcacatggtggattctccggtgctgcacgcaaccagcaagcagccgcgcctcagagcaccgcttcccatgaatccgctgtgggagacaatggccctgtcagcagcccagtcagcgaccggcccgcgggctctccgtctgcgcaacctgccgcagcagctgctgctgccaatgcctggggtgctcccgccacgtcgccggccgtcccggcccaaccggtgacctcgcctgcggcatcggataatcggtccatcgacgagaagtgggatgcagccgtcgccgctttgccggaaaccattcgtgaatatgtgtcacgagacaaggtgccgaccgtaaaattcggtcccaaccgtaagagtctgccttgcctgtcgatgacgttcgacaagtcgctgagccagcacgctttcgccttggccgtggacaacagcggtaagaaggcggcgtccgtggtgttggatgccgtgcgcaacgagttcggtgccaatgcggttattgcaccttctgcggtcgcggcgaatggcgagcgagtcgaatccgtcaaacgtatgagcccggagcaattggccaaggtcaagcagcagattgccatggccaaggccggattggccgcgtcgagtttgggcgcgggtctgggcattcatatggggagcgagccgaaagctccgaagccgactgcaacaggccaagccgaggatacggacgacagccatcgagccggccaatccagtgcatccacggcggcgaagagctggagtgacgatgacccttgggccaagccggccgtaagcaacgcttcaccgcaatctgcagacgggttcgcacctaacgagcccgctgctgtgcctgcgcccgaagagcatcacaagaagcatgttgcggttccggacatcagtgatggtgttgatccgtgggccgctccggctgctcctgttgcacccgctgcgtccgttgcgtccgctggacccactggacagtccacggggcagccagccaccgcagctcccgctacggcagttgccggcgcaagcgatgatccatggaatcagccgcaatctcaggctacggcctcgctggcactgcaaccggtcgaagccgacccgtggaaccagccatatcagcagtctcctcacgatgatccgtggaatcagccgcaggggaaccatgctcaggcggctccgcagccaggagacgacccgtggaatcagccgcagtcccagactccggcttcttcggttcctcagacagtgtcgggcaatatgtcgggcgatgacccgtggaaccagccccaatcggttccgcagccggctgccggcgatgacccgtggaatcaaccgcagcccgcacagccgacgccgaatgccgacccgtggaatagccagccgcagccgcaaccgcaagtcgcggccgaggacgacgaatactcgatgaacgaccagtcgctcggcgaggcgacggccatgaatcttgacgatctgaaaaagctattcgaggtcaaaaaagtcgagcaattcgcggcagatgatccgaagaaccccaagaacatccagcctgccaagaagcactcggatgaataatgaggacgaataacgaggaatacccatggcacttgcttatgacggcgcaatacagcgactgatcgacgctttcgggcggctgcccggcatcgggccgaagggcgcgcagcgtatcgccttctacatgctgtccgcgcccgaagatgaagcgcgcgatttggccgaggccatcgaggaggtcaaggccaagatccgcttctgtgatatttgcggcaacgtgtgcgaatccagcccctgcccggtatgcgccgacctgagacgcgaccgttcggtgatctgcgtggttgaagagcccaaggacgtgatgagcatcgagcgcacgcgcgaataccgcggcctataccatgtgctcggcggcgcaatcaacccaatggccaacgttggccctgccgacctgcgtattcccagtctgctcaaacgcttagaaggcgatgaggtcaaggaagtcattatggcgctcgacccgaatattgaaggcgaggccaccaccagctacttgacccagctattgcgacccgtaggtgtcaaggtcacccgacttgccagcggcctgccggtgggctccgacttggagtacgccgacgaaatcacgctgggcagggcgctggccggtcggcgtgaggcctaggccagcgtatcattggcgctttcgcccttgcgacgcatccacggccagaatgcgccgtggcggatgatgcgcgcggccttgtgccgtcgtgccaaccagataatgaacagtcctgccgccagtatgcctaggccaacaccaagggcgatattgcgcgcgtcaagcacgtcattcggctcgggggccggcatcggaattgccacgcggtgcccggagataagcagtcgatgcgtgttcacgccgtatggcgtacaggtcatcaaggtgacacggtcctcacccggcacaatcttgagcttcgacgtgtcatccggcaaaatcaccgaaatgcggtccactttgtagcccaaagtttcgcc

SEQ ID NO: 2920 - DNA, 18417 bp, Unknown
  R19_24m  MAG No. k141_2166
cgatgatgaacaatacgccggcaacgccgaactgcacaaaagtgacggcgatagggtcgaagcgtttggtgtagacaccaaggcaggtcagattgaacgagaagatgacggcggttgcgatggtcagccagtcgccggcgcccagcgacaacgaaccgcccggcttcaacgagacgaagccgacgccgatcagacagatcacgccggcgaccagattgatggccttcgggcgggttttcgaaatgatccacgtggcgaacggggtgagtacgcagtaggcggccgtcaggaacgcgctgcggcccggttcaatggtctgcaacccgacggtctgggtgaccatcgtgccccagtaggtcagacccaccacgagcgccggcacaatgatcttcggcgtcagatacggcacgatgtgcttatggaacaaggccagcatgcacaggcaggcgcctatcatgcgcagacccatcagccattggggcggaatcgcctccatggcgaatttggcgagcagataactgccaccccataatgcggcgcagcccagcaacatgagtcgggcgagattcgggggaaagctgcgggaccagcggctgcgcagcttgctgaaacgttcgaccaaacccatggtgcacctcaggacagttaggaaaacttgtggctctctcggctcacagattacgggaactaccggccaaaatcgaccggtcgatgggcgtcgggtgtgtgacaggtgtgtggctggtgcgcggccggggcgcggcaccgccaagcaggtaagaaccggatgaaagctgtgcgaaggtgaggttactcacagcgaacatccgggctagtcgcgctcgaaaccggtactctggaaagagtaaaaaaatacgttgtccatagcaatcatgaaaggattcgacatggcagtcattactccggaaatcaaggaattcatcaagaacaacctcggttggatcaccaccgtctccaaggacggcgaactggacctcggcccgaagatgtccctgttcgtgctggacgacacgcacatcgcctaccacgagcgcaccgccggccagcactacgagaacctcaagaacggctctccgctggtcatcgccttcgccaacctcgagaagaagcagggctaccgcttccgcggcaacgtggtgctgcacgttgacgacgacatctacaacgagcaggtcaagatcgccgaggaaaagggcaccaagaagccggccgtgattccggttctcgaagtcaccgagatccagaaccttgcctccggtccgaccgccggcaagaccatcgccaaggactgattagctgacgtattggtggcttcctcgtcagagggagccactttttcgcttttcagtgcgcagtactaggtgatggcctttgaggtcggtggtggcgaagaggtaggtgttgccgccgtccttgagtttgagttttttgcgcagctgggccacggatagggggaaattgcgtacggcgatgttggcgtgcgtgagaccggccaatagctgcttcagttctttcttgttcatggtggcgatggattcgatgacgaatgatctgcctgggaaatcggcaataggttcggccgccacgaacaggtggctattcgggctgatgtgatgcacggcgaagcgctgttcgagaacagcaaagcacccggccttcatgattgaggcgttgggttcgtaaaggtacttccaatgcgaggaatcgaagccgttcgcgctttcctcagccgggagatcctcggtattacaggtattgcatgcaactaaggcagaatcgctgataggggtgtgattgtcgctattatcgccggccttgtacgacagcacctgcccgtcattgacgcataccacgagcggtgaggcgcaacggccgcgccccaacaccagcaacaattccttgcattcattaccggtggagacgatatgcacctcgtgcaccgcgccggcgaaatccgtaatggtcttatgccagtcgagcatgggggagagcttgaccatgaccgtcggtgccttggccagcagcgtatccttcagggtcagcacatccggcgtgcaatcggcaatcgcgtaggtacgcgagccatgatcgtcacggcgggccggatcgaggaagatcatggagactcggccaagcgtatcaagcactgctgttgaatcatcattgatgacttcggcgtggccaaggccgagtatcgggaaattatggcgagcgataccacataaaatggattgttgttccacatatatggcatggtcaaacactcgggacatgtaagaaaagtcgacgccgaaaccgccggtcagatcgactagggatgtcggggaatcgtcgtcgactgcttccttggccaacaatcgctgtgctaaccgggctttgtattgagccgtgaactggctggaacattgttccattgggacttgcggcgggaaaatcagcccatcatgggacgcccagtcaggtagcttgagtgaagcgcgctgccagccggcaatctgctccagcgcgaacggcacatccacgtcgccatcatgtttggcgtgcaaggccacatcacgcacatcttcacggcggtgtttggcgatgaacgcccaagtcgactcagaaatctccatgccgccattctaggggttgtgctgagatgagtatgaaaaaaccgcaagagaacgaggtggcgaaaaccgatgatcgatgaagtgatgatgctgcgccatggccgtacgcaatacaatctcgaacatcgcttgcaaggccagatcgatgtgccgctcgacatcgtaggccaatggcaggtcgaccagaccggattcgcgctcgcttcacggtactactgggccaaggtgaaccggcttgccgagcatcccgaagccatcgcccagcccggccctgacgccgccgaacgcactgatacgcgacagttcgaggaggcccccgccgccggccggcgcatggtggtgatgacctccgacctgttccgtgcccaacagaccgcacacgccttcgccgatattttgggattgccggtcacctgtgaccaacgactgcgtgaacgcagcttcggcgagtgggaaggcatgacccgcgccgaaatcaaagccgtggcagccgacgactacgcctcttggaaacagcacactgggggcgaaaccaagcatggtgtggaaagccgtgccgccgtgggccagcgaggtgccgatgccgtgcgcgcactggtcaccgactccgcctattcagacagcatgcccaccacgctgatgctcgtcacccatggctcatggattaccgccaccatctccaacctgctcgaactcgacccggacggcatgaacgcactcggcggcatgcgcaacgcctgctggtgccggctcaaagtgcgccacagcgtcaacggcacccccaccgaacagcccctgtgggagttggaggaatacaacaaggctcccgccatcgccgacagcgccgactgggagaacgggccgaccgatctgcgaggaccgcacatgccgagttggcagccaatcgtctggtgacggtcgctatgcgaaaccccgctcgcaaattcgaacggtgggtctagactaatctcggtttggaaccgtacagcgatagaacagtaggaaagcgcggaaggcgggtgaggcgacatgctgagaatcttcagctcaatcaatggccaggtggagcaaatcgagaaaccggaaaacggctcctggttatgtttgagcgaacccactgatgtggagctcgccaccgtcgcctcgcagaccggcatcgacctggccgacctgcgcgcccctttggatgacgaggaacgttcacgtgtggacgtcgaagacgattacacgatgatcatcgtcgacatccccaccgtggaggagcgtggcggacgcgactggtacgagaccatcccgctgtcgatcatcgtcaccgaaaacctcatcatcaccgtctgcatgcaggacacgcccgtgctccacccattcatggaaggcacgatccgaggcttcaacaccttcatgcgttcgcgcttcatcctgcagatcctgtaccgcaacgccacgatgtacctgcgttacctgcgcatcatcgaccgcgaaagcgacaagcttgaactgaagctgcgccactccatgcaaaaccgcgagatcgtgatgctcatggagctgagcaagaccttggtgtacttcaccacatcgctgaaatcgaacgagatcgtgatggagaaactcaccaccctgcagcgcatcaagcagtatccggacgatgaggatctgctcgacgacgtcatcaccgaaaacaagcaggccatcgagatggccaacatctacagcggcgttcttgcgaacatgaccgacgccttcgcctcgatcgtgtccaacaacctgaacaacgtgatgcgcatcttcaccatcatctccatcaccctgtccatcccgacgctgattttctcgatgtacggcatgaacttcgacggcggcatgatgggcatgccgttcaccgacaagccttggggcttcctgctcatcatcgtgatctccatggtgctttccggtgtggttgcctggttcctcacacgttcgcgcatgttcaagtaaggcgtttgacggttatgcaccactggtcatcgttcgtcagccgtagcatgctccgcgcccgccgcccgatgcggcgcggatttcgctcccggctgatggcaggattcgccgcggcctttggcgtgatattgccattatctggtctggccggttgcggccaaattcaagtcaccaccgtctccggagcgccggagggacccaccatcgccattggggtcgcagccgacgaaccatcggtgggagcatggcatgacggcacataccagggcttcgacatcaccatcgccaaatacgtggccgccaaactcggctatgcgaacaagcagatcgtcttcaagcaggttcgccccgaaaaccggcgctccatgctggacaatggacaggtcgacatggtcgtcgcctcttggcctatcaccgatgggtccagcgcgatcgttgattttgccggaccatacctcacgaccagcgtcggtttgctggtcaggtcggatgagcgtggccgattcaccaatgacgcaggttcggtgggcgacgtaggcgacggcacggtgtgcgcagtgaaaggtgacgagacagtcggcatcttccgcggcaaccacccgcaggctcggattcaggagcgtagcagttatgcgcagtgcgtcacggctgtgcaagtagggtcggcggatgccatagcctccgatatggcggtgctttccggtcttcaagcggccaacgggccccagtatatggacgtgattgcggacaagggcgaggtcagttatggcatcgccgtgagtcaaggcaccagccaattggcgcagaaaatcgcggaagcattggaagacatggttgaggatggcagctggacggccgccaaggatacgttcacaagccaaacaaagctcatggtttcgctgaacggtgaccccaaagccatcgtctcggatgctgaataacgattgacgacgtgtccagttgcgaggctaccttgctgatttatgagtgacaacgagaagagcacgcaaaccgaagagcccaacttccgctacaacgccgcactggcgcaggacatcgaaaacaagtggcagaagatctgggatgagcaaggcaccttctgggccgccaacgtcaacggcgatttgaaggacggcaagggccgtaacgccgaaggccgcgccgcctacttcgccatggacatgttcccctacccctccggcaagggtctgcatgtgggccacccgctgggttatctggcctccgatgtgacgagccgctaccaccgcatgaagggcgagaacgtcctgcacgccatgggctatgacgccttcggcctgcccgcggaacagtacgcagtccagaccggccagcatcctcgcgtgaccaccgaggcgaacatcgccaacatgagccgccagctgcaccgcatgggcctgagcttcgacaaccgccgcacgttcgccaccatcgaccccggctacgtgcgttggacccaatggatcttctcgcgcatctacgattcctggtacgacgaggacgccaccaacccgtccggctccaagggctccgcgcgccccatcgccgagctcgtcgccaaattcgagtccggcgaaaaggccattccgggccacgagtccgatggcaagcagtggtccgacctcactgacgccgagcagcaggatatcttgaacgacttccgcctggcctacatctccaagtccccggtcaactggtgcccgggtctgggcaccgtgctggccaacgaggaggtcaccgccgaaggcaagtccgagcgtggcaacttcccggtcttccagcgtgagctacgccagtggtccatgcgcatcaccaagtacggccaccgtctgatcgccgacctcgacggcatcgattggcctgagaaggtcaagctcatgcagcgcaactggatcggtgaatcccatggtgcctccgtgcacttcaccgtggccactgccgacggtgacaaggacatggaaatctacaccacccgtcccgacacgctgttcggcaccacgttcgccgttgtttccccggaacatcacctgctggagaacgtgcccgccgaatggccggccgatgtacccgaagactggaagggcggctatgccaacccggtcgaggcggtgaaggcctacaggctcgccgccgaagccaagaccgccaaggaccgcgtggacgagggcggtgagaagacaggtctgttcaccggcctgtacgccaccaacccgatcaccggcgcgaagctcccgctgttcactgctgactacgtgctgatggactacggcaccggtgccattatggccgtgcctggtggcgaccagcgcgattacgactttgccgtgaagttcggtctgccggtcatctacaccgtcaagcctctgccggattccggcgacgacttggccaactacgagggcaaggcgccgttcgtttcccatgacggcatcgtgatcaactcctccgtcgaggccaccgaagccaagggcgacgcgctgagccttaacggtctgcgcgtggacgacgccatcgccaaggtcaacgcctggctcgaatccgccggcgtgggcaagggcaccgtaagctaccgtctgcgcgactggctgttctcccgccagcgctactggggcgagcccttcccgatcgtttacggcgaagacggcaccccgcacctgctgccggattccgcattgccaatcaacctgcccgacgtgcccgactacgagccgcgcaccttcgatccgatggacgccgagtccaatcccgaggcaccgttgagccgcaacgaggactgggtcaaggtcgagctcgacttgggcgacggcaagaagacctactaccgcgacaccaacaccatgccgaactgggccggctcctgctggtactacatgcgttacatcgacccgaccgacaccaagcacatggtggagaaggacgagttcgactactggatgggcccgaaccacaacaagtactcgggtgacgaaggcggtgtggacctgtacatcggcggcgtcgaacacgccgtgctccacctgctctactcccgtttctggcacaaggtgctcttcgacctcggctacgtggcttcggccgaaccgttccacaagctgttcaaccagggcatgatccaggcctacgcctacaccgacgaccgcggccagtacgtgccggccgacgaggtcgtggaaggcccggccgacgcctccggcgagccgacgttcacctggaacggcgaacatgccaatcgcgagttcggcaagatgggcaagtccctcaagaacatcgtgaccccggactacatgtacgagaactacggtgccgacaccttccgcctgtatgagatgagcatgggaccgctggacgagtctcgcccgtggaacacccgcaacgtggtcggcggcatgcgcttcctgcagcgcctgtggcgcaacgtggtggacgagaccaccggcgaggcccacgtgaccgaggacgcgcccgatgagaagacactgaaactgctcaacaacacgatcgccgaagtgaccgcggagatggagggcatgcgtccgaacaccgccatcgccaagctcatcgtgctcaacaaccatctgaccggtctgaaggccgtgccgcgtgccgcagtggagccgttggtcctgatgctcgccccgatcgccccgcacatctgcgaggagatgtggagcaagctgggccaccccgagtccctgtccgccgagccgtggccggtggccgacgaacgctacgtgggccacgacaccgtgaccgccgtggtgcagatcaagggcaaggtgcgcgccaagctcgaagtgccggtcgacatcgacccggccgacctcgagaagcaggcgctggccgccgtcgccgaccgtcttggcggcaaagagccgcgcaaggtgatcgtcaaggcccccaagatcgtctccatcgtccctgcggagtgactccatctaagctccccttgtcaggggagctgtcagcgtagctgactgaggggtagccaatgtgcgatatcgccccacctcaattgtggataacttcataagctagaaccacataccccgtttcagctggacaaacgcccatgaatccatcagcgtggatgcatgggcgtttctcataaccatcgcgcaggccatgccgccaaccgtttgcgcgcattcagcaggcagagcgaagccatgccccaaccgcgagcggaacggcccacgacgcctccgccgcctcccggccatgcacggattcgtccggccggccacccgccccaaacggagcagagcggcctgcggcaggcgacccgtgacaaacgtgcgttatcggatctgatcggcgtacgttccgccgatgccgtcggcgaatcagccagactcacccgggatcagccgcgattgtcgttcaccattgggcatgccttggccgtgatattgctgctgatcgtcgcccttggcatcagcttggcattgctggtccaacagtcgatgaatatggccatgctgtctcaaccgaccgccatgcagaccacgggcggctccgctggagatcagacgatgccatcgcagaacaccacggatgagaaacgcacggatccgcagcagtcggagcattccgatgccacagcgaaccccgaatcggataccacgcaatctccgcacatgcagacggacggcagcgatgccggcgctgccacgcatggtctcatcaacctcaacacggccaccgctgaagaattgcaatccatcaaaggtattgggccggttaccgctcagcggatcatcgatcatcgcacggcgattggcgggtatgcatcagtcgatcagctgctggatgtcaaaggcatcggctccaagacgctggagaccatgcgagggcaggtgacggtcggatgagcagggatcggatactgcgcgagcaggggagccgcgattggaggatgctgccgatcgccatagtgatgtgggcggcgagcctgggagcgcacgcattattcgcatggaggatgtctgatggactcggcaccggtcaggcaaaggccgatgccggagctggcattgacgtcaccataatcggcatggaatggcctgtcacacgaatattacctataacagtggcgtcatgtgccgctgtggcggcgacgatcgtggtgtctttccgcctgcggatcaggtggacgggaacattgaccgtatgcgtcgcggtggcgtgcatcggcagtatgacggcaatcgcgtcggacaccattgcctggcatgatcctgcctccgcacaagctcgccaatccagttcataccacgaagtcatggccacggtgacgacgcccgtgatcgcttcggaccaacgcacatacgattgtcagacggacatacggctgagcggcatcactgtggatggcgcggacgtacgttccacggtcgccgtgcgcgtatacgccgatgaatcgtattgtgggcagttgcgtcgaggcgcggtctatctgttgacgggcgtattgcagcaagcgcgatatggacgcataccgctatggctgctcttggaaggaaaacagccggtagcgcaggtgcgggctccgccgtggcatctcgccgcgatcgcacatatgcaggaggcgtttttcaccgtgaccggacaattgtccgatcaggggcgtgtgttggtgccgggattgacgatgggtgtgcttggccaggattatatcggcggcgatgccggtccgatgccggtcaacagcacgtatgcgcaaacgttggaaaatcagttccgccggtccggcatcatgcacctcatggccgtatccggcggccacttcgtactggtggcaggactggtgcgtcggttatgcatgtggatgctgcttgatcggcggctgacggcgttgctggtctctggagtatatgcgctgctggcattggcgatgttccccagtgattcggtcacccgcgcgttcatcatgggattgataggtgcgttggcgtatgcgatgggacggcgtacgcaagcgttgagcgccctgtgctggacgataatcggtgtattggcggtgaacccggatatgtcggccagctacggattcgccttgtcttcggccgccgtactgggtatcgtgctgtttgcggggcggctggccggtgtctttgagcgagcgatgccgcacagcatcgccgaaatgatggcgatgaccgtggccgcgcaattgttcaccctgccgattcaggtgttgatggaaccggaattgccgttgctgtccgtgccggcgaacctgctggtgtcaccgttcgtgggattggccacgatggcgggattgatggcactggcgtgcgcatggtgcacgccatggctggccggcgtattcgcgtggatatcgtcatggggcacgctggtgatggaacgggtggcgttgtggctgggcggcagcacgatggccgtcatcccatggaaagacggcgttacgggtgccgtgctgattgtggcggcggaaatcggtatcggcatgctactggtgttcgtcagccgttgcctccagcatgtccgtcgttatgaggccggaatgtctggcgtgcgcttcggttccgcttggcgcgtccgcctcagtctctggtgtgaggagacgagacgcctctttacgcggcggcaagccgaatagccaatgcggtattcggtgcagcaaccatcgcaatcccagccgaataccactatcttgacggcagcggcaaaatcgtgatgccggcaggtcattgtccaacctgtgtggcgagatggtggcatggcgaaaacagcagcgaatgcaccggtaaccgtggtgcccggaggcgactcgtatttgaacgacgcgcgcaccaaggcactgtgcgcgcaggcgttgaaggcgcggcccgacgccgacctcatcgaactcgacgccacatcggccgaccagtatgccttcgatgaagccgtcagcccatcgttgctttccgacgttgccgtggtcaaactcgtcaacctgcagaatgccgacgacaagctcgccgaagctctggtggcgtacaccaagcaggccgccaaggatccgaacggctccagcgtggtgatctgccagcacgagggcggcgtcaaagggcgcaaaatcatcgaccaactggtgaaagccggcgctcgcaaagaggacgtgccggatttgaagaaaccggatgcacagctcaatttcgtgctcggagaattcgagaaacgtggtcgtagagtcgaaccgatggccgcacagcagctggtatccgtactcggcggcaaaaccggcgaactcgccgccatgtgcgagcaactgtgtttcgactttgacgataatccgatgggcctcgaccgtgtcaaccagtatttgaccgccaatccgcaggtcaccggttttgccgtggcagacaaggccgtggaaggcaaaaccgcagaagccatcgtcatgatgcgtgcagctgtggaacaagggaccgatcccatcgcgctgatcggcgcgttggccatgaagctccgtaccattgccaaagcctcggcggtacgggccggcacgatttcccaggccgaagcgaaaaccaatccttgggtgctgaagaatgcgatgcgccaacttggcggctggacttcggcaggactcgcgcattgcatccgtatgctcgcctgggcggatgagcaaagcaaaacaaacggtggcgacccggtatatgcactggaacgctgcattgaagacatcagtcataaaggtcggtaaaagtcgataaaggggtatttatgagcgaacacactattgcggctcccaccagcgaggccatgcaggagctcggccgtcgtgtggccggaatggtacacggcggcgatgtattgctgctctcaggccctcttggtgccggtaaaaccacattcgcccagggcttcggggcggggctgggcattaccgaacccatcgtgtctcctacattcaccattgcccgcgaactcgacgggcatttcgccgacggcactccgtctcatctggtgcatgtggatgcctaccgtctgggcggctcagcctatgcgccggggcaggacgccatcgggcgtttgttggacgagctggaatcgctgggattggacgaagaacttgaagaccccggcgagaacacggtggtgcttatggagtggggcgaacaaatggccaccgccttggcgccagaacgacttgaaatccatatcgatcgacctctcgattcctccgatgccgcatccgctggatcagacggcgaactcaccagcaacggcactcgtaccgtcgcattcgtcccagtcggcaagcgatgggccgcgttcgatctgcagtaagccatgcgcctatagactcctcgatgtacactctctagaggctttacgactaggaggattcatgggttgcacgttggtgattgacacctcattcggctcgacggtcggcattgtggggcgcgatcccattgtagagaccgattcgcgcacccatgtggagaaactgcaggtcaatatcgcgcgcgcggtcgaggaggccgggttcccagcatctgacattgcaacagtcattgtgggtaccggtccagccccctttactggtctgcgtgccggtatcgttacggccaaggcactggctttcgcaacgggagcgacgcttatcggccataatgttcttgagtctcaggtgcaatggaatctcattcgccgtggcaaagccggcactctcggcgatactcataaatgccatgtgctcactcttgccgtaaacgacgcacgccgccagcaactctattttgcgttgtactcggacccgctcgttggcgatcccgatggcgaaaccgtggcgacggctctgattgacatggatatcgattaccctgcatccattgcgcagcgcgtgaatgatgccgttcatacgtaccgcgacggacttatgccagaagacagcaatgtggatgtggtcgtggatgttgtgggtcatggggcccgcaaatatgcggatgcgctgggtgcaatcgagcagcttggcgacatcaccgatgaatccgtattggaccaaggggagcaaggtctcgctatctttgccactgatgcggaactggttgccaaccgtaatcccgatacgccggtcgaaccgttgtacctgcgccggccggacgccgaagtgccgaacccgctgaagcacgtgctcggccatgccggtgccgataaggcgtgagacgggttgattcgatgattgttgacatcactgccgtaagtcgtgatcttgcggttcgctccatcgcacagttggaaggcgaactgttcggccgcggcgcatggaatgcgaacatggtgcgagaggaactggacgcaccggcccgcacgtatctgctggatgtgctgggagaggtggaacaggcggttgtccgcggctacgccggcttctggtatgacggcgaggacgccgagctcatgaccatcggcgtgggcaaggcataccagcggcaaggcatcgccgctgcgttgcttcaggcactggtcgacgaggcgaagcgtcagggcgcctcgcgcatgctgctcgaagtgcgtgtggataacgaccctgcgctggccctgtatcaccggttcggattcgaacgcattggattgcgcaaacgctactaccagcctgaaggcatcgacgcatacaccatgagcctggacctgaaacctagggtcgtgggctttgccgccccgcagacggcatcggcggacactgaagacatcactggcaagcaaacggagaagaacggagaagcacgatgagcgaaccggttgtactgggcattgaatccacctgcgacgaaaccgcggctgccatcgtacgcggccgcgaactgctctccaacgtcgtggcctcatccatggaggaacacgcgcgatacggcggcgtgatccccgaaatcgcctcccgtgcgcacgctgaggccttcgtgccatgcgtgtccaaggcgctcgccgacgcgaacatgacgttggcggatgtggacgccatcgccgtgtccgccggtcctggactggccggttgcctggccgtgggcgtgtccggcgccaaggcgctggcctgggctgcgaacaagccgatttacggcatcaaccatgtgatcgggcacatcgccgtcactcagctgcagttcggcccgttccccaaggacacgctggctctgattgtctccggcggccacacctcgctgctgcatgtggaggacatgccgcgcaagatcgatgtggtgggcaccacgctggatgacgcggcgggggagtgcttcgacaaagtcgcccgtctgctcggcttcccgtatccgggcggcccgcacatcgaccgccacggacaaaacggcgacccgcacgccatcaaggtgccgatgggtctgacccaaggcaaggccggtgccgcgcacccgtatgatttcagtttctccggtgtcaagaccgccgtggcccgttgggtggaaagcgagcaggccgccggccatgagattccggtggacgacgtgtgcgcatccctggccgactccgtggccaccgtgctagcccgtaaggccatgcgcggctgccggcagtacgattccaacacgctgatcgtgggcggcggcttctccgccaactcgcagctgcgcgccaaactgctcgaattcggcgagaactacggcgtcgacgtccgtatcccgcaaatcaagctctgcaccgacaacggtgccatggtcgccatgctcggcgtgaacctggtcgaagccggcgtggcccccagcgcccccgacttcccgatcgactccgccatgcccctgaccaaggtctcgatgtaagatttgcacggtattcccaaactgatactgggaataccgtgcctctcatcggtgaattgacagtgacctgtctgcctgatgtgagtagtggtgaggtcttcgccatggatttcccggttgatgatggggtgtcgtgtctggtcaccaatgcgatgaaaataaaaaagcctcggagaaccgaggctttcgatggctcctgcgactgggcttgaaccagtgaccgtccgattaacagtcggatgctctgccaactgagctacgcaggaatattcaattttcatcccgtccggagttacccgttcaggtgagctcctgcagctgggcttgaaccagtgaccgtccgatatacgattctggcttgcagccgtagggcttcttgcaacaggagtagagagtacacctgctttgcttgtccttcaaatcggcgtgtctcgacaattcctctcgatgcacccggttttccgaagagcttcagccgtcggcgagaacattggctaggctccatgcaatcgcaaatagcattttctgggaagtgacgaagacgtcacttcctttttctatgcgaaggagctgccatgaagtactggaactcgaacaggaaaagctgcgagcatgtcgagccacgcgaggattggaaggaatccatcgaactgtggatcgactggatggaagccataggccgtacggaagagaccttgagaacccgatggtaccagatcgtccgtttctccaaaatcgtgaacaagagcatcacggacgtgaccgaagacaacctcatattttatcttgccggcatgggcaccgaaggcagacgcggagtgcgcagctgcgtcaaggtcttctaccaatggggcatgaaacgcgggctcgcccgctgcaacccggcggactcgtgcaggacgagatgcgcaacgccgtggaatccaccacacgcaccgacatgagattgaccatgcccacgaaccaaatcgtcggcgcaaacggcgtcgccacgtactcactcagcaccgcaagaataggatagacaaaaaaggtatgcgccgacatgcgcaaagaagcatgtcggcgcataccggcaccgatatcagaggcgtctgccctcgtcggcggaaggcatcaggccggacaacatgcccatcgaatcatcagtcatggatacggaatcatagatcggatcgattttcgtgttcgcactatccaccagcatgaggatccggtcacggatacgaggctccacatccgagtacgcctcctcgatgttggaaaggaccagaccggccatgtgcctggcctggccgacgacccgctcgggatcgaggtcgttttccaatgccagcttctcccaatgacgaggcgtcacatccctggcaccggtgacgccgccgatgcgcataggcggctcggcggacacccaaggccagaaggtcgtggtcaaaacgtcgtacatgggagaaagttctccaggaacctgccaggggctttccttgcccatttcccgtcaagagggagggaaaggcttatgggcatatccacacccttggcgtattcgagggaaacattcccctcggaatcctccagaaacacaccaacaggagaatcgcccatccaggcgtgcagctccctcaccgggcgctcccgagactggaaagcggcaacgcggctatgtctattcccagcgcatcggctgcggggaacaccgcttcaatcggagcttcgccccgctggagcaaatcatcggcggaccgggggtcgatgccggcccgggaggcgagatcaccggcgttccaggaatggttcgccgcctcttcccggaaagcagccgcgatatccgattcggtgcgggcgaaaagagtccggcgtccacgcggcgcttggaaacggctgaggtaacgcgcgtactccagttgcgcctttgtcggctcaggcggtttatagtccagattcgacattgcaggcctccttaacactcgattattctagcctatacagagaaaaaggacatggaatcatcgttgccgtccgatgatcccatggatggctcctggagacgcatttcctcgatttctgctgcggtctgcttcgtcgcctgttcgagctggtcgcacaggctgacggtcttgcccgtgaaagcggccgcgaggtaatgcgggtcaatgtccaaggcgatggcatcggcgcttcgcagacattccccggcctgctcgatcaatttcatggcctgttccacacgcgccttggcgccatcgagaccggatgcttcaagcccctgttccatgggctcgtccgaccaggagcggatatcgagccgggtatcaagcgtgaaatccacccccgcgtcacgcaacgcgagcacggcgctgcgatagcgcccaccctgccagtccgctgtgacccgatccgcgagctcctcgccctgagtcccgcattccccggcgaggaatccgcgcagcgcctcctcgtcatcatcctccatgagcgcggcactgacggccatatggttccgaccgtcatacgactcgaaatacagcatcgtgtcgggcaaccggtcgcggtccgccacggactgtccgccaacggcaacgaccacgtgcacatcatggtgcagctcgccgccgacgacgggtggatcaatccgtaccgcgaccggatcaacgcgcagagatcatgcaggcggatggagaaatcgcgccccgaactggtcggactcgcacgctccgataccggcacgcgcgtcagctggcagtacgggcaatggcgtcaatgggccgaatggaaggcgcggaacgggtacggcgacgacatgcgattgaaacgactgcgcgacgactgggcggacgatgccagaagccgcagcctcgccgtccaggaatggcgcgccgcgatggagaaccgcccgcccttcctcgatgacggacgagaaagacacccggagaatctgtccacgcacgacatggaacgcctcgtatccgaagcgttcgccatcgccgccaacc

SEQ ID NO: 2921 - DNA, 2589 bp, Unknown
  R19_24m  MAG No. k141_2299
cgtcatcaaggctgccttcggcacgccagttgctcacgttcggagaaggatcacgcacaatgtatccggcaacccagatgcgggaggactcagggtcttcgctgttgacgccggtatcgccgatgtgcgggaacgtctgcacgacgatctggcgatcgtagctcggatcggtgagcgtctcctggtatccggtcataccggtggcgaagacgatctcaccggtcgtctcaccgagggcgccgtacggctcccccacatatacctgtccgtcttccaaaacgaggactgcatcatccttgtcatacatcggaattgcgatggtcccggactcgttctggctcaccaaaacccccttatgtttttcgggtattcgtaccaaggttaacggccagcgcagactcacacgccgttgggcgcaaagtctcaccccgctggcggggctgccggcaaggtgccgacttgagaatgtgtggcgacacaagtgtccgcccatgaaaaagcctcccgaatggggaggctgaacaacaaatgactaatcgaccgtcggctgaatctcagcggacggggcagcgggctcgtcggatgcaccggacgaatcgggcgaatcggaaacatcgccctcatcggtcggatcggatgcggcggcatcggaatcggacgattcctcatcggcctcttctgccgcggactccggtgccggtgctgcgttcttggcggtgcacaccgcagacagcaggccatggatgaaagcgggcgaatcgtcatcgcacagggtcttggccaatgccagagcctcgtcgatggcgaccttgtccggcacatcatcgttgaacagaatctcccaagcggcgatacgcagaatgttgcgatcgaccacgcccatacggcggaccttccaacccgtggagtgttcgtccagggtcatgtcgatctgacgacggtgctcggccacgcccttgacgatttcaatggcatagtcgggaagcggggtctgggcaccgggatgtgcgatgcgctcgtcaagcagggcgagaatatcctgacttttttcgtcggcttcgtacagggtgttcagagcccttttgcgcgcggtggaacgtgccatactgctgctgtcctagtcctttatacggtcggtcgtctgttgaggatgcggagatcagttgttctcgcggccggtgtaggaaccatcctcggtgttgatcttgacgcggtcgccctcattgatgaacagcgggacctgaatctcggctccggtctcaacggtggccggcttggtgccggcgttggagcggttgccctgcaggcccggctcggtgtgggtgatggtcaggaccacggagcccggcaggtcaacgctcagcggggtgccgtcgtggaaggagaccaggcagtcggtgccttcgagcatgaacttggccttgtcgcccacgagggtcttcggaaccatgatctggtcgtaggtggtcatgtccatgaacacgaagttgtcgccgtcctcgtaggagtactggagggtgcggttgtcgacggtctcgaattccatcttcatgcctgcgttgaaggtcttgtcgacgatcttgccggagagcacgttcttgatggtggtgcgtacgaaggcggggcccttgcccggcttgacgtgctggaacttcatgacggtccacagctgtccgtcgaggttcaggacggatccgttcttgatgtcgttagtagtctgtgccacgttattcacctatttcaaattcaaactagcttaggcaaagcccaaaaattgccttggctattatgccacaccgggtatacaggaagtgaacgctggggtttcccacgtggcccccgactagactggatgaatatgcgatccttcttcgaagccatatccgtatcctgcgtcgtccccgcgcaatcgccggcagacgacgaacgcacggtgttcgacaacctgtccttcagcatggaacgcggcgacatcatcgatctggtgggtccgtccggctccggcaaatcgagtctgctgaccgcatgcgcccgactcaacccgcacgcacacggcacgttcgtcctcgacggcgtgggcagtgacgaattcagcgcacagcagtggcggcgggacgtctcctacctgccgcaaaaaccgatcctgaccggcaaggacgtggccgaggcgatccgcctgccctggacgctcgcgattcgcggcaagggcggcaaggccgagcagctgctgcccgacgagcgcatccgcacgacgttggacgcgatgggctgcgaggacatcgacctggcgcgcgcgccacatgacctgtcgggcggtcaggcggcgcgcgtggcgttggcccgcacgctgctcaccgacccgaaggtgctgctggccgatgaggtggacgccggactcgacgacgacaacgcgtccaaagtggccgcgatcatggcggacgcggccgcacacggcatggcgatcatccgcatccgacaccgtccgccggacggacgcgccacccgcacgctgatgctcgatgcgggacggctcaccgatctgacgcgggataaggaggtgcgcccatgaacggcgcctacgacatcgac

SEQ ID NO: 2922 - DNA, 16328 bp, Unknown
  R19_24m  MAG No. k141_2342
agcaaatcggacaccacatgcacgtcacgaatctccggcacgttcttcagcaccgacttgcccggtgccagcaacgcggcgaccatcgccttgctcacgaagttcttcgcgccacgcaccttgatcgtgccattcaaaggcttgccgccctcgacatgcaacacgtcatccggattctcagccacgccactctcctcaatcaatcaagattcaaaaaatgctaccgtccagtttgccataagccatgtgccgactccgtgaaatgcaccccagccgaactttgatcaccgtgcacaacggatcccataccccccgtcgaatcaaaccgataacgtgatcttcctcacatttgccgccacggtgttctccatacttctacgctacgattcagggcaatggcatcagacgccatggccacaagcaaaggagcattcatgaccacagtcgccgtcatcggctgcacgcacgccggcacgttcgccaccacctcgattctcgccgagcaccccgattggaccgtccatgttttcgagcgcaacggtacgctgtccttcctctcctgcggcatcgccctgtgggtgggcgaccacgtatccgacccgaagaaaatgttctactcctcccctgccgctctggccgaagccggcgcgaccatgcatatgcgcaccgacgtgacgtccgtggacctcgacgccagaaccctcacctaccgcgcgctggacgaggccggagaccccgccgaacagaccctcgctttcgacaaactggtcgtgaccaccggctcgcgcccggtcatcccgccgatccccggcatcgacagcccgcatgtgctgctgtgcaagaactgggatcacgccatcgccatcaaggaaaaggcgaaaaccgccaagtcggcagtggtgatcgggtcgggctatatcggcgcggaaatcgccgagcagttcagcgtcaccggcgtcaagaccacgctggtcgacggccttgatcgcccgctggccaataatttcgataagaccatcaccgatcaggtggcggccgcgttcgaggagcacggcgtcacgctcgcgctcggccagaaggtggtcgagttccgcgacaatgacgacgacaccgtcactgtggtcaccgaaaagggcgagtacacggccgaaatggcgattctggccgtcggcttcctgccgaacaccgacctgctcaagggcaaggtggacatgctgccgaacggcgcgatcgtggtcgacgactacatgcaggcgtccgcgccgggcgtgtacgccgccggcgactccgccaccgtgttctacaaccccaccggccagcacgattacattccgctggccaccaacgcggtgcgccagggcctgctggtgggccgcaacatcgagacgccgaccgtgaagtacatgggcacgcaggccacgtccgccgtgcagctgtacgatctctcgctcgccgcctccggcctgacccgcgccggtgccgaacgccgcgggctcacggtccgcgagacctcgctcaccgaggattatcgcccggacttcatgctcaccaccacaccggtcacgtcgatcctgacctgggatcctgagactcgtaaggtcaagggtggccagttctgttccaaggccgacatttccggcgcggcaaacgtgatttccatggcgattcaggccggcttcaccatcgaccagctcgccaacgtggacttcctgttccagccgaacttcgacaagccggtctactacgtcggagccgtggccatgaaggcggcggccgagtaagacggctgtacccaccgcaaaaaagaaaccccggcgtgatgggcgccggggagagaaaggagagaagaagaaagaggttaagttatgcagcttgttcggccgtgattacatataacagcaacagtttcaatgcaacatgggcactgtctgggaatcgtctgggaatcacggcccgtacaggctgttgcttgtttttggagccgatttaccggctggccttgatcttgtgggccagttcggcgtcccacatcgcgccggtggcggacatcaccgagtccgcgccggcgtcacggtacgcctggtagtcggcgggcgagaccacgccgccgacgccgttgatcgcgaaatcgagcccgagcttttcacgaatcgcggccagacgggcgaccatgtcgaggccggcgccacgaatcgcattgccgcacacgcctgagtgatcgcggcccgcgccgggcagggcctgattgccattggcatcgaccagtttggcggaaatcgtattgatggtgctgaagccctgcacggtgccgtggcccacggtggaacgcaccataagctccagagcgtcgtcgctggggatgtaggcgagcttgaccatcagcgggatgtcgccgatctcctgcttcacggcctcggtgatgcggcccacgagcagcggattgtggcatagcaggcggttgtagccctcgttggggcagctggtgttcatcaccatgagcttggcaccggtctccttgaccaggcgggcggtagtggcatggtcggcgatgtattcctcctcgctcatgccctccacacgcgagccttggaagctcgggaccagcacttgaccgggaccggcggcctcgatggcggcgcgcatgtccggctgccagacgtcagggctctgcgagggcacaccgaagctgttggagatggaaatcggctgttcatagttggtgtcggccagcacgccttcgtccagttcggcgctgcccggcgtcagtgaaccgtccgccgacttggggtgtacggcgagcacgttcgggaacgggttgcagccccaggcgcgcgaacgcacggttttgtaggtcgccagatcgaaacccatgtggaaagcggccgtggtgaaacggctgttgagcagcgggcctgcgggaatgccgaaaggcaggttgaccggctggcccaaaaaggtggccaaggcaccctcggaggcaccctcgctggtggttccggcggcatcggcaccgttgccatccttcagcgcctcggcgaacgcgccgaacggcccttgctcatagttgtcttcgtaactgcggctgacatcgtaaaacggctcaaaatcactcatgcttcaacgataagccaacctgcatgcgcacacgcacactcaacccatcatcgcgccgacaaacgaaataatggcgaaagcggcattggctaccacaaagatgatgaacgtcggagctgcccagccaaagtacgtgtctggaatactacgattcgtacggtgatattggcgcatctctttgccgtatatcacgaatatgataatcgatccgatcacgccgatcacagatagcgacaatgagaatatcaaatatgcgttgtcatcaagatagttgccggcaagggtatcgatggcgccggaaagaatcgcattgttgaagatgtgcagtgcaatcgaccaaaccaacgagtattccatggccacgaatcccagaatcaggccaaagaggaacgcgaatgtgccttgcactacgtcgtcatggaacaggccgaacaccattgccgaggtgacgatggcgaagttcttgcccaacggcttgagctccttcatcagtacgccgcggaacagtacttcctcgcaaatcggagcgaccagcccaacgtacagccacatgcttacggtgacgctggattcggcgatgctgtctgacgtgggagaggcaagatcggtgcccagcatggaaaaagcgacctgcaccaacataacgatgccttgcacgcccatgcccagcacgatgaacatcaacgcccagagaggctgcatgcgcccgccgccatattggctgatgtggccaagctgattgggctccccgtacgagtcgcgatgctggccaccaagccagaattcgcaggtgaagatgtcacggtggcgcatgagcagcagaaatccgaacgcgacgaacaccgatatcaggctgatgatgccatcccactgcacgccggacaaatcgctcgcggttattacgccgacgataatggtggcgaccattgcgcccaagagcatcatgccttcataggcgagagtcagtcccattacacgattgaccaccttgcgacgccacgtgcgccatacacggcgaggatcgatcggcatgaccacgggcattgctgcgggcatcgtggcaggcattgcgttgggcattgtgactggcattgccggagccgtttgcacgaatggttgcggcgcagcggaatagggttgtggcgcgtagcccactggttgagcgtagtacggatgagcgaggggctgtggagccgactgttgcgccgggtatggggaataggcggattgcgccggatacgtcggctgcgtgggatacatcggctgggcaggatacgtaggttggacgggatatgtcgggtatacgagctgcgcggcgtattgtgcaggctgcacagcaggtattgcggcttgcggcacaggttgtgaaacaccttgtgaaacaatccgtggaacaccccgtgaaacatcttgtggaggtagcggttgtgcccatgcctccggctgacccgcatattgcggctgcatgctcggcccaggctgaacatactgtggcgtctgtggcatcggcgtctgtgactgtgccgcagactgcggtgccggtcgaggtggcaacggttgcgctgacagcgattgcgccggagccgtatcggaatcgttcgacggattcatgtcattcatggtcatgatgctcaacctaaccgtcattactggatgaatcgtgattatgtccacaaatgtgtacgaattcaggcacagtatttcgaacgctaggacggagttcatgagtgttgaggaaagcgccgccacgccggtgttggtggctgcggtggataacgaccgtatggcgttgttggcgctgaagggaatattgccgcaactcctgcccgccgcgcaatggatgtggggcgcgggcaccagtgagacctttgtttgatgcgatgcgagcgacccaataatctcaatcagacacagagccaacggccctgggcctgcaattatggactcgcctttcggcgaggctcaatgctggcctcgctgctgtcgcagctcggcacagggcctgctgaaagcccaccgggctttcagcaggccgatcgcggctaaataatgccgcgatcggccaacggccctatccagtctgcgtcctcaggctcgcgggcggactcgattctttcttcggcccagtgtttggcggggatggtcttgggcttgaaggggaacttttcggcgcgcatcttttcgtaggcggcgatgtcgtcctcgtgctgcagcgtcagatcgatatcgtcgtagccgttcatcagacgccaacgcacgtaatcgttgacctcgaacggcagggtcacgtcgccgcaagtgacagtgcgggtctccagcgagacagtcatctcacgaccaggctcttcctccagtagcttccacaggagttcgacggactcctgcggcataatcgcggccagcacgccgttcttggcggtgttgccgtagaagatgtcggcgaagctcggcgcgatgaccacgcggaaaccgtaatcgtgcagcgcccacacggcgtgctcgcgggaggagccgatgccgaattcggggccggcgaccagaatctggcccttaccggcgtattccggcttgttgagcacgaagttcgggtctcggcgccatgcgtagaacagggcgtcatcgaagccggacttggtcacgcgcttcaagaacacagcgggaatgatctggtcggtatcgacgttggagcggcgcagcggcacgcccacgccggtcagtgtggtgagtttttccataacaattttcctttcggggatctctcccccagtcagtcttcgactgacagcccctcgtcagagggggctcacgtgtattgactcagagatcggcgggagacgagattgtgccgcggatggcggtggcggcggctacggccggcgacgccagatgcgtgcgcgagcccttgccttggcggccctcgaagttacggttcgaagtggaaatcgagcgctcgttcggcaccagcttgtccgggttcatgcccaggcacatcgagcagccggcgttacgccattcggcgccaaagtccttgaacaccttatcgaggccttccttctccgcctgcaaacgcacgcgggaggaggccggcaccaccagcacgcggtggatgttctcggccttgcggtggcccttcataatcgcggcggcctggcgcaaatcgtcgatacgaccgttggtgcacgaaccaatgaacacggtgtccacggcgatgtccttgatcggcatgcctggcttcaaacccatgtatgcaatcgcacgttcggcggcggcgcgcttggtggcgtcggcgatcttgcccggctccggcacggaggcggtgatcggcagaccttggccggggttggtgccccacgtcacatatggaccgagcttggtggcgtcaatatccaccaccttgtcgaatacggcatcgtcatcggtcttcagcgtcttccagtacgccacggcctgatcccacagctcgccttccggcgcgtgcggacggcccttcaggtactcgaacgtggtctcgtccggcgcgatcatgccggcacgcgcaccggcctcgatggacatgttgcacacggtcatacgttcgtccatggtgaggttgcgaatcgcctcaccacggtattcgatcacgtaaccctggccgccgccggtgccgatcttggcgatgatcgccagaatgatgtccttggccgtcgcgtccgcgggcagcttgccgttgacgttgacggccatggtcttgaacggcttcagagacagcgtctgtgtggccatcacgtgttcgacttcggaagtgccgatgccgaacgccagcgcgccgaacgcgccgtgcgtcgacgtatgcgaatcaccgcacacgatggtcatgcccggctgggtcaggcccagaatcggggcgaacgcgtggacgatgccctgatcggcgtcgcccagcgggtgcaggcgcacgccgaactccttgcagttcttctccaaagtcgtcaactgcaacgcgctcgtctcatccgggttcgggcgatcgatatcaacggtcggcgtgttgtgatcctcggtggcaatgagctgatccacgtgacgcggcttgcggccggccaagcgcaggccctcaaacgcctgcgggctggtgacctcatgcatgagcatcagatcgatgtacagcaaatcaggagctccgtcgctgcccttgcgcaccagatgatcggcccagaccttctcggccagtgtcgttcccatagtgattcctccaaaaaattccgcgcgaggtattgtgttcgcgccttgttcgtggtattagcctatgtgcttgcgatgggcccggccatgagcatgccggatattgagatacggtcaaatgatggcctcaatatgactcggacccgactcgaacatgacctagtcatgactcggttccgctccagacatgtctcttcggcatccacgaacgccctttcaacttcatggccaccctgtgagacacttccccaatttgccatttcactatgtgagatggcataatcgcccttattatgactgattcccgggaagaaccattgaacaacagcttgaccgagtccgagccggttgaagacaccaccgccaaggacgatggggaaatccattccggcgttggcgtccttgataaaaccgtaaagattcttgacgcactggaatccggcccgtctacgctgggccagcttgtggccgccaccggtctcgctcgaccgaccgcacatcgtttggctattgcactggaacgccaccgtttcgtactgcgcgaccagcatggccgattcgtactcggctcccgtttcgccgaacttgccgccgcagcaggcgaggatcgtctgctgaccgccgccggcccgatcctgcagaccctgctcgatcgcactggcgagtctgcgcagatttaccgccgccaaggcgatcagcgcgtgtgcatcgccgctgtggaacgcacctccggcctacgtgattccattccggtgggtgccatgctgtcgatggaagccggttccgccgcccagattcttctggcttgggaggattccgaccgtctgcaccagggattgcgccacgccaagttcaccgccaccaagctggccgccgtacgcaagcgcggctggtccgagtccgtgaacgaacgcgaagagggcgtgtgctcgatttccgccccgatccgcaacgcctccggccaggtcatcgccgccatctcgatttccggcccgaccggccgcatgggtgccgcccccggacgccgctatgcgccgctggtgatggccgccggcaagtacctcaccgaggcactggtcaaagccgttcgctgaaacataccagtcaatccaaccgatagcccaaccggcagaaatcccgcgtcacaacgaaagagacgcgggatttctgggctataggaacaagagtgtggtgttcgcgcaggatgggcaagatcgggtagccggcggtggcgatggtgacggacggtccgaacatcgtgtagtcgccgatccatatctccgcgtcgtcgaccatgctcatgaacgcgttgatgtagatgactttgccgaggtgtacgcgacggcatccgttgctcgcatgcaatggcgtttcgatgtgcacgccgtcgccgacttcggcgcacatgtctttgagcagttcggcgcgccgctcccgttcggtgggtttggtctggttgtattcccatagtttgttctgccatgcgagctgtccgtccatgatggccgggtcgtcgtagtggtatggcaatcccgcatccctgcgcgccgtattgtccatgtcgtagtcccttccgtatcggttcatcggtctcggcccatcccatcgtcctttgttcgggccggaacgcacacggcctttctcaccagcatgaggccgcccgcgctgaccgattcccatcgcaacgtcgccgcacgcccccccacctcgcgcgccgtccgacacggtacggagcgttcccgatgcggtacagaccagaccggcaatggccacaggacgttccctctgacgagacgatgccgtaggcatcatgcaggtaatagcgagccgacaaaacgcgcgcagcgcgggttccctctgacgagggagctgtcggcgaagccgactgagggagagaccgcggccaaaggccgcaaaaacaccgcatcggccgcaggccgattcctatgaagacaaacacgccatgaatccgcacagtgtaggatagttgacaacacgagacgctataaggcaaggtgctcaatgacgacacaacccgatggaacatatgagatgatcatcacggccgagtcaattcagtcgaatgagcccgataccgattcctataccgacccttccttcttcgccaacatgggaagtgcgtatacccccgaagacgtcaagttcaagcctgcggacggcgaaccaatcaaacgaaatcgtaacaagggagaacgccggatctcatgtcagacactgccacgtctgacctgtcaggtattcgaagataagcttctcgaattgccgtacgacaagcgcgagtccttccccatctgtcggtacggtctggataagccgctaatcaccggcatcttccccgatgaggaacgtttcagaagcggctgcaagaactcaatcgaatacgtgcgttattggcgcggaacggatgtacagatgtatctctactgctggaacatcttctcgacgctattcttcgttcaggagtgtctgaaacgcttcggcaaaccgaatgacgccttcatcttgcggtatcgtcgtaagacctcccaagaagcctcgaatgctgacgcttcggtagaagaagaaaaaggttacgcttcacccgatgatgagaagtcccctgtctacaacaataagtattcgcagacactgttggattccaagaacatcatcttccgtggcgctcccggaaccggtaaaacctatcttgcccgccaaatcgccgccgatatcgtcagcgacggcaagcgcggcgattggtccaagcttgatgatgaacagcgcagacgcatcggtttcgtccaatttcatcccagctacgactacacggatttcgtggagggcatccgccccgataccgaggagacggatgcgacgggaactcacggcttctccatccaggacggcatattcaagcgtttccttgacaaggctcgggacaacgtcgaacagtcccggctttccaaggaggaacggagggaaccatccgttcgggaacgtctggacgcctactttgattctcttgatttcgacgacaatcagttcagaatctcgactggtaagcctttccaagtaaccaacgtcaccgaacatcatgttcttgtgtacgctccccacggcatcaaacaggaattaagaatacgcgtccaagaccttctggcgcttatgcaatccagcacccctccaacaaatggtgaagacgtgcatcatattctcgagcgaaagcgtcgacagcgggaggactcctatgcattcgccttgctacaggaaatccaaaagcacaagccttcgtcggcttcacgagcatccgaaaaggttcttcggaaacccttcgtgttcatcatcgacgagatcaaccgaggtgaaatctccaagatattcggcgagctgttcttctccatcgaccctggttatcgcggccctgccggcaatgtgaccacccagtacggtcatgagctgtatgtgccggacaatgtctatatcatcggcacgatgaacgacatcgatcgatccgtcgacacctttgatttcgcgatgcgccgacggttccgcttcatcgaggtcaaggccgaagacgggttggacatgcttgaagaacttggaggcttgtcggaggaagccgagagccgcttgacgaagctgaatgagaccatatcctcccccgatatcggtttgggttcggattaccatgtcggccctgcgtatttcctgaatctttccaaatccgaatccacggcgaaagcgttcgatgacctttggcgtgatttcctgcaaccgctattgcacgattacgtgcgcggcatgtataacgaaacagaaatcatggagaagctgaaagcggcatatgaagatgcttcggattcgccgcagccagcggaacggtcggtatgagtaccgtatcgatcaaagacaactcccgcattgaggcaaccacgctggctcccgtcaaggatatcgtcgcggctgtgtccgatcgttccatagcccggctttcgcaagaaggtctgctggtgttcccgcagtcgattcaggattctccggacttggacgaatgccagatggtattggaaaaggacagtggaggctaccgctcagggaatctgatggggtaccttggctatcaagacgaacagttggtcatcgattcacgttttgcctcatccgcaggggatttcttcctgcaatacatgatgtatcgtgtactgaatattcccaacctgtcaagcctgagtattcaatccgatttatcgacgagactgttccaattccatgtattcatgtttccatactgtttacggggagctttaagacaagggatttatcggacatacattcagcacaagtacaatgacagccacatccgtggaagaattgatattccacggcatatcaccactaatattcctttcaccggcaatatcgcatatgatgtgcgcgagcttactgcagacaatcctctcacacagctgattcgtcacacaatggaatatatagcccttcaaccgtacggttccacgctattaggcaatatccgcaaggaggtacgttacataatcgaatgtactccctcatatcgtcgcgcaaaccgcagcaccgttctggaatacaatctcagacatccggtcaatcatgcgtattttacgcaataccgcatgctgcaacaattatgcatcatcattcttagcaatcagcgtcacgcgttcaacggtcaggaaaaccgacttcatggcattctcttcgacggctcctggctatgggaggaatacgtcgattccctgattggcgatagcttcttccatccgcgaaacaaattgaaagaaggaaaacaacacctgttcgaaggtggcacaggccctatctatcctgatttcatcagccgttccaaacaacatcccatcattgcggacgccaagtacaagcctatatccaatattcacaaagaagattactggcagattctggcatatatgtaccggtttgattccaaactcggcatcttcctctaccccgatgcgaagcaaacctcacgcaaggagctgcacatgctgcaaggaacgacgttccacggagacgtcaaagcacgggaggacatcatcgtggccaaactcggactgtcgattcccgatacggccgtcgactatgccgatttcatatcccgcatgtcaccatgcgagaaagcgtttcgaactggattgctcaacaccttcaacacgtattgacgccgtaagtcgaacattctattccacgcgcctgcatggcgcgggatgatgaggaagcggtacaagccgcgaggaaggagccgacatgttattgcgaccatcgattcgaatcgtcgttccccgacgagacacacgacatatctcgaacgcctaagacacccaatacgtatgaaacgtttggagctccccaagttcaagcatcggaacaggacgaccgcctgttcgtcatgttccatgggtacggcaatgacgagcgtgagatgatccgcatcatcgacgctgtctacgccgccgcgagtgctcgcgcatgggcgacgccgtcgtctccctgctcgactcccccatgttcgcaggccgccgcaagatcctcgtcgggttctcccagggcggctatatgtcgtatcgcatggtgctcgagcatccgcacgtgttcgacgcggcgatcctgatgagcccgtcgttcaagggcgaggagtcgacggacctcaccggtttcgactcccccacccgtttcctgctcttgtacggctcgcgggaccgcacgattccacctgcggaccagcagaccgcgcgtcgcgtgctcgaggccaccggccggctcgaataccgcgagtatcctggcatgggtcagccatcgtcgacgaggagatcggcgacatccgcgccttcctcggtctctagccggttccggacggaccgcccggttccgctcggtccgtccaccccgccatccgaccatccgtcacacacgtcacgcacccgtcaccgcccgcaatcggtgtcggcggcacgcgtcgccgccgtcacacgccgaggctgcgtccgatgacgccgaggaacgtttcggcaccggcacgcacgttctacggttgcacaggtttcccgaattgcgggtactccagaccgtgcaggtgatttcgacgtgaacggttcccgccgcgtagactgttttctccggaccaggcgaacctcctgcgtcgcaccccgaatccgtccgcaacggctggcatcgccatgccggaccttgatccaatcacacccgcacggcatggcgcatgggcccttccggggcgcgcttgcgccggcggaccgccgcaatgccgccccaaccgcacagcagcaccgtcatgcacgcccatgcgccggcggtccgaccgtcatgcagatcggtcggatcgggggcgggaacgggcatgctcacacggtggccggagaccaggagccgatgggagttgatgccgtatggcgtacaggtcatcagcgtcagccgatcctgcccgggaacgatgcgcagctgtgaggtatcggtcggttcgatcacggtgatgcgatcgacttcgtaggccagggtcctgttcatcgttgagatgtatatgaaatcgccttcgcgcatttcatccaatctggtgaacatctgagcctgcaccatgccgcgatggccagtgatgaccgcatgggtgtcgttgccaccgaccggcaggctcgtgccatacagatgcccggagccaagggacaattgcttgtctccggtgccgtggtagatgggaagatccaccgagatcttcggtatggacacgcggcccatgatgccgtgaccttcgttgagcagcctgccgtagcgttgatcctgcgccgactgggaggacaggcgttccccgttactgaacgggtcggcctgggcgcccagcaccggttgcccggatcggacgagaccgcggttgtaggcacgcgccgcccgcagttcgtcgtcgatccggctttccggccacagtcgcacctgctgttcgacggaagacgccgacgcggacatggacgtctgcgacgcatactgcatcagcagcggaaccaccgtgcataccaccgccacggcgatcagaatccctgcgacggcgtacatcacacgcaatcgccgctgcatacgggcatgcgcccggtattctttggcaacgtcgaccagctgctcgaacgaaggtgccaccggcgtcattcggccctatgttcaggccgcgaagctacgcttcgttttgcgggcccgaacgatgatgatcgaagcaccgccgatgcacagcaccgccacgacgccaaggatggccatgcccatggcgccggtcagcggcaactgggtgatgcttttgatgttgcggtacgcgtaaccgttcgtaccattgctgagcagtccgctggcgggaatgctcatgtcggtgatcgactccaactggatcgtcccctggacgttcttcatcgtgaccttcagtttggctgcggaaccggaccaatagccattcggcaccttggtctccttgaggtaataggtgccgtcattcagcttgaagttgcggaaatcgacaagaccgccgttttcactggacgtggccttgacctcctcgcccatggcgtcgtgcagaacctgcgtgaagtgctcgtcggagtacacggtgaattcggcacccgccaaaccagccttgttgcttcccacaccgaccttggtgaacttgaagccaccgcgattggttgtcgtggaagtggtcttggcattcaagtcggaagtcagatccacgacgccattgttgttcgacacgttgcagccatcgggaagtgaggtgccgacgagcatattgttgaagccgtcataagcaatggttttgtctcccgtgtccttgatctgctgcttgggcgtcgtggcatcgaagatcacatacaggccgggaccgggcatggtgagcgtcatggtattgctcgtgtcgtcgacactcacactattcgattcaagcgtgctgccggtgacgcccggtttatccgcgtacttacggataagtatatcgttctgggtgttggcaagccagttcatcgggtcgccatcattttcctcaccttcatacaacggttggcccgtattggtgggcagatctttcaccgcctgaagaatggccgccttcgattccctcaccgtctcaagatgcaacgaaccaccggacgcgccattaccgatcttgtagtcggcgaccttcgccaccttgaacgtacgattgcccaaaggggtcttgtcactccacgtcttgaacgcgtccgcatccttgcccttcaccgtgatggtcttgctcgtggccgtgcaagacgcggaagactgcgcagcacctggcgcacccgcctcttcggccatggcgctggccggtgcggtcatggccgcgaacagtgtggccgccgcagcgactcccgccatccatgattttgctttcattgttctcctccttatggaatatatggatgaatccatgttggtcatacggaacggttcccgtatgaacgttttctgatatgcgcggcgattgccaacaccgccaacgcccctccggacgccaccatgccgacaatcgtcaccacccacgcggcacgacgccccgcggagggcagcgcggaaaccggttgcggccgattggtcagacgattgtccgtaacgccggcccaatcaccccgtccgtgcagtacggctttcgccttgggatcctcctggcgaatcgtgaattcggcccaggtacggtcgctgtcgggcaaccgatatccgccgggcgcggtgatctccgtcagccggtaggtgccccagtcgagattgtcgatggtcagtttgccgacggtcggatccttgtctccggtgccggcacaggcggcattaccgtcgcccacgcaatcggcgaagttatagagggaatcgttgaccttgttccacgtaccgtcatcgttgcgtcgttcaagccgccacgtggtgccggacagata

SEQ ID NO: 2923 - DNA, 10777 bp, Unknown
  R19_24m  MAG No. k141_2607
ctggtcattgcgcaccccctttatggtgttctctatggctgctgtgcacgaggccgttccccgtgcggcacgtctacgacgataacgtatcggacacttgaatggaacggcgttgctatatgggttgcttatggaccgttcaaatgcggtcgcggcggtcacgtggctacactgggagccatgaagattgccaaggccttgacccgtttgaccggtcctgaaaccaccccggtgttcgtgctgttgcacggctggggttccaatgaatacgatttgcccgatctgctgaactattgcggtgccggttcggctgattatgccagtttgcaggcacccatcgcctatggcatgggatatacatggttcggtgcgtgggcgcatgaaggtgtgccggagggcgaatcattggacaagcaggcggctgaggccgcccaagccattgatacatgggttgcggagcatattcccgccactcggccggtggttgccatgggattctcgcagggcggcctcttggccgcgcatctgctgcgtttcaatccgaagcgatatgccgcagccgtctcctgctctggatggctggcaccggggtccgttgcgggcgatgccgaattggcttcgttgaagccgcccgtgttctacgggcatggtgctgcggacgacatcttcccgaaagccgatgtgacggcgatgggtgagttctggcgcgagcacggcacgttgaccgaacaagtgtatccgggcatggcccattcgatcaatatgccggaaatgcgcgatattcaacggttcttggaggccaacggattcattcggtcgcagatttggtagtcaccacctcacatgacgtagtctacgtgggcgaattcggggactttgtaccatttgacggggtagccggcaccgtgggcgcagaagaccgagtcgggggtgttgtccagatcagcttcgggatcgtaggcggcggctgcgatgacctgttcggcgtcatggcatggcttgtagccgccgaaggtggcggagaaacggccatggccgtgcgtgtactggttcacgtccatcgcatagtcgcgcatttcggacaccggcgcctcgccttcgatcacggcgtattcgtcatcggtgaccggggattcgaagctgccggccatgcgctggatgtcgctcatggcacggccgatcatgtctgcgggcacttcgagccggaaccggtaccacggttccagcagtcggcagttgccctcccctgtggtgtccggccggctctcgaccggcgtctcgggccggccactgactcctgccctggcttccatcagcccttggcgaatcgcccggtacgtggcttgacggaagtcgccgccttcggtgtgcttcagatgcgcgcggccggccaccaaagtcatcttgatatcggtgagcggtgcgccaacgagcacaccgagatgctcacgctcggtcaggtgggtcagaatcagccgttgccaattgcggtccaaatcattttcggacagggccgaggccacagtgactccgctgcccggctcccctggttccagcaggatatgtgcttcggcataatgacggagcggctcgaaatgacctgcgccttcgatcggcgcagtgatggtctcacggtacaggatggagccggggccaaaggacacatccagaccgaaccggtcgtgcagggtctgctggatgatttccagctggaccgcgcccatcaattgcacatgaatctcggccatccgttccacccacaccacatgcaacaacgggtcttcgtcttccagctcacgcaatgcggtgatgaccttgtgcaaggtcagatcatcgaactggggacgggccggcgagctattgtccgccgcggtctggccggcggtgtcgttctcctcattgcggccggttcccgacttggcggcatcatgctcggcatcgtcctgattcgcgctgtcatggccgactcccccacgtttggccgctcccgaggtgccggccgtatcggattccgctccgacgggcaacaccgtgtaggtcaacacgggttgcaacgacggcgattcggcgtccggttccgttcccagcccttcgccggggaaggtccgcgtcagtccggtcaccgcgcataccgagccggccggcacttcggtgaccgtctcgaatttggcgccattgtagatgcgcacctgatcgactttctcggaccacgccatgtcatcatcctcctgcgctggcgacggtgtcgacgccgcggcgcacgaggatgaggagacgatctccttggctttgagcgcaccgccggtgacgcgcagccacgtcatacggttgtgctgaccgtcgtgggcgattttgaacacgcgtgcggcgaaggcggccggccattcacgttcgcgggtgaacgtctccagcccgtccaggaactccttgaccccttcgagtttcaatgccgagccgaaatatacggggaacagctcgcgtacggcgatcatcgatcgcaatctgcccacggacagcgcgccatgttccaaatagtcgttcatcgcctcctcgtccagggtggcgatgtcttcggcgaacgcgtccaacggtagcgcgctgccctcagtggactgttccattgccggcaacggatatatcgcatcgctcagacgcctgcgcaactgagccaacacggcctcgcgggcaaatccggcggcgtcgcacttgttgacgaagatgaacgtcggcacaccgtatctggccagcagacgccatagtgtctcggtatggccttgcacgccatccgtgccggagaccacaagaatcgcgtagtcaagcacacgcagcacacgttcggtttcggctgcgaagtccacgtgccccggcgtatccagcaaggtcaggcacaggtcgccgtgttctaccaatgcctggtgcgcgaaaatcgtgatgcctcgcgccttctccaaggaattggtgtccagaaacgcatcgccgtgatccactcgccccaatttgcgaatctcaccggtacggtagagcagcgcctcggacagcgtggtcttgcccgcgtccacatgcgccacgatgcctgccactatctgtttcatcagctgtgctcccttcccgatgcgccgcatgttgccggccgcctaaccaatatatccgagaaaatccgggagggaaaaattttaccgtcagaccgggctgccggtacaataagtcaccgaacaccgactgatatgaggagcctccgtgaccacttccggcattaccgttttcggccaaccatcccagcccaatcatggtgccggcgggcgaatcgccatggacgatgccctctttcccaccgattatgtggcgctggatctggagaccaccggcttttacccgaacagttgcgccatcacggaaatcggtgccgtgcgcgtgcgggaggggcatatcgtcgatcaattccagcagctggtgaatcccttgcggccgattccgcgtcagatcaccacgctgaccggcatcaccgatgcgatggtggccgacctcgattcgattgacgaggtgcttccccgattcatcgcatggctcgctaccccggctgccggtcccaccgttgagccgattgtcggtcataacgtcagcttcgatctgcgattcctggattataacacccggcatatcgccggctgcggctttgcctgcgcggattatgacacgatgcagatcagccgcgccctgttccccgcgcagcggcatcaccgtctggctgacctgatcgtgcgcttcggcatcgcggacaatgaggaacaccgcgcattaagcgatgccatccagacccagcagtgcttcgaatggatgcggcattatgtcaccgagcatcacgaatccgaagcaatccgttggaagcaggcgccggccagaaacagcaccgaaattctccaccagcagctagtggtaaagcggtagttacagcccgtattattcgcacatagaggaaaactattagtcgctgggctagagaccttatagtggacggattcctctcgcatatcggagaaatgcgggataccacacggttagcggccaatttggggccggcgtcccgcaaccgtgcgggacgccacgcacgtcaaacgatgcacacggctggcatcccacaccccattccacagaaccattggaattctgccaatcccacaaaccggtgacgacaccgtacatcaggttctgtgggacgccagaggaaaaacacccgaaatccgctggcatcccacaccatgtcacaccgcacctgcagcatcgcaccacaccacatcacgccgacacctattcgtgccccccatttgcataattcgacgtttttggaagatggcgcacacatgcatgtgcccccatttgcatatcaaacggttgacgcacaaatggggacacacaaccacaactcagaatcctcggaattccgccaatcctgagatttcatcccccaacacggcaatcgccgcctctgccaccattttcgcatcaaacgattgacgcaacaatggtggcgcatgcccctttgtatcggtatgaatcagtccctgccgtcaggctctccccctattgtgagggccgactggcagggactgaacacgcataatcacatgagcacgccatgccaagcatggacatctcagtacgaacagaacctattcgcacacgttacagcccgtattctttggcgatgacggaccagaggtcggcggcggcctgatcgacggtttcgttgacgatggtgacgtcgaattcgctttcggcggcgagctccactttggcggtttccaagcgtcgggcctgctgttcggcggtttcggtgccgcggccgatcagacggcgcttgagctcttcgaagctcggcggcgcgatgaacacgtacaccacttccaagtcgagttcggcggcgcgctgcttgacgcggcgggcaccctgcaaatcgatttccagaatcgttggcatgccggcagccagatgctcctcaacaggcttgagcaatgtaccgtagtgggccatgccgtgcaccacggcggtttccaggaactcccccgccgcttcgcgggtcaggaactcgtcttcggtgaggaaccagtagttgacgccatcaacctcgccggggcgcggggcacgcgtggtggcggagacggacacccacacttcggggtggtcggcgcgcagcttggcttccacggtgcccttacctactgcggtagggccagtcaggacgattagacggccggcatgggtgttttcagtcatgggttcctccggagatgatgtggtgtgcagcgattatgaatccaatgtggtaacggctcaccggcgagatgaccggtaactgttacagccccgacgaacagggaagaatatgaatcgtgatgcgacgtatgcaatgagatagatacgtacgcatgccgcgacatctgattccgttctgattactggttttctgcgccttcggcagtggcttccatcagcgactgacgtacgtcaagcgcaatcgactcggtagcttggctcagtgcggcgatatccggcccatgcgaggcgataaagcgggacacggtaaccagcacgttgccgcgcgtaccgcggaacacggttttcagatccttggcctcggcaccctgccaaccgtaaccgggggaaagaatcggaccggtgaacttggaggggtccacgccggaatcctgcatccattggccgatggtggcaccgatgatcagacccaccgagcccatgccttcgatatccacgttatgcttctgcgcggtggaggcgatgccgtaggccacggtacgtcccttgtaatcgccgctctggcgcaacgcggtctgcagactcatgccttccggattggaagtcagggaggcgatgaacacgccgcgtccgttttccaacgcttcggtaatcaagccgttcaacgagcgcgcgccatagtacggcagcagcgtgatggcgtcggccagcaacggtgcaccgggcttgaaataggcgtccgcgatggcggaaatcgtggtggacaggccgccgtgcaggcagtccacgatggtgatgacgcccatttgtcgtgccgcgtagagcacgcgctcgagcgcttcgaaacctttggctccgtagcgctcgaacatcgacgtctggaatttgactgctgcggcgcgcccgttggcggcctgcagcatacgcatggagaagagttcggcgccttcggcgtcgacgttgtatccccagtcggtgaggagcttgcgatgtgggtcaatgcccacacacagcggtccgtatttggccattgaattgctcagtcgcagaccgaaatccgaacgttgtgcctgcaattcctcactgctgggtgtagtcatcagaactcccgtcgctccaattcgaacagctgcttcgaatgctcctgaatgctcatgatctgataatcattatgcttcacggcctcgatagccagcagtgcggcttggaactcggtgatggtggtaaactgcggcagatcggctgcaatagcggcagcacggatggagtagccgtcggaacgggagccgcgcgagttcggcgtgttgaggatcatgtcgatcttgccttcctcaatgagctgaaccacgttcttgcccacggagccggcggcgtgatgcacctcgaccggggcttccggatcggtgtccacgcgggtgctgatcttgtccacgatgttcgactcgatgccgtaacggcgaagcacggaggcggtgccctcggtggcccagagcttgaatccaagctcttcgaggcgcacggcgagcagcggcaactgacgcttgtcggtgtcgttcacggaaatgaacacgttgccgtgggtcggcaggccaccatcgtaggcggcgagctggctcttggcgaaggcgtgcgggaagtcgcggtcgaagcccatgacctcgccggtggagcgcatctcaggtccgagcaggatgtcgacggtcttgcccaccggggtgcggaagcgcttgaacggcagcacggattccttgaccgcgacctgctggccggggtggatgtcgccgccgtcgcccttgggcagcagcagaccgttggcgcgctggtcggcgatggtttcgccggccatgatgcgggcggcggccttggccagcgccacgccggtggccttggaggcgaacggcacggtacgggaggcacgcgggttggcttcgatcacatacagcgtgttggccatgaaggcgtactgcacgttgatcaggccctgcacgtggcagcccttggcgatggcgtaggtgccttcgcgcaggcggcggatctggtcgtcggacagggtggacgggggcagggtgcaggcggcgtctccggagtggacgccggcctcctcgacgtgctccataatgccgccgatgtacagttcctcgccgtcgaacagggcgtcgacgtcgatttcgatggcgtcctgcaggaacttgtcgatgagcagcggggagggcaggcggccggagaccacggtatcggccttggcctcggcaagcgcgcggtccacgtacttggtgagctgcttgtcatcgtagacgatttccatgccgcggccgccgagcacgtagctcgggcgcacgagcaccgggtatccgatgcggtgggcagcgtccatggcctcttcgaggctcagggcggtgccgtaacgcggggcgttcatctccgccttcttgagcacctcgccgaacagctcacggttctcggccagatcgatggattccggggtggtgccgagaatcggcacgccggcggccttcagacgcgcggccaaggacagcggggtctggccgccgagctggacgatgacgcccttgaccgggcccatcctcttctcggcctcgtagatttcgagcacatcctcgaaggtgagcggctcgaagtagaggcggtcggacatgtcgtaatcggtggagacggtctccgggttgcagttgaccatgatggtgtcatagtccttgccaagctcctgcacggcgtgcacgcacgtgtagtcgaactcgatgccctggccgatgcgattcgggccggagccgaggatgatcacggcctcgcgctcgcgcgggcgcagctcggtttcgtcggcgtagcagctgtagtagtacggcgtggcggcgtcgaactcggcggcgcaggtgtcgacggtcttgtagaccgggcgcaggccgtaggtccagcgcagctcgcggatggtgttctcgccttcatcgcccaagccacgcaggtgggccacctgcacgtcggacagaccggcgagcttggccttcttgagcagcttcggggtgagggtttcggcctcgcgcaccgtcatggcggtctcgttgatgaggaagatctgcttcaggaaccacgggtcgatcttggtggccgcgaacacctgctccagcgtggcgccgccccagatggcgcgcatgagctgcaggtaacggtgttcggtcggggtgtggatggcctcaagcagttcggccacttcctcggcggacggcttctcgccatcccagttgaagcccatgtggcgcttgtcgatggagcgcatggccttgccgagggactcctggaagttgccggccagggccatggcctcgcccacagacttcatggaggtggtcagggtggggtcggcgcccgggaacttctcgaaggcgaagcgcggcaccttggtgaccacatagtcgatggtcggctcgaatgaggccggcgtggactgggtgatgtcgttgcgaatctcgtcgagcgtgtagccgagggccagcttggtggcgatcttggcgatcgggaagccggtggccttggaggccagtgcggaggaacgggagacgcgcgggttcatctcgatgacgatgatgcggccggtcttcggatgaacggcgaactggatgttgcagccgccggtgtccacgcccacgccgcggatgatggcgatgccgatgtcacgcagcttctggtattcgcggtcggtcagggtgaagcagggggccacggtgatggagtcaccggtgtgcacgccgaccgggtcgacgttctcgatcgggcagacgaccacgacgttgtcgttgcggtcgcgcatgagctcgagctcgaattccttccagccctcgatgccctcttcgatcaggacttcgtcggtgggcgagtaatggatgccggcgccggcgatgcggtgcagctcctcctcgttgtgggcgatgccagagcccaggccgcccatggtgaagctcgggcgcacaaccagcgggtagccgaacttctcggcgatcttgtcgacttcctcgatgctgtgggcgatgtcggagcgggcggattcggcgccggcctcgtcgacgaccttcttgaacagttcacggtcctcgccacggtcgatggcttccagggaggcaccgatcagttcgacgttgtacttcttcaggacgccggcctcgcccagcgccatggcggcgttgagtgcggtctggccgcccagggtgggcagaagcgcgtcggggcgttccttggcgatgatctgctcgaggatcggagtggcgatcggctcgatgtaggtggcgtcggccatctccgggtcggtcatgatggtggccgggttggagttgacgaggatgacgcggatgccttcctcacgcaggacgcggcatgccggggtgcccgagtaatcgaactccgcagcctgaccgatcacgatcgggccggagccgatgaccatcacggatttgatgtcggtgcgcttcggcatatcacttaccttccttggagttgttcttcataagttcgcagaaacggtcgaacaggtaggccgcatcgtgcgggcctgctgcggcctccgggtggtactgcacggagaatgcggggatgtccacgcactgcaggccttcgaccacgtcgtcgttcagatcgatgtgggagacgaacaccttgccgtacttgccgttctcaaacggcgcgtcgacctgcttgccgatcggagcgtcgaccgcgaagccgtggttgtgggcggtgacctcgaccttgccggtggtcagatccttgaccggctggttgatgccacggtgaccgaacttgagcttgtaggtgccgaagccgagcgcgcggccaagcagctggttgccgaagcagatgccgaagaacgggtagccggcgtcgagcacctggcgcagcagctcgatttcggggccggcctgttccgggtcgcccgggccgttggagaagaagacgccgtccgggttcaggttctcgatttcggcgaaggtgatggtggagggcaccacgtgcacgcggcagccgcgttcggccatgcggtgcggggtcatgcccttgatgccgaggtccacggcggccacggtgtacagcggctccttgccttcgtactcgccgcatggctcgatggtgtaggcctgcttggtggacacttcgtcgtacaggctcaggccctgcatctgtggggtgttcttgacgtcttcgagcagctgctcgatggtcttgagcgcgccggtggcctggtcggtcagggcgtcgccggagaagataccggcgcgcatcacgcctgcggaacgcaggtgacgcaccagcttgcgggtgtcgatgtggctcaggccgacgatgccgttcttggtgaggccgtcatcaaggctgccttcggcacgccagttgctcacgttcggagaaggatcacgcacaatgtatccggcaacccagatgcgggaggactcagggtcttcgctgttgacgccggtatcgccgatgtgcgggaacgtctgca

SEQ ID NO: 2924 - DNA, 8181 bp, Unknown
  R19_24m  MAG No. k141_2701
gcctgcaagcccaggcacacaccaaacatcggcacgccgctggccgcgcacaggcgaatcatatcctcactggcaccggattcggccggagcaccagggccgggagaaatcagcacgccatcgtaaccgtccagtacacccggcgcggctgggtcgatagcgtcgttacgcaccacatcaacagtggcgccaagggtttgcagatagcctacgatcgtgtagacgaaggaatcgtagttatccaccaccaaaatatgcgcggaatcggtcatagggctctccttgagggacgtgtactgcaagccatagtactaggatgccgtcagctcgctgccacgaagttcgacatctgctgtaggaatgggatattggcggcggcccaagggaatccccactggaacagcgccgcggcggctgcgaacagcagcagagccagcagcaaccatcgaatcggtgccacgccgggctgcagacgcaacagtccgccatagatgctggcatccggacggcgacgctcacccgcgcgaatctcgcgcagcaccggccagcgccatgccaccgcagcggcaatgaacagaaccagccacactaccagcgcgccgaataccaccttgtccagcgagccaatgcgggaagcgatcgagggggtttcggtggtggagaacatcactgcaccggacgaatcagtagtagccagctctttgggcacaccgtcggacactttggcccagtacgccaactcaccatagctgatccatcgatgggtgggggtggagtatttcggctcacaggtggtcagtgtgatcatgcgtttggtgggattggcagtggagtcttccggattgggggcgatcacatgcacgtccgtgggcagcacaatctcgtaccgggtgtagtggtagacgtaccagtaatccttggtacgaacgatgatgggatcgccttcctgcaacttgtccacatcgcccaacggctgcccgtagccgttgcggtggccggcgacggcgaagttgccgacctgccccggcatctgggtggtgtcgtaatggcccagaccgtggcgattgagctgctcgagcgtggtgccttccacgatgttgcggtgccattgggagccgaagcgcggaatgtagatctgcgcaatcaagtcgccatatttcgcgtctttcggctgtaccggcgcatcgccctcctgggctttggcgatggtgaccgttcccccgttgttgctggggtcgctccagtcgacggactgggtggtttcgttctgggctcgctccgcctcgacaccggtccaccacatctgccagacgatgtacagggcgcaaatcacggcagcggtaatcagcagttcggcgcagatgccgagtgcctgccagaccgggctccgctggggcgaagacgcgccgcgtactgcggcacgacgggaccttgccctactggcgttggccgggtctgccgccattcgtgcggcatcgtcctcggggaagggctgtacgtccgacacggacgcgagatcaatgggcgccggtacgccgctgttgtgcctgccgtgtctcattgctgagtctgctcctcatctgtggtctttgacgtatcgaccgtggcatatttcaactgctgcagcaaggcggcggtagcggggaactgaaggtcctcggcattctccaccttgtagccaatgccaaacgcggtcacatattgcttaagaatggtaatggcttcggagtcgttcaacgctgcgcgaagtctttgagggtcaccaatcgcggaaatggtgaacggcggcgagtatttcttaccgtgcaacgacagcacgttgccggaacagatgaccgccgaattgaacagcacccgctgatccataatcatcagcgcatcggcaccgccggcccacaaggcattcaccaccgattcgacgtcctgctggtggatcacgtaatcgttgatattggcggtcgtgccgttgttgttgactgcgttctcccacaacggagaatcatccagcgttaccgttacgccgctgccgctgagcgcgggcagcatcaggctggaatccacattgctggagtccttgccttggttctgtgtgctgtcggtgccatcggccttgagcgcgtccgtaagattggcgacctgtttggtcagatcgctgacgtcctgctgcagctggttggcctcgtccacgccttgctccaccagatcggccgtatcgttggtggcggcaaccgtacgattgaccctcacgttggtgctcagcagaaaaccggtcaaggcaatgacgacgaataccgcgacaccaccccatagggagtgccgtgcgccgtgcttacctacatgtctggccatgaatttcctgtcttcttgccgactctggtcgccgctttcgagtgtagccactattatgacttttagcctattgaatggagactatgctgatggctgacgaagagctgcacgaaaccgactcgaacaaccagaaggactggcagagcgagacctcatccagcaccgctgctgacgagaccgccaacaaagacaccgagcagaacgcagagaacgcttctgccgaggaagacgcggcttacggcgtgaatatggagcaggtgcaggccgtgctcaacgccactgccgataaggccacgctgaccccgcagatgcagcgcatgatgaaccgtcaggcggagaacaccaagcgtgttgaagaaaccattaagggcaccaagtcgaacccgcgttggttcgtgccgctgttctgcgcgtttatgatcatcggcctgatttggtgcgtggtgtactacctctccccgtccggctcctggccgattccgaacatcggcgcgtggaacctgggcatcggcttcgccctgatcatgatcggattcctgatgacgatgggatggcgctgagttccgactcgttgcgcttatctatcggtagatcgtttttctatcgttaggttgttcttagttcttatacgaaaggccgacctcccgtatgcggaggccggcctttttcgtgccttagcctgttcatccacagctatccaccacttatccacgacttatccacgacttatccactacgttatccacagcctgtggatgaatcacacccatgtagttttccaccgaatgtggaaaaccatgtggataagtggtggataagcggcgtttctcggtgtatatctcgtgcataactttggcttggcatacatcgccacagcgagggaacagttatacacccgagttatccactgcaacaaacccagtaataccgcggtattcctaacttatccccataagttatccacagtcttatgcacttttctacacacttgtgcacaagtcaccattgtggataactcgttatcgtggataactcgtcattgcgcgcatctcattactgtggatatcttcatacggcacacacccactcaccgaacgacgatatccacatcgctaatatccacatcgccgctttccgcacatacactgatgccgggcactgcatgttccgcaatacccggcatcaatcgttttttacagccatatcaagccatatcagtgcagggagccgaaactcatccacccgtaaggattggccatattgcacaacagaatcaacgcaatgaccagcaccaccatgacccagccgtacacttgcatgcgccatttcaggcttttaccgcgccacgccggcacaccacccaccagcagccatgtgagtatcccacccactacaaagccgccgacatgcgcctgccacgccacgccaccgaccacaaacggcaaggcgaagttcaccgccatccaaatcaacatggagcggatatcggcgccgatacggcgatataccaccagcaatgatgcaaacaggccaaataaggctccagaagccccataggctgccatctgccagccgatgcctcccggagccaccgcagcccacaccataagtcccagagagccgccaaggccggaaatcacatacagtcccaagaaccgccagtggccgatcattcgttccagcactgggcccacggaatacagggcgatcatgttgaacaggatatgcaatagcgagttcggcgcatgcaggaacatcgaggtgatgagcgtccacggctcagccaccagtctgaccggagccgccatgccgaggtacatcaaccaagccctcaggcccggggcaataaatcccagcaatacctccagtagccacactgccacgcacgcaccaatcagcgcccaggtcatcaccggaccaccgcgctcccactggtatcgaatctcccgttgtgtaggaatatgcatgcagtccactgtatcgaaggtctcggatgcgttccacgcgccgcgaagatgctgagccgaccgagggcatgcgggcgtggatgaatcgcccacgaatgtcattccacccaatcgtcacaaacagcggcctagaatagggagcagagtcggtctgaatgggcataccgaccagacgatccctagggaaaggagccgtcatggagaacaagtcttctaacggttggaagttcttcgcgctgctgttcggcggattgctcgccgcgcttgtcggcctgtacatctacaagcagcagaacccggattacgatccgtgggaggagccgtgggagaacagctcctcgccggtcgacctaggtctgaataaggccgaggatgaggccgatgacgaggcgaaagccgccccggccgaagcctgatagggcggtctttcaacgcaagaagccccgcaaccgatggatgtcggttgcggggcttcttatgctccggcggccgtcaggccagaggagcagtgtgccagatacgttccaaatagtcttccatggagcggtcggagctgaagtagccagagttggccacgttgagcacggccttgcggttccattcgagctcatcggcgtagagggcctcgatctcggactggatgcccatgtaggcggagaagtcggccagggtcatgaaccagtccttggtcagccagtcggccacgagcggggagtaggcgttgcggtcgccgttggagaaggtgccgtcggccaccatatcgatggcctgcttcaggcgcggatcggcctcgtagtaggaggcgggattgtagccctcggtgtacttcttctcgacctcgtcgacggtcatgccgaacaggaagaagttctcggcgccgacgcgctcacggatctcgacgttcgcgccgtccagcgtacccacggtcagggcgccgttcagagcgaacttcatgttgccggtaccggaagcttccttgccggcctgggagatctgctcgtcaagctcggtggccgggatgaggttctgggccatctcgacgttgtagttcggcagcatgtggacggcgagcttgcccttgacggccggatcgctgctgatcacgcgggaaacgttgttgatcagctcgatggtcatcttggccaggtagtagcccggagcggccttggcaccgaagaacacggtgcgcggagtgatgtcctcggccttgaccttgccggacttgatgtcggcgtagttggagatcacggcgagaatcttcagagactggcgcttgtactcgtgcagacgcttgaccatggtgttgaacagggtgttctcgtcgatatcgatgccgtagtggtccttggcgaagcccacgaatgcgtgcttgttggccttcttgacggcggcgaacttcttgacgaactcatcgtccttggccagcggctcgaggcccttgagcagttccagatcggcgacccacttgtcggtgcccaggccctcggtgatgaggtcggacaggcgcgggttggcgagcttgacgaagcgacgcggggtcacgccgttggtcacgttggtgaacttgtccgggtagacgtcggagaagttcttcagggtaacgtccttgagcagctgggagtgcagctcggccacgccgttgacgtgggagccgccgtaggtggccaggtaggccatgcgcacggcgtcgccagtgtagatggccatgtccttgatggtgtcggcggcaacgcccttggccttgagctcggcctcgaactgcgcgttgatcttctcgatgatctcgaggtgacgcggcagcagctcgccgatcaggctggccggccagacctcaagggcctccggcagcagggtgtggcaggtgtagttgaaggtcttggtggtgatggaccacgcggtatcccagtcgtagccgtactcatcgatgaggatgcgcatgagctcggggatgccgatcaccgggtgggtgtcgttgagctggaagacgatcttgttcgggaaggtcgtcaggtccggcttgtcctggcccgggtagaagacgcggatggcgtcgtgcagggatgcggagacgaagaagtactgctgctcgaggcgcagttccttaccgaccttggtggagtcttccgggtagagaatcttggagatgttctcggccttgacctgcggggccacggcgtccatgtactcggagcggttgaaggcgagcagatcgaactcgtcgtagctcttggcggtccacaggcgcagggtgttcacacgctgggacttgtagccgggaaccatgtagtccaccggcacggcgcgcacggaccaggccggttcccaggtcttggtgccgtcggcgttttcgacgaccttgccaccgaaggagaccttctgatcacggttgtagtcggtgtggccccacggctcttcgttggccagccagtaatccggggtctcaacctgcttgccgttctcgtcgaacttctgcttgaagatgccgtacttgtattggatgccgtagccgaaggccggcacgcccagcgaggcgagggagtcgatgaagcaggcggccagacggccgaggccgccgttgccgaggcccggctcgtattcggcgtccacgatgtccttcggcttgaagccaagggcttccacagccttgtcgaactggtcggtcaggccagcgttcagcagtgcgttctccagctgcttgcccatcaagaactcggcggacaggtagccgacggccttggtgttgccgttgacggtgtcggcctgggtcttgaaccaggagtcggcgaggtggttgcgcacggctttggacgcggcgacatacacgtcagcaggggtggtctgctcggcggtgacgttttgagtgtatttcagttgttcacgaatctcgtcggcgaattgttccgccgtgacgggagacttcggtgcggtgatttcggtcattctgactttccttccgggataagtgcccgtaattattatgccgcgcgataggtatcgtctcacaaacgtaagcatgaactctccgtaacgacgatagcggagcgctcttgcatacgttctcattgagaagcgtatcacatgtctcacagttccgcatcacaccgtatgccatcgtttgcattacggaagatcttccggatccggtgccatgatggagcatatggcagtaattctcgaaaaagacttgaaacgagggcacgacgcactggtgcaatggcgtgccgcagccctggaactggccgacaacacgccacatcgcctgaccgcctcccccattctgccgcgcccggtatgggcgatggctgtgcgctactcgctgttcctgctggagcggcgcgcgcccggccccggcgtggaggtgcgcgtcgcgccgtggggcgcggtcaagatcctggacggcccggaatcggacccgcacaacctcactccaccggacgtcatcgaactggagcccgaggtctggctacggctggcctgcggcatcaccacctgggcggaggaaaaggacgccggccacatcagcgcggtcggcgagcgcgacgacctaagcgacctgctgccgctgtagtcgccgccgcaggccgcccatcagaactgggcgataccccagcgctggatatgctcggcccagtggtccggcgtgggcagggtgacgaggctgcgcatcgtcagcgcatagagggcggcggccaccagcacggcggccagaatcaggcaggtcggcccgtagccgatggtctgcataccccagccggcgagtgccacggccacgccataggcaccgtactgcaacaccatgctgcccgctccaacgcggccgagcttgtccttgcccaccaaggtattgctgaggcctccaagcacc

SEQ ID NO: 2925 - DNA, 18703 bp, Unknown
  R19_24m  MAG No. k141_2858
gcgaatctcatcgacgccacgccgattggcgcaaacgtgcgctccaccgtggccacctatgccgatattcacgacgaattgcgccgcgccttcgcccgcacggacggcgccaaggcgggcggctggaaggctggcgatttctcatacaacaccggccgactgcgttgccccacgtgcgacggcaccggttcgatctcactcgacgtgcagttcctgccggacgttaccatcgaatgcccggattgcggcggatcccggtatgcgtctgaagccggcgcgattcggcgtgccgttaagggagaatcgcacctttcgttgagtctgccgcagctgatggcgatgagcgtggaccagacgctgtccgtgaccggcgacctcaagaaggtccacgcgcgcctgaccaccttgcgtgatttgggcctcggctacttgacgcttggcgagccgacgccggcgctttcgggcggtgaagcccagcggctgaaactcgccagcgaaatgggcaaggcgcagtcggacgcggtattcgtgttcgatgagccgaccatcggtctccacccgctcgacgtgcgtgtgctgctgggcgtgttcgaccggcttgtggcgagcggcgcaacagtcgtggtcatcgaacatgaccttgacgtgatcgccaatgcggactggatcatcgacatgggtccgggcggcggcgaaagcggcggacacatcgtcgccaccggaacgccggaacaaatcgcggccaacccaagcagcattactgggcggtatttagggtaaggctcaacggacatctttaccacggcgctttttaggaatatggcatgagccggtgtgggcgtggcgcgggctgtggctttatcttttctttggctcactcccgagaatgacatgttaacccgtatgacggtcacgcgcattcgcataggaccctgcgcgagtaggatagccgtccatggtgcagattcatggcattagacgcgcaagcgcggacgcgaaatatcggcagatgaccgggcagccggtcaagccgctgattctcaaactgtgcttgccggccgtcatctccaatctggtgaccactgcctacaatctcacggacacgttctttattggccagcttggcaccgcgcagtccggcgccatcggcatcgcgttctccatcatgaccgtgatgcaggcgctcggcttcttctttggcaacggcgcgggcaactcgatgagccgcgaactcggcaaacagaacaatgaacgcgcctcccgactactggccgtgggcttcgcgggtgcggtgctctctggtttggtgattgccacaatcggattgctgaccctgcggccgctggtcgtcatgctgggatcgacctcgacaatcgccccatacgccgtgcaatacctgacgccgttgttggtcgccgcaccctgtgtatgcgggtcgttcgcgctcaacggactgctgcgataccaagggcaatcggcgttcggcatgatcgggctggtttcgggcgcattgctgaatttcctgctcgcgccgttgtttatcttcgtgctgcacctcggaatttttggtgccggcctggccaccgccatctgccagacggtgagcttcacgattctgaccacaatgagccgcaaattcggcgtgatgaaactgtccctgcgcaattgcaggccggatgtgctgctcatgcgcgaagtggccggcggtggcctgccctcgctgatccgccaaggcgccggttcgatttccgtgacctgcgtgaacattgccgccaatccgttcggcgatgcggccatcgccggcatggccattgtgatgcgcattatgctgggcgccaactcggtgatcgtcggcctcggccaaggtttccaaccggtgtgcggctacaactacggtgccggcctgttcgcgcgcgtcaaagaagggtactggttctgcgtgcggctcgccacctgcgtgctcgtggtgttggcggtgttgctgtgggtgttcgcaccgcaactggtcgagatcttccgctccgacccggccgtggtcgcggtgggtgtggccgcgctgcacatccaatgctgcacggtgattctcaacggcttcaacatgatgggcaatatgatgacccagaccatgggccgcactggcatcgcctcattcctggccctgtgccgacaaggtctgtttttggcaccgatcgtactgattctgccgatgatgttcggcgtgctcggcgtggaaatggcccaatcggtgtccgacgtgctgacattcgtggtcaccatcccgttcatgcggcgaatcctgcacgaattgcggtagatgtcatcaagattttcgacttccagaccaggtggaccgagcatatctcgctgaatctctgtagtttttccttaccgttgcgttcattaggtcgattatgcgttcattaggtcggtgccctgcttagcatgagataatgagcattggaatgaagccattcttgaaggcagtgttcatcacaagtgacctaatgaacgcataatcgacctaataaatgaatggcggatggctaatacggagcctgaatgcagaatatgaaacgtatgaaagccaaccaggcacacaagtggcctgtgccggagcgcatcgaattgctgtaccgcaccatggctgacgcactcggcccgaccggatggtggccggcggagaccacgttcgagattatggtgggcgcggtgctgacgcagaatacggcgtggggcaatgtgaatcgttcgcttgcggcgttgaacgcggagggtgtgctcgaaccccataagctggtggccatggagccggagcgtttgcaggaactgattcgaccgtcaggcttttatgtcaacaaatccaagaccgtacagtcgctgagttggtggtatgtggagcgttgcggggccgcgcccgagggtgccgcggctatttccgatgccgaattacgggccgagttgcttggattatttggtattggcggcgagacggccgacgatctgatgctgtacgtgttctcgcgccgcacattcgtggccgatacttatgctcgccgactattcgccttccttggattcgacgtgccggccggctatccggcattccacagggcctattcgcccgtggtgctggatacgaacctcagtgtcaaggatttgcaggaattccatgggctcattgacgagttcggcaaggcctaccgcgacgacgcggccaaaagcgagtcctttttgggtggatggagggcttgactgcacggcgaatcgttctcaataagaaaagtgtgaggcccgcacggtgccaatcgcacatctgaatccttgactggctgcgctcgatgctgggtgtcgaaaacgagtctgtgacagaatagttcgaccgacacaatcgccaaaacgccgaacaggagccaatgatgaccgaagacaagccgatcgccaagccgattatcgatgatgcgacgcgcgagaaaatggcgcttatgttctctggcgaggtctacctgccggatgatgtggacggcttttttgatttgcaggccgcccagcgtgatctccagctcgaactcaacgccacgccgctgaccaacccgaagcgccgtaccgaactcatgcaggcgttcttcggcgcggcgggggagggtctgtacctcgaatgcccggtgtatgcgaactggggctgcaatacttattggggcgagcgctgttacgccaacttcaacctgacgctggtggacgatggtgagatcttcatcggatcccacaccatgatcggccccaacgtcacgcttgtagccaccggccatcccgtgcgtccggacctgcgctatcagggtgcccagtattcgttgccagtccacatcggcgagaacgtctggatcggcgcgaatgtcaccgtgctgcccggggtcaccatcggggacaacgcggtcattggcgccaactcgctggtcaccaaggacatccccgccaacacggtcgcctatggcagcccgtgcaaggtaattcgcgaaatcaacgaacgcgacgacgtctactactggcgcgaccgccaattcagtgagcgttttaagctcaaagagcagtagcgcgaaagctcactcccacacgtcgagcttgcgatttttgtagaaatactcgcggtccttgtcgccgatttcacgcacgacctcgcagggcgcgccgtaggtgacggagttggcggggatggaatgtgtcacgaccgaaccggcgccaatcacgcaattgtcgccgatggtcactcccggcagaatcgacacgttcgcgccgacccacacgttgcgcccgctgatcaccggaatgcaatacgtgtaatggtgctcgcgcagcaccggcaacacggggtggccggcggcgcattagcacggggaacggttgaacgagaagtggattggcatgtggtggtatcgaacatactgatgcgtgtgccgccgagcctgtccagatggctgcctatatgaaccagtgacagaaaagcacgggaacgcgagcgagaggagtgtgcatggggcagttcggcgtcatgattggccagttagtcggatttctgatcatgctgatggtcgggtatggatgtgtgaggcttcgattctacggtcagacggcgttggatggcatgtgctcgttgctgctcaacgtgctcatccccgtgcttgtgttttcgaacgccgtcgatggtgcggaccgcgcgcagcttgcctctaactggggcgtgatgctgctgaccgccgtgatgtacgcgctgctcatcctggtgttctggctggtcgccgaactgttgcggctcaaaggttcgcgtagccatgtatttcaggcgtcgcttattttcggcaacgccggattcatcggcattccgttgattatggcactttggccgcagaacggcgcgatttacgtggcgctgatgtcgatcatcgaccagacgctgctctggacgtacggcgtatggctgtgcgagccggtcgacgaagcgactgacggcaacgcgattggcgcgcgaggtgcggtcgtgaacggttcggtgaacggcgccggttcggtgggggaggctggttcggcgagcaatgccgcaaacggtggttctccggccgtcgtccgcccctcgccaggcacccgcgtcctcggcctgcttaaacgattcgtcaatcccgccttcgtcggcgtgatgctcgccctgattctgattctgctcggcgtcaaggtgccggacatcatcctgaagccgctgcacaccatcggcaatatggccacgccgatgtcgctaatctacttgggcggcctgttcgcgctgaccaagtggtggggcgtcctcaaacgctacgaactctatgctggcctagtcgccaagatgatcgcattcccgctcgccttctacgcgctactgaccgcgctgaccggcgcattgccgcaactgccgatcacccatgacatggtgctgatgattacggtcatcgccggactgccgaccatgaccaccattgccatgttcaccggtcgcaagaacaacatgcccgagtatgcggtcggcttcgtgcttgtaagcacgctgttctcgctggcctccctgacgattgtgtcggcagttgtgttctgaattgtccccttcgacgaaaagaatgccgggggcctccggcgcttggaatttcatcgacgccgccaacgactcggcatccgaggcggccgtgccgtatttcaaggagatattcgattacgcgcgcacgctcgatccgcagcatcgcccgctgacctacaccaatctgctgatggccgccggaggcaaagacaagtgccatcagttcgcggatgtcatctgcctgaaccggtattacggctgatatgtgcaagatgggtatcagctcatcggagccaagaaggccttcatcaacgagatgaaccaatggatgaacaccgaacccaacaagccattcctgttcaccgaatacggtgcggacaccgatgccggtgcgcacaagctgccaagcgtgcagtggagtgaggaataccagtgtgagtacctcaccatgcagcacgaagtgttcgacatgttcgaggcagtggtgggcgagcaggtatggaacctctgcgacttccaaaccggtgaaggtatcatgcgcgtcgacggcaacaagaagggcgtcttcactcgcgaccgtcagcccaaagccgccgcctatgtactcaaggagcgttgggagactaagtagcggcccgcccctggaatattccaggagcaacacacatcgcataacacacaacgcaacatacaaaaaagaacctcgtgaaacgaatttcacgaggttctttctagttacgctgaatgactcccattagactcccacaagagaagagcaatggcgaaatcccaacgttgctaagctctcaaactcagatgtggaagtagagctcgtactcgagcggggtcggggccaggcgagcctggtcgatctcgtcgcgcttgaggccaatccaggtctcgatcaggtcgtcggtgaacacgtcgccggcggtgaggaagtcgtggtcctcttccagggcgtccatagcctcggccagggagcttggcacctgcttgatgccagcgtgctcttccggcggcagctcgtagagatccttgtcgaccggctccggaggctcgatgtggttcaggatgccgtccaggccagccatcagctgagcggagaaggccaggaacgggttgcaggacggatccggagcgcggaactcgatgcgcttggcagccggggaggtgccggccagcggaatacggatggcggcagaacggttacgagcggagtacaccaggttgaccggagcctcgaagcccgggaccagacggtggtaggagttcagggacgggttggtgaaggccagcacggaggaggagtgcttgatcagaccgccgatgtaccagcgagccagatcggacagaccagcgtagcccttctcgtcgtagaacagcggcttgccgtccttccacagggactggtggcagtgcataccagtgccgttgtcgtcggcgatcggcttcggcatgaaggtcgcagccttgccggccagagcggcggtctcgtggacgacgtacttgtacttcatcaggtcatcgcctgcgtgctgcagggtgttgaagcggtagttgatctcctgctggccagcgccggcgacctcgtggtgggaacgctcgaggatcagaccgaccttctgcaggttggcgaccatatcgtcgcgcagatcctgggtgtggtcaatcggcggaaccgggaagtagcccttcttgacgcgattcttgaaaccgatgttcggggtgccgtcctcttcggagtcaacgccggagttccacggagcttcgatggagtcgacctcgtagaaggagcgctgcatggagttctcgaaacgcaccttgtcgaagatgaagaactcggcctcaggagcgaaggatgcggtgtcggcgatgccggtggacttcaggtaggcctcggccttgccggcgacctgacgcgggtcgcgggagtacggctcgtcggtcagcgggtcgacgatggagaaggccacgtcgagggtcttgtgcttgcggaacgggtcaacgaaagcggtctcaacatccgggaccagcttcatgtcggattcgttgatggcctggaagccctgaacggaggaaccatcgaacggcatgccgtcggtgaaagcgtccttcaggaattcgctagccggcacggtgaagtgctgctgaacgccgataagatcggtgaaacggacggagacatactcgatgccttccttgttgataagggcctcgacgtcttccttggacttgagttcggtcacgggaccgctcctttcgtatgagatataacggtatatatcgtaaaatagcgcgtttcgccggctcgaaacttgggttacgagaatgtttcgtgactgtggccgacaatcgcgcaggcgcgttatttcaacgaaacatcattacagaatggaaacggagactatcgggggagtaggtagagatgtccgcaacgtggacagtgggtattgacaggtgacgtaggtggatgtaagtggacgcgattatgagacatatgacgaagccccggaaccgattgaacggattccggggcttctgtgcgatttggttgtgtgctgccgatcagcgaccgcgcatcgcgcggcgggagatcttctgcgggcggttcggatccatgcccttggggatggcatagcccttcttggcctgcagcgtgcgcagacgatcgttcagcgtttccatctcggccttggtcagcaggaagcgacggcgcggatgaatcttggcgatcagtgcgttcttgtggtccgtgggctcatagctcttggacttgatcaccgtgctacgcagcttggtcagcggcacctgcttggggccgtgtcccacggcgatgcggtatatcggaatggaggagccggcggtgacgcccttgatatcgcgttcctgacgatccatcgccttcatgacgcgaccgtattcgccttcgccgatcaggtagatgccgttcatcgaagtgccgcgccagatggcatccttggtcttcgggtcgatccacaccggttcctgcgggaagtcaaagccggctttctgcatgttgctcagcacgccgatggcggcacccggcttgccatcaatctgcttgtagccgactgcatccgcgcggcgggtgagcatcatggtggccagcagaatgccgagcatgatggcggtaatcatggtgaagatccaggtcagccaggtccacttgacaatcagaccgatgatgatcatcacgactacaggcagcaggaaagcaccggcctcaagccacggcagggccttgtcttccttagccgtgtacttgtagatctggatgatctgcttgattgtgctctgcttcttcggcttcgcgtccttttccgccatcacttcttcctttgttgggacgaaacacactgggcaatatcttatcaggtgcgctggtccgaacttgcttgtgctggttggtctcagcgtgtgtgcaacggtcgtccgtcggccttgagcagcgcctcgccgagcgtttcactgaatgtgggatgcgggtgaacgaggcgggctgcgtcggcgagcggcacatggttgccgaccagctgttcggcttcggcgatgatgtcggaggccatcggggagaccatgtgcacgccgagcacgcgcggggtgtccgggttggccgcgtcgcagccggagacgatggtcaatgagccggccgtgccgctcatcagcatgcgcgcgttcgccagcatcggatagttggtctccttgatttcgacgaggtcctctctcgcctgcgcctgttcgacggtgagcccgaccgacgccgcttcggggaaggagaacacgatctgcggcacagcggcttcgttcaccggcttgggattgagtccggcgatggtctccgcgatgacgatgccttgctcaaaagcacgatgcgccagtgcgtgaccggccgtcacgtcgcccaccgcccatacgcccggtttgtcggtgcgaccgtacgcatccgtggcgacatgtccgtggtcatcaatcgtcacgccccatgctgggtcggtgatcgggtcacgcccgatggcgacaagggcgatttcgccccaaacgctctgttcgccgtcctggccttcgcgcgtgtagtgcacggtggcaccaaggttcgcgccggtgtccacatgggtgacgctggcgcgggtgatgatgttcacgccatgacgtttgagctcacgggtcagcgtggtgccggctctccggtcccaggctgagagcacgcggtccttgcgaatcagcagggtcaccttcgaaccggcggcgttccacatcgaggcgaattcaagggcgatggccccggcgccgataatcaccgccgaagagggaaattcgttgacttccagcgcctgtgtggagtcgatgagggcgccggcgaacgggttaccgggcaatgggtgtggcttggcaccggtggcgatgacgatgttcgtggccgtgaggtccatcgtggggccgctgggttcggggacatcggccttgtgataggtgaggatgtcgctttggtcgggggagggaacgaggtggacgatgtggttggaagttgctggagcgatctcatccgcatggaacgcggcattggctcggaacacggtgatgccgcgatgggccagcagtccggccagtcctcccaccatcgtcttgaccacgcgcaggcgatagtcgcgcagcgtgccgaagtcgatgccattcaccgaggcgttgacgccgagttcggccgcacggtgcacggtgtcgatggtgtgggtggcggtgatgagcgccttggaggggatgcagccacggttgagacaggtgccgcccacggtggcgtcacgctcgacgagtgccactttcatgccgagttcggcggcgcgcagggctgtggaatagccgccggggccggccccgatgatgaccagatcaaactgttcgctcatgattgcctccttggtgcatataagtatggctcccatgctagggagccatatgcggctatcgccgccacttcgcctaaaaacagtccactggactgttttctttacggctcagcccctcaacgaggggagccagagtatatatggacatcagtctgccggccagtgaccgcgcttcgggtaacgcggcttgggaagcctccaacgacgcatctgaatcgaacggctccaagcgtaggagaaggagcgggagcccttggacacggactgttcgccgtacttggcgatgagcttggccttgagattgcgccacatcagccatacgtcgatgatcacggcaatcaggtaaccgtacataagcgccatcatgatgatggaagcccactggttctgcatcaaagaagtgacgaacatggagacgatcagaatcgcgaaggccaccgggatgaaccattcgccaaggttgaaacgggcatccacataatcacggatgtagatacgccaaggcaggcgttccgccttgggcatgtggttgatatcgcccttctgcatcgcctcgtactcggcgttctccttctcacgcagacgggctttggcggccttggcgctggccttgcggtccaccggaaccagcggacggataccggcggcctgagcctgcttcatcttcggggtaggacggccttttttctcagaaggatcggcggtcttcttcggggcctgctcaacgggaacttgggcctcttcttttttcctaaacggattccatgtcatgctttgaggttacggtgacgttcagacacttgtacactggcgcagtcattgcaatgacgccgctcacgcacatatatacgcacatatataaaggaggaccatcatggcaacgctcaccgctgacgagattcgttcgcgcgtcgaaaccgattggaaccgcatcgtcaaggtgctggccgaaaaggttgcgctgcagtcgatctccgccaagggcatcaccgccgaacatatgaagcgctccgctgaattcgtggcagacgaactgcgcctcgtgggtgtggatgccaaggtggtccaggcttccaatgccgacggcactccgggcgcatgggaggtcatcggctcgcatatcgtttctccggacgcccccaccgtgctgctctacgcccatcacgatgtgcagcctgttccggacccggccgagtggaacaccgacccgttcgtggccaccgaaatcgacggccgtctttacggccgtggctccgccgatgacggcggcggcatcgccatccactccggtgcgctgaaggctttgggcgacgacctcaacgtcaatatcaaagtgttcatcgaaggcgaagaggagatgggctcgccaagcttcattcccttcatcgaggctcaccgcgacgaattcgccgccgacgtgattatcgtggccgattccggcaactggtcggcggacattccttctttgaccacctcgctgcgcggcaacacctgcgtggacgtgaccgtgcagggccttgagcacccggtgcactccggtcagtacggcggcccgattcttgactccaacacgttggccgccatgctcatcgcttccatgtacgacgagaacggcgatctggccgtgcccggcgtggccgcggaagagccaatcggcggtttgcaacgcgaccttgacgaaaccaccgtgcgcgaggattccggcgtggtggccggttacgagttcgccggcaccggttcgctggcctcacgcctgtggaccaagccgtccgtgaccgtgatcggcttcgacgcccacccggtcgagggatccttcaacgtgatcgccccggagacccgcttccgtctgtcgctgcgcaccgcgcccacccagcgccctgaagaagcgcaggaagcactggctgcattcctcgaatcccacgcgccgttcggtgccaaggtcactgtcgaacgcggcgaaaacggcatgggctgggccatggacccgacagccgtggccaccaaagacgcgctggaagccatgaccgaggccttcggcgttgagcccatcaacaagggcgagggcggctccattccgttcatccccgaactgcagcgcattttccccaacgctcaggtgctggtcaccggccccgaagacccgaaggccaacgcccacagccccaatgagtccatctccctgcccggcctcaagaacaacgtgatcaccgaggctttgctgctggacaagctcggcaagtaaccgaaccgcatcggtaatggtggcgagctgccgtcaggtaggtcacggatgtggctattgcctttgacggcggcttgctttatagtcggggagttgacacgggagctgccgttaggcggctgagaggagattcatagtctcgaccgatggaacgtgaccggataatgccggcgcacggaaatgtcgctcttacccacccgtgcctgaaccaacccgcgcgtggccacgaacatgtgcatcatgtgcgtacatatatccatgtatgttcggcctgcgtacgagcagaagaaaggcacattcatgactgaagctgtggccaaagccaattacaagtggcgcgtcgtcgatatcgtcgtcgccgcaatcatcgccgtcgcatccggcgtcattttctggggctgggacattgtctgctccgccccgctggccttgttcgaaggcgtgacccccggtttcgagggtctgctcaacggattctggctgttcgccggcccgctcgccgcaatcatcgtgcgcaagcccggtgccgcactgttcgccgaaacccttgccgccttcctcgagcttacgctgggcaaccagtggggtgtcggcggctcgctgatcgtcggcatcatccaaggtctgggtgccgaaatcgccttcgccgtcttcgcctggaagaagtggaacatcggcaccaccatcctgtccggtgcgctcgccggcgtgggctgctgggcctactactgggccaccaacccgggctggaacggcctgcgcgtcacttggtatctggttggctccatcatctccggcgtcgtgatcgccggcgtggtggtctggtacttgtctcgtgcgctcgccgccaccggcgctctggaacgctttgaatccggccgcagcaaggcgcgcgtctgatgcaggttaatccggctgcggtagaggccagcggctggggatggcggcacgccacgcgtaaggacttcgcgttgcgtgccgtcgatttcaccatccggccaggtgaacgtgtgttgctgctcggtgcttcgggggcgggcaaaagcacgatgatggccggtctcgcaggcgtacttggcggcgatgaggaaggcgagcaggagggctcgctcaccatcgatggcgtcgatgcgcgcgaggcgcgaggccgcgtgggactggtgcttcaggacccggactcgcagatcattcttgaacgactgggcgatgacgcggccttcggctgcgagaacctcaacgtgccgcgcgaggagattcggcagcgagtgcacgaatcattggatatggtgggactcggcggactcgaactggatcggtccacccgccatctgtccggcggtcagcgccaacgtctcgcgttggccggcgtgctggctatgaagcccggtctgctgttgttggacgaaccgaccgccaacctcgaccccgaaggcgtggtcgaagtgcatgacgcggtcaaaaaggtcatcgaggccaccggacagaccatggttgtggtcgaacatcatatcgatgtatggctcgatctggtcgatcgcgtgattgtgctcggccgacccgatgcaagttcgcccacgggtgcggtcatcgccgacggcaagccggacgaggtgttcgccgagatgggcgacgcattggccgccggtggcgcgtgggtgccgggccgtgcgattcccgattactcgccgaagcaggagcctgcgcacgatgcgccggtgctcagcactgagaacttaagctttggccgtggaaccgctcttggcgttggcatcaatctgaatttctatcccggcgaagtaacggctctgatgggtccgaacggcgcgggcaaatcgaccttggccctgaccttggccgggctgctcgagcctatcgccggcaaggtgctcatcgccgacaacctcaagcccgcgcatgccgggcgtgagccgatcgactggaaaagcaaggaactgctgggccgtatcggcatggtgttccaggagcctgaacaccagttcgctgccaatttcgtgcgtgacgaagtcgccatcggccccaagtcgatggggcagagccaagacgaggcttatcggaccgccgattgcatgcttgagcagatgaatctcacgcgcttcgccaaagccaacccgtataccttgtctggcggggagaagcggcgactgtccgtggcctccatgctggccgccgcacccaaagtgttggtgatggatgagccgacattcggacaggatttcagtacgtggaatgaaatggtcaagctgattgccgccatccgcgaccaaggctcgtgcgtggtcatggtgacgcacgatgaggcgctggtggatgcgctgggcgcacgacgcgtgatgttcgaggaggcgaggcatgagtgacgtggtaaccgtcagcccgcaggaaacgcgcgtggagccggtcaaagcctcatcgccctcatggttcatagcgcgcatcaacgcggtcagtcgcatcatcggtgcgctgttgctgtgcgttccgatgttcatcagtctggatgtggtatccgcatccacggcgctcggcatcgaattcgtgctgctgtggattggtggcgtggctccgtggaccgtatgccgtaagacctggccggtatggatcgccgccgccggcagttttatctccgtgtttctctacggccgcacctcgggcgagatcctgtggcagggtggctggattgtgatcagtgagggatccattaatctggccatcgccacggctatcagggtggcggccattgccgtacccggcgtgatcctggccctgggcctcgatcccactgatttggcggacggtttggttgagattctgcacttctcaccgcgattcgtatacggcgggttggctggattgcgcatgtttacgctgctgcaggaagattggcgcgcacttggcttgtcccagcgttcgcgcggccttggcgacggtaacgccatcgcccgtgccctctcccaagcgttcggactgctggtgctctccatccggcgcgccaccaaacttgccaccgccatggaagcgcgcggcttcggctccagcgccccacgctcccaagcccgtatctcgcgtctgaagcctatcgactggatcttctacgtcatctgtctggctgtcccgctggcctccataggcgtagccgtcggcaccgggaattggcacttcgcctttcaaggtgtctgaaaggcgacagactggcacagtgcctttcaaggtgtctgaaaggcttacgatgtctccgccagcgggagcgagccacgactgacgtaatgacccggcagtagggtagtggctatgcccatcaacgcccagattcttgataatccgaaatccgaccgcgttcgccgcatcgccgatctgacccgcgccaaaggccgcgaacgttcgggccgttttcttatcgaaggcccgcaatccgtgcgcgaggccgtcacttggcggccggacgtggtgcaggacctctatgtggaggtttcgcaggcgttggaacatccgcgtatcatctcctccacgttggagaagatcgtcgaaacctcgcaggatgccacgatttatgtgcactactgcaccggcgacgtgatgcaccgcatcagtccggacgcccagggcatcgtggccgtcggcaatgccgagtccatgcacgccggtgccgatgacgtcgaacttggcaagaacggccggggcccgcagatcgccgccttctggcaggtgcgcgacccgggcaacgccggcaccgtgatccgtgcggccgatgcggccggctgcgacgccgtaatcttcgtggacgactgcgtggacgtgctgaaccccaaggtcatccgctccaccgcaggctccctgttccatctgccggtactcgccatgagcaccgacgaattcttcacctggacaggcgacgaccataatatgggcgtctgggccgccgacgtatacggcaccgaagaatgcaagccggaaagcctgcccgcagtactggcggacaaggcggcggtcgaggctccgaaagccgtgctgttcggcaatgaggcgcgtggcttggaaccggacatcctcacacgctgcggccgcatcgtctccatcccgctgtacggcaaggccgaatcgctgaacctcggcacctcggccgcggtgatgttgatgtcgctgtctatgtcgggtcatgttgaaagaatgtgaaaccggtaaaaacgctgtgaaacgctgagaaaacatcagacgaaagggttctcgtggcagaacaaatggtgttcgacgccgaccaggtgaccgctgaggttgccaagggcatcgagaaaatccagaacgcctccaacctggaggagctcaaggccatcaagacaacgtacgcaggtgccgattcggcgatgaccaaggccagcaaggccattggctccctgcccgtcgaccagaagaaggaagccggcaagctcatgggcaagctgcgcgccgacttcggccgtgcctatggccccaaggaggtcgagctcaaggaagccgccgagaaggccgcactcgccgctgaaaccgtggacatgacgctgccggtgaaccgcaagcctctgggcgcccgtcacccgctgcccaagctgatggaagacgtcgaggacttcttcatctccatgggctggcagatctcctccggtccggaaatcgaagccgaatggtacaacttcgactccctgaacttcggcccggaccatccggcccgtcagatgcaggacaccttctacgtcaagggcaatcaagccaaggacgccgccggtttcgtcggctccaacatggtggtgcgtacgcagacctcctccgatcaggtccgtgccctcctgacccgtggcgtgccgctgtacatcgcgtcccccggccgtgtgttccgcaccgatgagctggacgccacccatactccggtgttccaccagtgcgaagccctcgccgtcgacaagcacctgaccatggccgacctgaagggcgtgctggacaagctcgccgtcgccatgttcggccctgaagccaagacgcgcctgcgcccgagctacttcccgttcaccgagccgagcgccgagctcgacctgtggttccccgacaagaagggcggccccggctggctcgagtggggcggctgcggcatggtgaacccgaacgtgctgaagtccgccggcatcgacccggacgtctacaccggtttcgccttcggcgtcggcatggagcgcacgctcctgctgcgcagcgacatcaacgacatgcacgacctggtcgaaggtgacgtgcgtttcgccgaacagtttgtgatgggggagtgattcagccatgcctatgatcgatatcgattggctcaaggaccatgtcgaggttcccgaaggcctgacctacgaacagctcgccaaggaccttgtcaaggtgggtcttgaggaagaggagatccactcctcccaggtgaccggcccgattgtggtcggctacgtggtcgacgccacccccgaaccgcagaagaacggcaagaccatcaactggtgccacgtggactgcggcgacgaatggaacgagaccgacgaagacggcaacaaggtgccgcgcggcatcatctgcggcgcacccaacatgaaggccggcgaaaaggtcgtcgtcaccctgcccggtgccgtgctgcccggcgacttcaagatcgagccgcgcaagacctacggccacatctccaacggcatgtgtgcctccgaacgtgagctgggtctgggcgacaaccacaatggcatcattctgctgcgtcagtacggcttctccgaggctgaatatgaggctctgaagcctggtcaggacgccatgcacctgctgcacctcgaccagcctctgcttgagatcaacatcaccccggaccgtggctacacgctgtcctaccgtggcgtggcccgcgaataccaccactccaccggtgcc

SEQ ID NO: 2926 - DNA, 12177 bp, Unknown
  R19_24m  MAG No. k141_2908
accgtgggcggcgtggccggttgcacagcgttgattatctgcggatttgcgattaatgacaccgtcgacacgattggcgtcaaacaatacgagcagatctaccagtacgacctgatggtcgtggccaatgacgatgacgccaccgcgatgcgcaagcaggtggcacaagatggccaaaccaccgaaacgctgaatctgcgcgtggatagtggcgagatgagcaatgcggcgcaggaaagcgaaaccgtgcagctgatgaccgtgcccaacgattcgctgaatatcttgaacgatatggtcacgctggaacaagctggcgatgatggatggtttgggctgcccaatatcttcggcaaagcgggtggcggcactgtagcgctggacgatagtggcgtgattgtatcgcagtccgccgccaactcgctgaatattcatgccggcgacaccgtcacgctgggcaatggcggcagcagccgggccaaggtgcaggtcgcggccgtgacgcgcaatcttgttggctctgatgtgtacatcagtgagcgactgtacgaccagaagtttgcggccggcggtgtgacgtcttcggcttcgggagatggcactgcctcgaccttgacgtggaacgcgatgctcgccaagctgaaaggttccgagaccgaacaggccgaatatgcggatcggttgggcgaggaatcgtcggtgctcaaggccgtgagctgtgcgcatctggccgccacgtttaagttcgatttgatgggtgccgtggtggcgctgattgtggggctcgccggcggcctggcgctggtggtgctgtttacgttggccaatacgaacgtgtccgaacgcatccgcgagatggccacactgaaggtgctgggcttctatgaccgcgaggtgcacaactacgtgaaccgcgagatgatgatattgaccggtatgggtgtggtggttggtctgccgcttggcaggtggataggcggattactgactgctgcgttgaatatgccgtcgctgtatttcgaagtggaagtgcactggtacagctatgcgattgccgtggtggcgacgctggcgttcgcgctgctggtgcagctgttcaccaacccagtgctcgatcgcgtagacccggtcagctcgctcaagtccgtggaatagaggtagaagttcaattaggtgttggtgaattgaactttttggcggaatatttacagcatcatcgcatgtattcttgagctgagcggttttcgcgacatatttcggtgatacagtctgaacttgttttgaacgagtatcgcgtccggtacgtaacaatcgggcggcggagaagagaaatgaaatcagtatggccgatacgaatgtgaatggtggtacacggcaggctacgggcaaactcaagtctgtcgaaagcctggaccggaccaacgagatggagcgcggcctgaacaaccgccacgtgcagttcatcgccatcggcggcaccatcggcaccggattgttcctggggtccggcaagtcgctggcgctgaccggtccctcgatcgtcttcgtgtatatcctggtcggtgtcatcatgttcttcctgatgcgcgccatcggcgagatgatgtaccgcgaccccagccagcacaccttcatcaatttcatcacccgttaccttggcaacggatgggggcatttcgccggctggacgtattgggccgcgctcgtgctgttgggcatgaccgagatcacggccgtctccacgtacttcatcaccttcttcgacacgttcggcatcgacctgacccattggaaatggctgatcgaactgtgtttcctggtgtcgctggtgtccgtcaacctgatcgccgtcaaggtgttcggcgaggtggaattctggttctcgatgatcaagatcacgctgatcggcgcgatgatcgtcaccgccgtggtcatgatcgtgatcggctaccattacccggccgcgcggattcatggcgtggatcatgtgagcccggcgggccacgccggactcgacaacctgttctccggcttctcgttcgccccgaacggctggatggccttcctcatgagcttccagatggtgttcttcgcctatgagctgctcgagttcgtgggcgtcaccgtctccgagaccaagaatcctcgtgaggtgctgcccaaagccgtcaacgagatcatcgtgcgcgtgctcatcttctacgtgggcgcgctcgtggccatcatgtgcatcgtgccgtggacctcgttcaagccgaacgaggacggctccttcgcctccccgttcatcatggtgttccagtatgccggtttgaactgggcgtccgccctggtgttcttcgtggtgatcaccgccgcgtcctcgtcgctcaattcgctgttgtattccgccggccgccacctgtaccagctgtccgaggtgtcgccgaacccgatgctgaacaagctcggcaaggtgtccgaccgcaaggtgccggcccgcgccatcctggtgtccgcggcgctgatcctgctgtcgccgatcgtcaacgccatccccggcatctcgggggcgttcgtgctgttctcgtccgccagctccgcggtgttcctgttcatctacatcctgacgctgctggcgcatcgcaggtaccgccgttccgccgatttcatcgcggacgggttcgtcatgcccgcgtggaaggtgctcaacacggtggcgatcgtgttcttcgtgttcatctacctgacgttgttccttgcggacgatacgcgcaattccgcgattgccggcctggtgtggcttgtgggcttcggtggattctctatgctgcgcgaacgctaccgtagccgcgatttgaaggccgcactggaacacaaggagtgattggacgggctgattggctggcggctattagttgggtggctgttggctgttggcggctgactggctagcggccgatagccaatgactgggctgatcgtcagccaatcggctgcctataggtctcattgatacattcggtcatccgattagtgcatttgcgcggataattagtgcattcgatcatcggattagtacatcagtgtgcaattattagtacaattagccgcctaattagtacattaggacataaaacaatgtcctaatgtactaattagatgctaaaatacgataagtgccatgtcctaatgtatgaattatcgctatgaagggcggaatgcgatgacgcaggatgaacttatgcaagtgctgcaggccggtgaatcatctatggtcgagttcaagcgctgcagcgaattgcctcatacggatacttttgagactgtatgctcattcgccaatcgttctggtggcagcatttatcttggcgttgacgatgacggtcaagtgctcggcgtcgattctaagcgcgttagtgagatagagcgcaacgttgtcaacgtagtgtctaatcgtaagatgttcgagccggctccaatggtggaaacggaacatatcgagtacgacgaacggattattgttcgtatttgggtagctccgagttcttcggttgtgcggttcaagggcgcagtgtttaatcgcattgctgatgtggatacacacatcgaaagcgatatccagattagtcaaatgtatattcgcaagcagaactactattccgaacggcgaattttccgttacgtgactccgtttgatttgcgtcctgagctgattgcgcgaatgcggcagctggcggtcgctcagcgagctgggcacccttggggaactatgtctgacgaagaactgttccgcagcgccaagctatacgatcgtgattacacgaccggcgaagagggctttaatcttgctgcagtgctgctcttgggcaaggatgaagtcatttcctcggtttgcccagcgtatattactgatgccgtggttcggcgagacaatattgaccgatacgatgaccgacttatggtgcggaccaacttgttcgattcgtacgagcaactccgtgaatttactgagcggaatctgcctgaccgctttgtgttaaagggcgataagcgagtgagcccgcgtacgatgatcgcccgtgaattggtggcaaacagcctcatgcatcgggagtattccagtccggtggtggcgcgtgtcaccattgataatgaatccatccggacggttaatgcttcgcgctcattctttgaaggtcgaatgaagctgggcgagttcacgccaatgccaaagaatccgattatcgctaatgtgtttgtgcagaccggcatagccgagcagctgggtagcggactgcggaatctgataagagcgtcccggcaatatactgagcgagagcctgagttccgcgatggtgacatattcgaggcgacgattcctattgttcctgcgctgaagaccgtggatggttctggttttgctagcgtgagatctgtagttgagaaagatgccgaagagggtgcgaggctcattggcggggaacgtgtggatggtaagaaagcagatgcaaccgcatcgggtgaaattgattcgcgggcagcgatgctgtcggcgatgaatcgacgcttgacagaggttgactatgtgactgtacctgaactcgccaagataacagagctcgataacagaacagtccgcaaattcctaaacggtttagttgcgcaaggaaagctgattgctgaaggcaacacgcgtggtcggcgttatcggaagggatagcgggcgcgatatctcgatgcagtgggattcacttaagggctacggcaaatatgattcgtagcgattgggccagcgcaattcgaatggctcatgactttgtgcgtcgtttgtggtctctgaagttgtttgctgggtgacggttttgtgataaaatcgctcatatcaaaatgtttgcgtaaacattttggctgcgccgaaagaaggagtcgacgtaggtcatgtatcaggcaaagaggccggcgcagtgaagcaaaggccgatttttccggtataaggcggatagcaggaacactaaggagaccaatgaaggtactgagcaaatcgcttgctgcaatggttgcggcggcaacactggtgggaggaggggcgtttgcggttgccggcactgcgtatgcggctgataacgatgccattaccgtgaccccgaacccgtggtatgccaacagtttcgatggctggggcacctcgctggcttggttcgccaacgccaccggcagcctcggcgaggaatcggccatcaccaccaatctcggcgatgacgcttccaaggctatggctgtggaatacggcaaacagctgcgcgaacagttctaccagtccatcttcggtgatgaaggactggacctgaacatggcccgctacaacgtgggcggcggcaatgcctccgatgttgcctacggctacccattcatgcgccaaggcgctgccgtgcctggcacgtggaaagatgacgccaccggctccggcacgtatggcaatggcgtaaccaccaagcaggccgacaaagacaagctggctgcggcattcgacccgactgacgacaaccagtatgacttctccaagtccgccacccaagactggtggattgagcgcggtgccaccggcgataaccctgacatcaccgacgtagaggccttcgccaactccgctccgtggttcctgaccaacagcggttacgccactggtggacgcaactccggtagcaataatcttgcaaaccctgagaaattcgctcagtacatggccaagaacgtcgagcacctcgaaagccttggcgcaaacgttgacacggtcgagccgttcaatgagtccgagaccagttactggggcactccgggcgacatggcttcgaagtacaccgatgagagcgatgacaacaccaagctcattaacaactactgggataagtactactccgacaaagataagtccgtcaccccatactccaacgcgctgaagaagccgcaggagggtatgcatgtcagcaacgcccagcagcagcagacgattaccgcactcgctgaggcgctcaaggacaatgatgacaccatcatcgcagccaccgatgccacgaactccgccgacttcgtcaagtcgtacaaccagtacccgcaggcgatcaaggaccttatcggccagtacaacgttcacgcctactccgacagcaaccagatgcagtcgcgcgatatcgctcaggcagacggcaagaagctgtcgatgagcgaggtggacggctcctggcagtctggctcctacaacccgtacggtttcgacaacgcgctgggcatgatgagcaagatcagctccaacgtcacccgcctgcagtccaaggacttcaccttctggcaggtggtcgaggacctctacaacatgcagatgggctcgaatgtgaatccggccggtgagaacaccaactggggcaccgtgctcatcgacttcgactgcaccgtggctggcatggacggcaagctctactccgagcgccgcgtgaacaacaacggcggtaccaccgatggacttgaaccgtgcacggttattgcaaacgccaagtacaacggcgtcaaggccatcacccacttcatccacgcgggcgacaaggtcatcgccaacaacgatgaagacaacaacatgactgccacctccgacgatggcaagatacagaccgtcatccaccgcaactccggcacctctgaccagaccttcgtcatcgacctgtcgaagtacggcgagattgccgacaacgcttacggtgagctctacctgaccaccgaaacctctgccgaagacaagaacgcgggtgtcgattccgccactccggaagtcttcgccaagaccagcaacgtcaagcaagctgaaggctctgtgatgattgacaaggctgccaagaccgctacggtcactgtgcccgcccgttctatcgcctccatccagctcactggcgtgaccggctacgctaaggatgctgccgtcgagaccggcgacacttaccagctcgttggtaagcagtccggcaaggccgtggctgataccacttctggtgattccgcgctgtccctggccaacgtcgcttccgatgccgagaacgccaagaagcagacttggacctttacccagatcgagcagcccgccgacttcgagcgccctgatctcaaggcttatgtgattactaacgccgaaggcaaggtgctggtgtccaaggatggcacgaacgcgctttccaacgaaacggttgaggccgctaagtccgacccggctgccaagtggattctcaacacttccgatggttcgacctaccagctgctcaatgccgcgactaagacgaacctcgatgtggataactctggtaccacagtcggcacgaaggttggcttgtggcagtcaccgagcggcacttcgccgtccgccaaccagacatggactctacgcaatgtaacgccgaccagccagaagaccgtgaacgtgcagaccgccgttaacgagaaggccgcgctgccgaccgaagtcacgctctactacacctggggcgaaggcaaggccacggttgccaactgggatacttccaaggtcgatgtggccaaggaaggcacctacgaagccaccgctaccgccaccgatgtgtacggcaacgagttcaatgtcgccgctacggtctacgttggcgcgctcaccgtttccgatccggtatcggctacagtgctggccggcaccagtgcgagcgaggcgaaggccgcgcttgaggctgcgccggtgtatctgcacgtcaaggcatcgcctgcattcgagggcgatgcggctaaggttacgtggaacttcgatgggcttgataccaagctcgccgatgccaaggctggcgacaacattgccgtgaccggtacttaccagctggacgacgcgaccacgattgcgctgaagggcgcgatctatgtcaccgccgccacgcctgagaatgtggccgacactgcttccagcctgaccgtgaccaaccagcagacggaatacagcaagggcgatcagtggaagaagctcaccgatggtgacacgtcagctgaagcctgggtgacgtggaactctgctggtgactattccgccagcccgaccgccacgattgacttcggctctgagtgtgagcttagcagcgtgaccattacgtatggtgacaaggctccggcttccgccaaggccgagtacaccactgatggcgagacgtggatgcaattcggtagcgatgttaagcctgccgcaggccagacggtgacgttcaaggccgataagggcacagtgaatgccacgaaggtgcgcattgtgaacaccgtgaacaacgactacatgaacgccaccgaaattcaggcattcgtgacgccggttcagggtgctgcgaagaacatcgccgcggcctctggcacgaacttctcggtgaacttccaggagggtgcctccgcttccaaggccatcgatggtgacactacgtcaaagggttggtccacttgggcttccaccgcctcgacggtggacccggtcgccacgttcaccttcgacgaagctcagaccatcaccgaagtgaagaccttcttctactacgatggtcgtgcgtcttggccgaagagccagacgctggaataccaggatgaggctggcgaatggcatggagtcggtaccaaggatggctggaagatacaggccggcgatgccggctctggctccgacggcatcaccgccgccgacaccccgaccgttgacttcgtgctcggcaccccggtaaaggccaaggccatccgcctgactaacacattgcaggacaccaaggtgtacatcaacgtggctgagatccaggtgttcgcacaagacagcacggtactcaccccgcagccagcatccgatgccacgctgggcgacctgcgtcttgacggcgaaaccgttgaaggcttcgacccggccaagaccgactacacggttgatctgccggtcgacgccgaggcaaacccggtgctgcaggccttcgccaccgacaatgccgccgccgtcaaggtgactggcgacgcggttgagaacggcaagcttggcggcaaggccgccattacggtgacctcagccgacgagtctgagacgaagacctacacggtgaccttcaacgccttcactttggcttcgctcaaggtgatcggacccacgaagaccgagtacgccatcggcgacaagctcgataccgccggtctgaaggtgactgccgtctaccagagtggcgacaagaccaaggaagtgccggtcgctcttgacgacccgcagcttgcgattggctcgttcgactccaccaccgcaggcaagaaggcgattaccgtctcctaccgtggtgtgaccgcgaccttcaacgtcacggtcaaggccaacgcagtcgcccctggccctgaagaacagaagcccggcaacaccaacaagcccggtgccaccggcaacggcaacaagaacacggtggccaacaccggttccagtgttgccgccatcgctggcgctgtcgctctgctggccgctgccgcgggtgcactgttcatgctgcgcaagcgtgcatagcaccctcgcgcagtaatgggtgaaggaacaagccggcaatattgactattgccggccggttcctccgctctttgaccataattggtccgacaagttgaatactgagttttcagtatcggtatattgatttgtcgaaccttttctggcttcgcggatagcgacataactgtttgttcaaaaaaccgttatcatcaatcaaggaaccaaatcaatgaagataaacaataagggcaagggcgctcttatcgcggcaattaccgccgcggcaacgctattgtcatgcgggctggccgctgcaagtgccagtgcggcaggtgtggattacctgcctaccatcggccaagtgccgacatacaccaagttccagcccacagccgatccgggcaagaacgctagcgattacttccagccatattggtatgccaagaacgccaatgataatggcggcacacacatccaagcgcacggtggccaagtggtcaaggttggcgacgcctactactggtatggcgaagaccgttctaacggttacgacaacagccccggtgttcatgcttatatgtcgacagatctatacaactggaccgatcttggtgtggcgctgcgtgcggtgaccagcaaatctcagttgacagataagagcaatgccgattacgcctatttcgacaaggcctacaacctgaccaagtccgacggcagtgtggacgctgccaaggccgacgcaatcttcccgtacctcaacaccaaccccgatcaggatggtgatggcgcggttgattccgtacagggcattttcgagcgtccgaagatcatctacaacaagaagaacaagcaatacgtgctgtggtggcattccgatggaagcaccacgccgggcggttccaactatgcacgtgcacttgcgggcgtggctgtttccgacaatccggcgggcccgttcactatggtgggtgcctatcgtttgcctaaccagaacaattggaaagaagccgcaggtaaccccagctggggtgagaacggtgacagccgcgatatgactgtgttcgtggacccgaaggacgacagtgcctatgtactgtattcttccgaagccaatgccacgctgtacatcgccaagctcaacgatgattacaccaatgtagtcaagaccacgaatgtggaccagtccgagggacaaaagcagtactctgctgacgggcagtacccatacattcttgcagacgctactacggatgccccggtgcgtggcgaagatttccaaatcgtcaaacaaaatggttcgctggaagctcctgccgtattccaatatgacgggcgttacaacatcatcgcatctggtgcaaccggctgggccccgaacaagcagacctactacaccgccgactccatgctgggaagctggacccgtggcgtggaaaaggacgatgtcaacgagaacacgtggtacaacaacatgccggaaggcgcggatggtctgttgtccgtgggcgatacccgcggcaccacattcggttcgcagtcggctagtgtgctcgcagtagaccaggagaaaggtcacttcatctaccttggtgaccgttgggattccggtaaagccgattccacctatgtttggctgccgctgaccatcggtgagaacggcaccatcgaaatgcacaatcctgctcaagaaggcgagcccgacggttgggatctgagctattggggcaaccatggtagcgccaagggcaagctggtcaactggactgtggaaaccggcgatgatctcccgaagaccgtgaacacgggcggaaccgttactctgccggacaccatcaacgtcaaggaaggcgacgataccattgctaccaaggtgacatggaatgtggaaggcggtacggcagtcagcaagtcgactaaggctgctggtaacacctacgcattcaatgtgccgggaacctacaccattacgggcactcttgccgagagcagtaacttcaatccgggccgtacattccgtagaaccatcgatgtttcctgctccaacccgatttccggaagttggaaggaagctcattggaagggcggcagcgcgtgccaggtttctgcgtccggcggtgcttatgacttcacgattacggacaacgccaatcgtggcgtctggacggatcgcaacgagggcagtgcggtgtaccagcctgatgctctggacgtgaacgaaacgctagaaaccacggtcaagccgctcgacttgggcggtaatggcgatccgcgcgccggtctggtggtccgtaacggtcttactggcgctaacggcggcaagggatatgccacgttacttgccagcccaagcggcgtttacatgcagtacgattccaatgccgatggctacatcgataaggaaacatcgcatgttggtaccggcttcggcgaccaagtgcagctcaagctggagcgcacctcaaccgatactctgaaaggctactggcgtgcttccgcgaacgatgaatggcaggatgtcgctacggtaacgctgaccggtgcggacgtaaccgggctcgatgccggtgctttcgccacgtcgaacagcaatgccggcgcattcaccgtggccttcaacggcactgcgttcggttcgcagactgctgctg

SEQ ID NO: 2927 - DNA, 3975 bp, Unknown
  R19_24m  MAG No. k141_3030
ccatgagtgagaaactgatggaacagtaccggttgcgcaaacaacgcaaacgccgtaacgcttgtatcgccgccatcgtgacagtagtgcttgtccttgccgtcgccggcggcgtatggtggacggccggcgatggcagcgtactggttcgcaatatgttcaagccgaaggccacgcctgccacgcagccggtagtcgacagcaccgcagccttcgcctaccgcaccgcaccggaattcctggcgatgggagccggcgaccgagacaccggcaatgtgaactactcccctgcttcgatgtggatggcgttggccatcgccgcgcagggcgccaatggcacgacccgctcgcaactgaatgagctgctgggctccggttcgctggccgacagcgactaccaatcgctgctgagttcgatcaacgggcaatattcgggggcgaaatccgagatgagcgccgcgaactcgctgtggatcgataacgactactctcttgccagcgattaccaatccaccgtcaagaagatattcgaggccgaagtcaccacgctaccgttcgacgatcaggccgccgccaagatgtccgattggattgccaagcatacgaatggttcgctcaagccgaagatcacgctgcgtgaccgtgaagtcctgtccatcatcaacaccgtctatgcggatggccgctggaaggatccgttcgaagagcagtccaccggcgacggcaccttccacggcgaagccggagatgctcaggtgccgatgatgcaccggaccttcagccaaatgacttacagccatgatgagtacaacacttggcagcgggtggagattccattcgacaacagcggcaatctggccatcgtgctgccggccaaagggcatttcgacgagctggccggcaatgccgagaaactcggatgggcgttcggcacgtgttcgtcggcatcccctggcgaggacgcaatgggttgcaccgcggacagtctgcccggatggggcgtctccgtcaactcggccacggtgaacgtctcgctgccacgattcaccgtcgacagcatgttcgactcggaagccaccatcaaggcattcgaaaaactgggggtgaccgatgcgttcagtgcaggcgacgccgacttcaccaagatggtcgacaccgattcgcacggcgagaatctgtatatcggttcgattctgcaaggcacgcgcatcgaggtgaacgaggccggcgccaaggtcatgtccttcaccaaagccggcgcagacttcactagcgcgccggtggacaacatcgagttcacggtggatcgcccattcctgtattcgtacgtcaccccggacggcataccattattcatcggtgcggtgcgcaacctcggcggagtcggtggagaacactgatactttcccgacagtccgtcaattagggtgtatcgtttgacgcatggctacgatgaaggaaatcgcgaacaaggcgggggtttccgtctctacggtgtcgctggtgctcaacggacgcgacgaggggcgcgtaaagtccgaaattgcggacaatgtgcgcgccatcgccaccaagctcggctaccggtcgaatccgctggccagttcgctgcgtacaggcaagacgcacatcctcggtttcatcagtgaggaggtggtcaccaccccgtacgccggcggtatgattctgggcgcgcagaccgccgcaagccagttcggctatatgctcatcaccgtgagcaccgacggtgagaacagcgagagcgaggaaatcgccgcactcaagcgatacggcaccgacggtttcctgtacgccaagatgtcgaaccgcatcacccatgcgccttcttcgctggccaagacgccactggtgttggtggatgccaccgactcgcttggcaaaatcccgagcgtggaaccggacgagttccaaatcggctacgacgccaccaccagattggttaaggccggatgcgcacgtatcgcctatgtgggttgctcggaaccgatgattgcgcaggatggtcgtttggaaggctatcaggcggcgctcagggacgcctgcctcgactatgacgatcgtctggtcgtcaatgtgctcaataacgggccggcactgaccgcagtcagcgatttgttcgacgccgagcatccggacggattcttctgcttcaacgatgcccgcgcctggtatgtgtacgaatgcgccgcacgccgaggactcacggtcggcaaggacatctccgtgatcggcgtggacaaccatcgcgtgttcgccgaaacgctggaaccgatgctcaccactgtggaactgccgcatttcgagatgggctactgggccgtggccaagctggtgtcaattatcgaaggacgctcgatggacgacgtctcacggccagcgaccaccgctcccctgccgccgatcgacgcgccgattccggcgaagatccactgcacgctgatcgaaaaggcctcggtgaagtaaccgaggcccacacgatttctcaaggcctccgtccagcacggaggcctttttgcatgtcgaacgggtacgacacgccgatgacgtcaatcgattgacgtaaatcgattgacgtcgcatagtaattactacacaacaacttctacaaaggcacagccgcccgagcaggagcgtcacataaccaataaccaaccaagtagtaatcaaaggatgattatggcaagtgcaaccaaatccgcatggaagaatccttcctatctgcagagttccttcggcatcttcatgttcttctgctcctggggcatctggtggtccttcttctcccgctggctcaccgacccgacccacggtctgggcatgacctccgcagagcagggccagatctactccattaactccttggcaaccctggtcatcatgttcgcctatggtgccatccaagatcagctgggcatcaagcgcaagctcgtgatcttcgtctccgccatcgcagcgctcgtcggcccgttcgtacagttcgtgtatgccccgatgctgactgccggcggcaccacccgtttcatcggcgtgctcatcggctccatcgtgctctcctcaggcttcatggccggctgctccctgttcgaagcgctcaccgaacgctactcccgtaagttcggcttcgaatacggccagtcccgcgcttggggctccttcggctacgccatcgtggcactgtgcgcaggtttcctgttcaatatcaacccgctgctgaacttctgggtcggctccatctgcggccttggcatgctgtgcgtctacgctttctgggttccggccaagcaaaaggaagagctcaagaaagaagccgatccgaacgcggctccaaccaacccatccttcaaagagatgatctccgttctgaagatgccgactctgtgggtgctcatcgtcttcatgctgttcaccaacaccttctacaccgtgttcgaccagcagatgttccctaactactacgcttccctcttcccgaccaccgaaatcggcaacgccacttacggcaccctgaactccttccaggtgttcctcgagtccgccatgatgggcgtcgttccgattatcatgaagaagatcggcgttcgtaactccctgctgctcggcgcaaccgtgatgttcctgcgtatcggcctgtgcggcgtgttccacgatccggtcagtgtctccatcgtcaaactgttccactccatcgaggttccgctgttctgcctaccggcattccgctacttcaccctgcacttcgacaccaaactgtcggcaaccctgtacatggtgggcttccagatcgcttcccaaatcggccaggtgatcttctccaccccgatgggcgccctgcatgacgccatgggcgaccgtccgaccttcttcaccatctccggcatcgtgctggccgccctaatctacggcttcttcgtgatcaagaaggacgaccaggaagtcggcggtgatccgttctac

SEQ ID NO: 2928 - DNA, 21040 bp, Unknown
  R19_24m  MAG No. k141_3120
cagtaaaggaggaacaatgggtcagggtcaatcatccgtttttgatctcgcggcagtggctgcggcgtccaatggggggaacaacgacccgctgctgcctccggcacgattcatcggcgatccgcagaagccgagtcgtatgccgtataacaagtacgccgcctacgacaagcagatcccgtttgattacccggagcgcacgtggccgggcaagcgactgcagcgcgcgccgcgctggtgctccgtcgatcttcgcgacggcaatcaggccctcgtcaacccgatggattccgagcgcaagctgcgtttctggaacctgctcgtctccatgggattcaaggagatcgaggtgggcttcccgtccgcttccgaaaccgatttcgacttcatccgtatgctcatcgagcgtgagctgattccggacgacgtgaccatcgtggtgctcacccagtgccgcgagcacctcatccgccgtacttacgaggcgctcaagggtgccaagcgcgccatcgtgcacttctacaactccgtgtctgtgctgcagcgcgaggtcgtgttccgcaagaacaaggaagagatcaagaagctcgccaccgacgccgccgaactgtgcaaggacctcgagaacgaggccaagggcatcgacctgtactacgagtactcgccggaatccttcaccggcaccgagccggagtacgccgtcgaggtgtgcaacgccgtgatcggtgttatcaagccgactcccgagcacccgatgatcatcaacctgcccgccaccgtggaaatgaccacgccgaacgtgttcgccgacgaagtggagtacgtctccacccacctcgacgaccgtgactccgtagtgctctccctccacccgcacaacgacgaaggcatgggcgtggccgccaccgagctggccgtgctggccggcgccgaccgtgtggaaggctgcctgctgggcaacggcgagcgtaccggcaacgtcgacttggtcacgctgggcctcaactggctcacccaaggcatcgacccgcagattgacctgtccaacgtgcccgagatccgcaagacggttgagtactgcaaccagatcaagatctccgagcgtcacccgtacgccggcaacttcgtgttcaccgcgttctccggctcgcatcaggatgccatcaagaagggtctcgaggctcgtcaggtggccgccgagcgcgctggcgccgatctcgacagcttcgtgtggcttgtgccgtacctgccgatcgacccgaaggacatcggccgcacgtacgaggccatcattcgcgtcaactcgcagtccggcaagggcggcatggcctacctgctcaagaccaaccacaatcttgacctgcccaagcgtctgcagattgaattcgacaagatcgtgcaggactacgctgacacgaccaagaaggaagtcaaggacgaggatatctggcgtctgttcaaggacgagtacctgccgatcgaacagtccggcatgaccgccgccggtgtggttgtgggcgatactcatgacgcctcgctcgcgccgtggggccgcttgaagctgctcaaggtggccgtcagctccggtgaggatggctccgataccgtgctcaaggctcgcctgctcgaccgcggcgtgaacgtcggggtcgatgcgcccgtggagcgcgaggtctccggcatcggcaacggtccgatcgccgccttcctcaacgccatttccaactttggcgttgacgcctcgattatggattacgtggagcacaccatgtccgtcggcaccgacgccatggccgcctcgtacgtggaatgccaggtcggcgaggccgatgatgcgcagatcgtgtggggcgtcggcatcgattcgtcgatcaccaccagcgctctgaagtcgattatctctgccatcaaccgttcccagcgcaagcgctgagcgctaacaacaaaacaaagctccctctgattgcatcagagggagctttgttgtctgtgcttacttactactgggtgacgccgttggtgccggtgttcccgccggtgcctccggaattaccattatcgttgccggtattgttcccgttgttcccgccggtattgctgggattgttgccattgttgccattgttgccatctccgccggtagtggtgccgggataattcggacactcggtggaatagctcggattggcgaggcactgctgggcgaactcctgggcctgctgttgcttcttggcttcctcttcggccgccttctgctgtgcgtcctgctcagcctgcttctgcgcgtcttcggtggactgcttgttggtgttgttggacaggccgctgctctgtcccttgcccaagccccaagtgccgtcgggtccaccgatcttgccattgtctttagcggtcgggaactgctccacctcggtaccttgcaaggcctgagccatgaactcctggaacaggtgggcggggtatccagtggaagagatgccgtatccggagaaggccggcaccgcctgcggattgcccttatcgtccgggttccagatagcccacacattcatcatgctgggggtgtatcccacgaacgacgaagccatttcgtcgttggcggtaccggacttgccggcgatgggtcggcccagcatgttggatgtgccggccgccgtaccgtacgtggtggtgccctgcatggccttctgcaccaaagcgcagtcgttggcatcgaacaccttggtgcctttgctgggcgcgttgtacatgtccttattgttggaatcaagcactttggacaccatgtgcaaggtgctcttcacaccattgttggcgatggtcgaatggccttgcgccaaatcccacacggtcagggcgttgatgcccagcacgttgtacatggagttttcatcgatatcgccctgaatgcccgcttcatgggcgattgcggccgtgcgcttcggcgtcagatgctcattgacgttcatgaacaccgtgttcaccgagttggcggtggcctgatacagattgatgttgccccagttgttctccagagcgttattcacttcttgatccaagccggtgaagtgctggtgggaattgccgttgaacaacgtatcgaagctgacgccggattgcgcggcccccagcaaagcgaacggcttcatagtcgaacccggttcgaatacggcctgatcggcattgttgagctgcttggacagataatctgaaccggcgtatacggacaatacttcaccggtcttcgggtccagcgctatgccgccgatttgcagggattcaggcatgtcgtccagacgggtgtcgccgatggactgcataaggtcctgcttgctcttgtcgatggtggtgatgatcttgtatccgccggtatccaaatcctctttggtaaaggccttggactgcaccagctcacggcgcaccatatccagcagataaccgttcggccccgcgtattcgttttgctgcgccaccgcggcagtctgcgggaacttggcatcagtgtgctgcttggcagtgatgtaaccatcctcctgcatgatgttcagcacacgcttgaagcgcgatttggccatatcggcgttatcggccggatcccacgtggacggtgacggaataatgccggcgatcatcgccgcttcagacagcgtcagatccttggcgtccttattgaagtatgccttggccgctgcctggatgccgtaggagttgcggcccagatagatggtgttcatgtaattgcacagcacctcgtccttggactcggtttgcgcgattttgatggccacgatggcctcgcgcgccttgcccacataggatgtggtttcgcccatgtaataccgctcggcatactgctgggtgatggtggaaccaccttggcgcgtgcccttggtcacattattaatgaatgcgcgggcgatgcccttcagatcaagacctttatccgtgtagaacgtacggttttcggacgccacaatcgcgttgccgatgtagtccggcagcccctcgcaagagatgattgaacgattctgttccgcgtaggagccgatcgcggtggtgccgtccgcgtaatacacggtggttttctcggccaacgcgaacttttcgggttgcgggacctcggtggtggtgtacaggtatgcgaatactgcgataccggccagcaagcccagtccaatcagggagaagaagatgcccagcacccatttcagtacacggtgcttgccttttcctgtgttctttttcttcctgttcggggctcgatggctattggaagccttgtggcttgcgtggcgggaacggctctcctggggcgtataggggccctcctgtgcggagtggtcggctctgctttgcgcggtgcgcggttgcctcagagcggggccattgcctcccgaatgtgcacgacgagtataagaagccatggtgtccaccgtaactgttggccttgaacaatcgtttgacgtgagcgtaaccgcacgcatttatgccggtatttttccggaattcttacaattgggcacgttccttgatgctgcatgaatattgcctgaatgcgctggttggcctgccgtgcgacccggcgcgcacgtttcgtgtcgctgcgctggtccatacgtctccatagacttatccccagcctccacgcggcgctatgtcacccaactcccccagggcaggaatgcagcaagggtaagtggcctctgacgggtgcgtggaggttttccatttgtgcggatttggccgtgagctggcacgagcacggctccctgtccggggcgcggccgtacagtcgaacgtatgaatgacgcacagacccctagaattcgcgacccgcatgcggcggtcaatctggtcggctcaggcgcagcgcagcctgactcgtcgtcgaacgttgttgacccattggctgcgctcggcccggtctccggttcagatgcatcggcatccacatcaggctccttaggggatttcaggccgctgggcatggacgatgcggatggggcatctgatatcgaccgtggcttggcccggcttgacccgcttaccgtgcgcccgcgaatctccagccgcgtactgtgcgtggtattcggtctgctcctgatcgctattggcttcggcgtgtggtgggggtgcgtgtttaccgaaaacggacaatcgtacgacgaactggtctggaaaaacctgcacaacgatgtaccgtcctggaccaccggcatgatgaacgccgtcgcacaatcctggctggttatcgctgtcagctgcacaattgccgcaatcggcattattacggcgctgattcgacgccgctggtggttggccgggcaaatcgccgtgttcgccgtggtctgcttggccgtcacccgtatcaagggtctgttgccgcgtccgttcatcatcaacactgaatcgcctgccgctaattccgcgccttccggacacacgatgctggccgcagcctgtgcggtgattctgctgcttaccgtgcctcgcgcggttcgagctttggcgggcgtcatcggcgtggtttgggcggcgaccgtcggtgtctctgtgatatacgggcaatggcatcgcccttcggatgtggcgatgtccatcctgctggtggcgggattggccctgctcgctctggcggttacacgcaagtccggcatggacgagccgggccaccgcgtctcctcagtgagtgtgcagatcgtcggcagcgtgttgattaccgggggcctgctgttgctcgcctacagcggttatgtgatctggcaggtggtgccggggctcaatgtcagcgccagttgggcggttcagggggcgaatgtcagcgctgttgtgggcattacgggtgtggccatgctcgcattcggactgttgctggccctacgtcagatcactgcagcgcccttaagcaggctgggcctgatcggcgctccgccggcaccgcccaaacggtaaaacatgaggtgcgaacggccgaatttgcccggcacaacggcggaatttggcagttggatatgattcatgagtattatgacgccagaaacgtcgtgtgtttcgcgcaatacataaggagtgggtatggctaccaaactggtgattgtggagtctccgaccaaggcccacaagatcggtgactacctgggcaaggggtacaccgtcatggcgtcggtcggtcatatccgcgacctcgcgcagcccagccaggtgcccgcggcagacaaggccaagttcggcaagttcggcgtggacgtcaacgacgggttcaagccgtattacatcgtcgacggcgacaagaagcgtacggtcagcgaactcaaatcggccctgaagaacgccgacgaactctatctggcgactgatgaggatcgcgagggcgaggccatcgcgtggcacttggtgcagaccttgaaacccaaggtgccggtcaagcgcatggtgttccacgagatcaccaagaacgccatcaacgcctccctgaacaacacgcgcgacgtggacggcaatatggtcgacgcacaggagacccgccgcatcctcgaccgtctgtacggctatgagctgtcgccggtgctgtggcgcaaggtgggcccgggcctgtccgccggccgcgtgcagtccgtggccacccgcctgatcgtggaacgcgaacgcgaacgcatggcgttcaggcgcgcgccgtactgggatatcgtcgccatgttggccgcgcctgacgcgctgggggagcgtgccgaattctccgcccgcatgatcgcgctcggcggcaagcgactcgccggctccaaggatttcggtgccgacggccagctgaccccggacgggttcgcggcgaacgttcgcctgcttgatgaggctggtgccactgccgtggctgaagcgctgaggaccgccgatttcactgtgatgtcgatggaaaccaagccgtaccgccgccgcccgcagccgccgttcaccacctcgaccttgcagcagaccgccggcaatcgcctcggcatgggtgctcgcgtcgtgatgcgcgcggcccaaagcctgtacgagaacggctacatcacctatatgcgaaccgattcggtgacgctgtcgcaggaggccatcaccgccgcccgcaacgccgtctcctaccatttcggcgacaagttcctctccgccgagcccaagcagtacgccaccaaaaccgctggcgcgcaggaagcccacgagtgtattcgcccggcgggctcgcgcttccacgacccggatgagctggcttccaaacttcccggcgaccagctgcgcctatacacgctgatctggcagcgcacgctcgcctgccagatggctgacgccaccggctccaccgccaccgtgcgcctgtctgcgccggccggccccactgagggcgaggccgtgttccaagcgtccggcactgtcatcgaattccccggctttatgaaggccacgggggaggggcgcaagcccaaagccgccgctcccggcgctggggctggctcggaccaggctgctgccgccggcaagacggacgtcaaggccgtcaggggtgacgcctccgaatccaacacctccctgccgccgatgagcgtcggccagcaggtcgaggcaagcgacatcgaaccggacggccatgaaacccagccgccggcccgttataccgaggccacgctggtcaagacgctggaagccaaggaaatcggtcgtccgtccacttacgcgagcatcatctccacaatcatggatcgcggttacgtatacgagcgtggccgtgcgctgatccccagctggctcgccttctccgtgaccaagttgctcgagacgaacttccccaagctggtcgactaccagttcaccgccgagatggaaaacggccttgaccgcatcgcccacggcgaggaatccggccgcgactggctcacccacttctacttcggttccggcgagggcgccgcccgcaacgccgacgaggcgcacgaaggcctgcaacagcaggtcgcgcagctcggcgagatcgacgcgcgcgccatcaacaccatcgacatcggcgacggcctgcacgtgcgcgtcggccgttacggcccgtatctggaagacatggagcatctggacgtcgaaggcaacccgaagcgcgcgtctctgccggacaccatcgcgccggatgagctgacggtggccgtggcccgcgatttgatcgacaaccactccggtggaccgcgcgagctgggcgttgacccggtatccggcggtaccgtcgaggtgcgcaatgggcgtttcggcccgtatgtggcgctggtgccgccggctgaggcttcggctggcgctgctggcgatactgctggtgcttctgcggccaagaagggttcgaagaaggccgcggccgccgccgcgtcgcgcccgaagatggcctcgttgttcaagacgatgagccctgaatcgctgtcgctggaagacgcgctaaagctgctgagcctgccgcgcgaagtgggcacatacgaggaaaccaacgccgaaaccggcgaggtatccgaatgcacggtggccgccaacaacggtcgctacggcccctatctgaccaagacgggtgccgacggcaagtcggagacccgctcgctggcctcggaagacgagatcttcacggtcgatatcgacaaggccaaagaactgttctcgcagcctaagtacggccgcgggcgtggccgtggtgccgccaagccgccgctgcgtgatctgggcaaggacccgaacaccggcaagaacgtgaccatcaaggacggccgtttcggcgcgtacatcaccgatggcgagaccaaccgcacggtgccgcgtcagtacacgcctgaatccatcacccctgatgacgccttccgactgctcgccgaaaagcgtgcggctggtccctccacccgtggccgtcgcggtgctgggcgtgccggtgccgcgaagtcgggagccaagggagccaagaagggcgctgcttcggctgcgaccaatgccgccgaggccaagcgcgccggacgccgtgccgaggtgaagaagctggcaaacaagggctggtccaaccagcgcatcgccgaaaagctcagctccaccgccgccaccgtcaagaaggatgtcgactggctgactgccaacgagggctacgagcgccccgccgtaattcccaagcgtggctgagcggaattattgctctacttgcgtttcaaggggctgatttctcgttttgagaatatctacttccgcttcaaggggctggtcatctgctgaaccacgagtatgaacggctccgcgccaacgtcattccgccgttttggaacgttgtctacttgggcaacagcccctcgaaatggaagtagaccttcagaaaagaccaaatcagccccttgaaacggaggtagagctggtttaactgcctgttgggcacaactctgcgcctaacgctaaggtcaatagcatgagcggtctgtttgtttcgtttgaaggtgtcgatggcgtgggcaagaccacgcaagtcgagcggctgcgtgcgtatcttgaggctcaggggcgtaccgtggtcgttacccgtgagccgggaggcactgcgctaggcaaggccattcgccaactgctgttgcacggtgtggatgggggcgccgtcgacatcgcaccgcgcgccgaggcgctgctattcgctgcagaccgagcccagcacgttgccgaaaccatccgcccggcattggagcgcggtgaagtggtgatcaccgaccgctatctagactcttccttggcttatcaggccggtggccgcgaacttacgccagaagagattcgagccttaagcatgtgggccaccaacaacctgctgcccgaccgcacatatctgctggatatggatccggcgctttcccacaatcgtcttgagcataccgaagatcgcatggagtcggccggcagcgacttccagtcccgcacccgtcaggcgttcctcgacttggccgtggccgagccgaatcgtttccacgtgatcgatgccagccagtccatcgaacaggtgtggtccgccatcgaagcggacattcagacactgctgcgggacaatgttgcagatgtggatacggtgatggcgcgatccggggcgtctacaggagccgtgacgatgggcggtgtccgatgagcgtatgggattcactagtcggccagcagccggtaatcgacatgctcagtcgcatcgcgcagggcgacccgggtcagatcacccagtcgtggctgatttgcgggcctcccggctccggccgttccaatatggcccgagcattcgcggcggcgctggaaagccccgaccacggcatgaacgatgagcccacgcgcgtcacccaacaggtgctcgctggcacccacccggatgtcacagtgctggccaccaacaaagtgaccatcggcatcgaccaggtgcgcgagatcatcaccgcctccgagcaaatgcctgccacggcaccatggcgcatcatcatcatcgaggatgtggaccgcatgctggagcgcaccaccaacgtgctgctgaaggagatcgaggagccggctgaacactgcatctggctgctgtgtgcgccgagtgcccaggatgtactgcccaccatccgctcgcgcacgcgcatcgtgaacctcgccgtgccctccacccaggcggtggccggattcctgacctccaccaccaatgtcgagccaaaagtggcgcagcgtgcggcccgtctggccgagggacacatcggcatcgccaagttgtacgccactgacgagcaggtgatgacggatcgcgacgaattggtggtgggcgtactgaacctcgctcgcgcctcggacgcggtgctgctggccggcagccttatcgacaatgccaaggcccaggccgaggcggacgcaagccgcatcaccgccggccaggaagcggaattccgccgcatcaacggactggcaccgaacgaccgcatcccgccgaaactgcgtggcgcgttcaaccagatcgccaagaaagacgatgtgaagcgtttggtcacccgccgtacgcgcgacgtattggatcgtgcgctgaactccatcgcctccatctaccgggatgtggcggtgctgcagaacaatgcggaggattcggtgggcctcatcaacctggagaaccgctcgccgatcaccgaattgtcggtgcggttgaaccgggccggtgccgtgacccgtctggacgaagtggcccacgcccgcaagcgtctagccggcaacggcaacccgctactggtattcgaatccctcttctgcgccctaattccataacccgacgcaaccagccccctctgacgagggggctgtcgagcgcggcgagactggggggagagacccccgtaacgcacagcccccagtacgtcacacatatgagcgatactgggacatatgaagatttccgccgatttcaccgtcattccggacgattttgccaaggccgccgcgcctgagtacttcaacggcggcgtgccggtcgtctccttcccgttctacatcggtgatgtgaaccccgaggcccgttacctgcactgggagttcgtggacccggattcgattccggtctgcggcttcgagtggattcactggtccgtggccaatctgccgattgacgcgctgatgtacgacttcaatgattcgcatgcgttggccatcccgccggacttctcccgtcagctgccggccatgattcccgagaccgtgcaaggccgcaattcttcggcctccaagttcttgggccgcagcactgacccagcggtgatcatgcggtacaacggtccgcagccgccggacaaggaccacgagtactacctgcaggtgtgggccaccaagaagccgttgcccggcttgaatcagggcttctggctcaacgagctgttgcacgcgctgcgcaacagcggcgaagcgcccgacaccgacggcatcttcctgaccggtaaggcgtgatttttagttggcgtatgtgagctccctctgatgagggagctggccgccgtaggcggactgggggagagacagctagagtgactacccctcagtctcgctttgcgagacagctcgtcctgcaattacggacgggctaccgctcgcaacatctgtggtgggacttatctcccaccctcgcctacaaacagcccaccgggctgtttgctgaacggctcagcctgacaaggggagcttgaataagagaaaggacaccatcacactatggcctgcaccacgattctggtaggcaaagacgcgagctatgacggttcgaccatcattgcccgcaacgaggattccgcgaacggcgagttcaacccgaagcgcttcatcgtcgtgaaaccggaggaacagccgcgcgaatacaaatcagtgatctcccacctgaccatcactctgccggacgacccgctgcagtacaccgccgtgccgaacgcggacctcaaggaaggcatctggggcgaggccggcgtcaacgaggcgaacgtggcgatgagcgccaccgagaccctgaccaccaacgagcgcgtgctcggcgccgacccgttcgtggaatacacgccggccaggggcgatgagcccgaggtgcccggcggcatcggcgaagaggacttcctgaccatcgtgctgccgtatgtcaagaccgcacgccagggcgtccagcgcctcggcgcgctgcttgaggaattcggcacctatgagatgaacggcgtcgccttctccgactccaacgaaatctggtggctggaaactgtgggcggccatcactggattgccaagcgcgtgccggacgaggcctacgtgaccatgccgaaccagctcggtatcgacgaattcgaccttgaggacgctctgggcgaccaagaagcgcacatgtgctccgaagatctcgccgaattcatcgaaaccaaccacctggacctcgcggtggagagcaccaccccgttcaacccgcgcgacgccttcggctcccactccgactccgaccacgtgtacaacaccccgcgcgcctggtacatgcagcgcttcctcaacccgtacgacgaggtgtgggacggcccggacgccgaccacaagcccacctccgacgacatcccgtgggcccgccagcccgagcgcaaggtgaccatcgaggacatcaagtacgtgttgagctcccactaccagggcaccccgttcgatccatacggccagctgggcgatgagcgcacccgccacatgtaccgcacgatcggcatcaaccgccagagccagcttgcggtgatgcagatccgcccgtaccgcccgcaggcctcccgcaccatccagtggatggcatacggctccaacccgttcaacacgctggtgccgttcttcccgaacgtggacaccacgcccgcttaccttgaggacaccaccacccgcgtgacgtccgagaacttctactgggccaaccgcatcatcgccgccctgtgcgatggcgccttccgctccacgtccaacgccgtcgagcgctaccaggagaagaccggcgcgatgggccaccgtttggtgtctgccactgatgagcaggtggcacgccttagcttgacggccgccgaggaagcctcgcagtctgctgccgaagaggaattcgaggccgacaacgtagacggtgatgtgcagccgatgaccccggacgagaccatcgccgcgctgcgtaaccccgaagtgcgcgagattctcgccgccgccaaccagaccatggccgaccagctcaaggaggaaaccgacaagctgcttgactccgtgctgtacactcgcagcatggaaatgaagaacggcttccacatgtccgacttttagtccgtattgagctcccctccctgaggggagctgaccgcgaagcggactgaggggctaagctgttaagaaacagcccagtgggctgtttctaggcgaagaggcggcggcggccgccccaccaccccgctccgccatcatcagcacagaaaggcattaaatgaccaccatcgaagacttcaccagccagtacggcctggtccagaagatcgacgcattcggttacatgaagtacctggccgagaacccggacgccccgtgcaagcacggcaaggtggtgctcgtcaccgccgatacgccgctcaaggcatcgcgcggcgaaggcaagaccaccacgaccatcgccttgatcgacgccctgaacaagcgtggcattgatgcggccgccgtgctgcgtcagccgagcatgggcatcaccgcagccggttccaagggcggtgcctccggcggcggcaaggcatccctgacccaccccgagctcatcgactggggtctgtgcggcgaaatgggcgccatcgaggcggcccagaacctgctcgtctccttcgccgagaaggccatcgatgaaggcaagcttgacacgattctcgtgccgcgtgtctccgaggtgccgagccgctccctgcgctccaccgccgtggactacggcaagggcaacgtgccggagaaggtcgtgctcacgccgacctgcgagctcatgcagatcatggtgctctcccgctcgatggacgagatttccgagcgtgtatccaagatgatcgccggcaccaaggacggcaaggccgtgaccttcggcgagttcgtggacctgtggcgcatcaccggcattctggccgacgcggtcaagccggccaagaccgagaccgtgaacggctccccggtctacgtgcacggtggcccgttcgccaacgtgtccatcggcattccgacgctggtttccgtggaaatggcctgcgctctgcatgatgtggttgtcgtcgaagccggttacggcaccgacgccggtgcccagaagtggctggacatcgcctgtcgcgagtatggcgcgcagtggccgtccgccgccatcgtggtgacccgcgcctccacctggcgcgacgatcccgagctggcctggcgctacccgttccacgtgcagcgcctggagaacctggacattccaaccttcccgctcatcaacctgtgggaaggcgaggacgatcaggttccgtccctgaaggccaccgccgacgagctgggcttccgcacgccgatcgtcggcaatctgttccgcgacggcggcgaggcgctggtcccgcagcttgacggtttcgtcgatgcgttgcagaacggctccatgccggccgaaccgcattcgcacaagggcatggccctgaccgagaacgccaagtgggtggccgagaacgcctacggcgtaccagccgagcgcgtgatctacaagccgggcttcaccgagtccgtgtccgaggccatggaactgtgccagagcgcaggcatctcgctggatgatctggcgttcgtggcggtcaagtccccggcgaccatgaccgacaacgaccgcgcccccgaagaagagcgcaccgtgaccctgaagaaggtcgaggtgcatgccggtgccggtctggtccacgtcaacctgaccaccagcctcaccacccccatgcccaagattgtgtgatgacaggcatgaggtgaggtaactcgctttcgaggggcggatttccggttttccggaggtctatctgcgtttcgaggggctcttcgattgcgaaacccggagtatgaccattgaaattgcaatgtttatactccgggtttcttgttttaaaagccccttgaaacgctagtagagcttctgaatgttggaaatcagccccttgaaacgtagaaagcccgacaccggcgggctttctacatctgagcttccctctttgagggggagctgtcagcgaagctgactgaggggagccagaatacgcaaactagttgccaccctgagccattaaacggaaagcccactgggctttccgtaggcgatgcgaacagctatgctgcgaggggaatggtggcaactagaagttgccgccattccagccccaatcggtggtggcggtgtagcggatgtaggtgcggtcctcgggaatgccgagtgtggagttcagcgcggccataatgctttcggtcagcttttcccaagcagagcccggcacagagcggccgaatacgttgacctccacataggcggcgggctggtcatcgctaccaccgaagtagattggcatattgtcctcgaacgggcacatcagccagccttcggacttgcccggcacagcggtaatcgccttgccgtaggcggccttcagtgcctcacgctgctcgggggtggtggacacggacacatgagtgtgaataacgggcataattcctccttgattcggttcacttccagtctagcctcagcggctgctgttgaacatggcatgcggacgtaggaagctgcttgcagaacggaccggggcaaggccaattggggatattattggcctttccagccaatacacgttccgcagtcagcccaatagtgttgaatactcttgtgagaaaactgattgaacagctgatgaagttcggcattgtgggcgttatcgcctttgttatcgactggggtatcctcaacctattggttggcatattccacatgcacaacgtgctggctgccaccatctctttcatcatctcgctgattttcaactatctggcgagcatgaaattcgtattcaagcatcgtgatgacatggcacgctggatggagatccttatcttcgtggcgggcgctgtagtcggtctgttcatgaatgacgcgattatctggatttccacctatggtatgaaccatgatgcctatgtatcgcagcatgccgaatatctgttgcgcaccaatatcggcaagttggtggccactgccgtggtaatgatctggaacttcttgattcgcaagtggctgctcgacgatacgcacaccaatgcgatgaaccgtctgaagtccgctgaaaatcgactgaatgccgaggagcttgaagccaagtggcagaacagcttctcccacaagctcggcatctggtccttggagcacacgcccaaaggctggccgaagtagcgttttgacgtatgctaagccccctcgtcagagggggcttagcatacgtctcacacactcacttcagtcagggtcggctgctcggtggagcccttgatctgcttgaagccgatcagtgcaatcaccagcgaggccagtgccaaggtggtcaccaccatgaagcctccgtgcgagcccatgcggtcgatgaactggccggcaatcgccgaaccggcggaggagccgatagaattcatcgcacccatccacgccatgccctcggtcaagcgagagggcggcaccagatgcaacatgagctggttgccgttgatccacgtcggggcctggcatacgccaataatcaagtagatgatcatgatcacccacagatgcttggcgaacaggaacgtactgatgccgatgttcaccacggccaggcagaagtagaagcgcttccacagggcaatcgaccagttcttcgcgccatacaccaatgcgcccatcagcgagctgaaggagaagcaggcaaacacaaagcccgtgtactgcttcatattcgcttcggtggcaaacgcgatgatggagatgcccgtagccgactggaacgcgcccaaaccgaaccaggtgacgcacaccgcaatcagacccggaccccaaatggacgccttcttgcccgaacgcgcatcggcgaccgcctgcttaatggctgcgttaatcgtggcctcatcggtcacgccttcacgctcaagacggcggcgggtctcctcggcggcggtttccaccttcagcgcctcagccttggcggcctcgcgctcacggtattccttgcgggagatgccctcggcacgcgccagcgcggtctgcgacggtggctcagtggtcagctcggtcaggaacatcagcgcaccgaccaccacgcacatgccggtgaacgagaacgccagcaaaccggagatcacggccagcgtggaggccagcggattaccgatcacccacatgcattcgtcgagcacgccgcacagcgacagcgcgcggttcgtgcgctcccggtcacccttaagaatcttggtccagcgcgcgcggctcatcgcgccccacggcggaatggcggccaggaacggcgtcagacagtacagcacccattccggcgcgcggttggtaatcgccgtcaccagcgcgatggcggccacaatccaaacgataatcgtcggaatcgagacctgcctctggccgaacttgtcggtcagcttgcccagcagcggcgtggccacggccagcgcaatcgcctgaatggcggtgagcatgccggccagcgaatagttgccgtaataatgctgtacggaaatggtgatggtcatgccgaccatcgggaatggcatgcaggcgatgaccgagccgatggaataacgggcggtatgcggaatgcgcagtagttccgcatacccaccaaagactttgtggcctacttccttgatgccggccagaatggtgctcgagttcgagttggacgagttattggacataacagcactacgctcctttccgctcccgattggatgtcccccgctggcgtggcgttgccggcgaagccctcatcgaatgatgtgttgtccatggtcgcgcaaagtttgcgtcggattttcccatccgcatatttgcgtcacggatactctacgggtgtccactccgcgacacgcggtagattggagatattaagacaacgttctcatgcccttcagggcgggaagcagaaaggcggctcatgagcgctaccaccatccatttcgtccggcatggcaaggtatataaccccgaccatctgctctatgagcgactgcccgacttccatctttccgaccttggccgtcgcatggctcaagccaccgccacgtacttggccaagaatccccaaaccaatacgattgcagccgtctactcctcgccgctcgaccgtacgcgcgagaccgccggcgcgattctcgatgcgctgaaccccgtgcgcgaggctcgtggcgaggcttcgctcacgctcaccactgatgaacgggtgattgaggccggcaacgagttccgtggcaagcgcatcggccatggcgagggcgcgctgtggaagaacggcaactggaagctcgtcaccaacctgtacaagccgagctggggtgagtcctatcagcacatcgcggcgcgtatggacgacttcgcccgcgagaaggtggcccagcaccccggcgagcagattgtggtggtcagccacgaatcgccgattttcagttatcgccattatctggagaccggccaccccgagcactggatgttcctgcggcacacggcgctcgcctccgtgacctcggtgacgtacgacaacgaaaccggccgtgtgatgtcaatcacgtatgtcgacccagcagccaacgtcaagtaacggcacactggtgttaggacattggctcccctcagagaggggagccaagacgcactgcaatcgagtggtggacgcaaaggagcatagatgaccattgaactcaatcgtgaggcaatcgcacaggtcgcggcattgccggcggtaactgaggccgccgaagccggctcggcgctgatcggcctgtggccgctgaccgaagccatgcagatggacaatgacgcaaagtacgcggagaacctgcaggtgcgcgtcacccgtgcattcgcccgcatcctgaccggcgaggacgtcaccgtgccggacgccgagttcgtctacgaaggtgccgatgagattcccggtcgcccgcagagcatcgtggacgccctgctcgccgccaatgacgcctacgacacgatggccgactacgccgagtccggtgatgccaggctgatcgttgaggcggccgacgtgttgggaatcgactgggattccgcgacggcggaatcggtgagggaggcggtcgcggccatggaagcccaggtcgaggccgacgctgaagccgatggtcgtctggccacgtctgccaagcccgccgatgtggctgttcggttcgccaccgcgctcgccgtgtgcgatgcgttattgggtgaggtgtccggtgatgctgtggccgatggttcagcggacagtgtcgccaatgctgccgccaagattctgccgattctgctctacgtcaacgaactgcgcgagcagtgctcggtgccgcgcatctgcctgaccgacgagcagatcctcgggttgcttaatgcccgtgccaaagccgccgacgcagacaccctgaccgccaccgccgaatacatcgctcctctggccgttgccgaatggaacaagcaccgtgaggatgtgctctggaacccggacgaggctaagcgtcaggccaaggaagaagacgaaaagcgcaataaggaggctctggccgccaagttcgcgcatgtcaaggatgatcccggcaaagagaccgtggagttgtaaagagtaagggcgttgctctggccgatgcttcgctcgtaacggttagaggcctggtgcctctccctccgtcatcgctttgcgatgccacctccctcgtcagagggaggtggggttactgcttatcgattaccgagccgcgatcggtcagcgtcgggtccacgtagatgtggcgggttgtagaatccgggttttggatgcggttgatcagcaggttgatggccgcctcggccagatccttatcggacgagcgcagtacggtcagcgggcgggagctgggcgtggcaaagccgttgacggagatcatcgagatatcgtccggtacgcgcttgccgcggcgctccagggtctgcgcgatggcgatcgccagataatcggagtgcaccagcatggccgtcacgcccgaatccagaatggtgtccacgatttggttgacgtccctggtgttgtacggctgaatgccggtgatggtgaacgggcattcgatggcgtcgctttccgtcacgatttgcttccagccatcctgaatcagctccgaagtcggtgtatcggtgaacgccgcgcccacacgggtgtgaccgtgttgcaggaagcgcaccgccgccttacgcacgccatagggatggttggtgcgcactgaatcgacgtag

SEQ ID NO: 2929 - DNA, 26103 bp, Unknown
  R19_24m  MAG No. k141_3135
aatctgcagaagtgacagattccgtagaataatgtagggtttctgaatcgtgaagggctcgtagcgggcgaacccgtgacggtccatgactgtcctcgtttgaatggcgatcggcgcgcatcgtggtaccgccgaccggtattttctcacgtgaatgaagcagcttcagggaatgagtaacagaaaagccaccggcgacacgccgatggcttcaggtgagctcctgcggctgggcttgaaccagcgaccgtccgattaacagtcggatgctctgccaactgagctacgcaggaatgtctgctgtgtttgagatttctctcgcgcacaagtcacatatcctacatgcttgccacgaaaaagcaaattacatgcgtgtagggcatgtcgcgccgaattccgcagaatcggactcatcgaatacccactcatacaacatgatgacgatgcggcgatactgtcacgcgaaatttcattgtggataacttcggaagctggaaccacataggtcgttctggctggacatcctgtttcggacccctcaaggtgggtatcaccggcaaagaagccggaatcgcatcacactcacactatggggaggaatctcatgaatgcaccactgttgtttgattggcgtcgcgacgaagcccgacgtgccagcaggcggcgtcagcaggcgcgtcagcggactcaggaacggcaacggcgtatggatgccataatcgcgttggccgccgttatcggcctgctgcttgccttgggagtgggactggcatccacgcctcagcatgttgcgcatgcggatactgcggtgaccggagatgcggcatacacggtggaggatttcaccgatatgtctgatctggcgtggcgcaatggcaatcagtgcgaatcccggttcgactggccggtcgacgatccacaggtcgaacaacagttcgagcggccgatcaacccgtgggcaccaggtcatcgtggcgtggatcttgctgcggagcaaggtaccgtgattctgtcaccacaggcagggaccgtgagttttgctggcaaagtagctggcaaagatgcggtgagtgtacggcatcgtggaggtgtcacgtcgacattcgaaccggctgttaccgagctctcggtgggggatacgatctcccgcagacagcccgtaggcatcgttgagggcaactcggaccattgcgaagaccgttgcctgcattggggcctcaagcgaggaacggccgactatcttgacccacagcaatatgcggggagtcgaaaaatcgtactgaagccgtcatgattcagcaatgtttgtcggccggaacagggccgtacggaagaggcatcgcaggcggctagcggcgtgacgagtatgaatcacagaccggcatcggccaaggagatatatccgggggcgatcagcgcggacttgagattgctggcgctgacagccagcaacggttcgttgatggtcgggatcttcttcacgccgcctacctcggagttcctgattgaaggcatggaattcagcgcttcgttcttgttgagcttggcgcaggcctgagcgatatccgtggcgatggtctgtctgtcttccatgccggtcatccattgcttgccattgacgatggatgggatgttcgagacgtacgcgccgtatccggtcaccagaggccattgcgagtcacggtccttgtcggaagcggaggtgtccttatccgcatcgtcatcggaactggatgagtcgtttgcgttgtcgttttcaggggatttgatcgggtccggcactgcgtcgcggctgagatccctcttgccggtgatattgccgacaatgcccgagatggtgatctgcggattgatatcggcggcagagccggtgtatctcagatcgtccaattccttgacgacctcggaggcgatatagtcgttcatcgtgatgataccgtcaatacgggtgagtgtggactgcccgtcggtttttgccagacgcttgtcaagcactttcgcagtggagccttccttggcggcatcgtaggccacggcttgccaatcgttttccgtggatttgccgtccaaggtgcctgaagggctttccacaacgcccttctgatagtaggagcccagtacctgccagataccacggaacgcctcttgggcgaacgtggaatcgttggcgttgcctttttcgtccacggcggtgtatggcagcagcacctcaatgtatttggggttgtctttactggccttatccaacttgagtttggacaccatcttttccgcctgtagcttgccgatggtctgggcgtccgagaacttgacgaaggcgtccggcctatacccctcgatgctgttgccgagcaataccacatgcatgccggattccttggccagcttgagcgatgagaccagccggtccacggcctgcgcctgctcgtccgatgcagtgccgtcgctctcagtgttggacgagtcatctttggaagagctgtcttcggaagaatcaccgtcagaagtagctccctcatccgtggcatcgttggtgctcaggttctggctgacgtaatcgccgtattggcgagtggaagcgtcggcctcgactactggagccacgagcaatgtcatgttgtcgggcgcgatggcaatgccggaatcgtccgtggtgttattcgaaagatgatcgaccacaaagtcttggatggcgcggctttgcttgtccaacgagtcggacgtcgtatgatcgatatcgcctttcttgaaaccggcgtcgaccagggccttggttaggtcgggcaccagcttcgcccatttgttcagtggcgtctgctgattcagcgtaatgccgtccgaaggcgtgaacacggccacgccgccggcagaattggacgtcaccgtggtttgaccatctacaacggtcttattgtctgaggtgcacgcggtcagtgacagcaccatcgcgcaggatgcgacaatggcggcgagcagggtggttgagcggcgtgcgaacaccataagcggcgaaacctcctcaagcgggcgtgaaaacaaactgaatcacgattctagtaggccgtatacgaaaaagtcccggaccagtggacaaatcgccacatatccgggaacaattaggggtatttcgcgcgtgtatcgaacaactgtcatgattgtcgtgctgaggaacattccagatgaagcacgacaatcatgacagttggcgacatgacatgacccatgtaggtccgcacgatgtgttcgatgatttactcggccagagccttggccaggttctcgtccagcgcgttcatgaagccgtcggtgtcgagccacggttcgtccgggccgatgagcatggccagatccttggtcatctgaccaccttcaacggtgtcgacgatgaccttttccagcgtctcggcgaagtgacggacttcgggcgtgccgtccagatcggcgcggtgcttgaggccgccggtccacgcgaagatggaggcgatcgggttggtggaggtcttctcgcccttcttccagcggcggtagtgacgggtcacggtgccgtgcgccgcttcggcctcgacggtctggccgtccggggtcatgagcacggaggtcatgaggcccagcgaaccgaagccctgggccacggagtcggactgcacatcgccatcgtagttcttgcaggcccagatgtaaccgccgtgccacttcagggagctggccaccatgtcgtcgatcaggcggtgctcgtaagtcaggccggcctcggcgtacttgtccttgtattcggtctcgaacacctcagcgaagatgtccttgaattggccgtcgtaggccttcaaaatcgtgttcttggtggacaggtacaccgggtaatgacgcatcaggccgtagttgaagcaggcacgagcgaaaccgcggatcgaatcgttgacgttgtactgcacctgggccacgccgccgtcttcgccgtagttgtagaccacgtgctgaatcggctcggagccatcgtccggagtgaaggtgacggtcagctggccggcgcccggaaccttgaaatcggtggccttgtactggtcgccgaatgcgtgacgggccacgacgatcggcttggtccagccgggcaccagacgaggcacgttgctcatcacgataggctcgcggaagatcgtgccgcccaggatgttgcgaatggtgccgttgggggacttccacatcttcttgagaccgaattccttgactcgggcctcatcgggggtgatggtggcgcacttgacgccgacatggtgcttctggatggcgtgggcggcgtcgatggtcacctggtcatcggtctcgtcgcggtgctcgatgcccagatcgtagtagtcgaggttcacgtcgaggtacggcaggatcaggcgatccttgatgtccttccagatcacgcgggtcatctcgtcgccgtcgagttcgacgacagtgccttcgaccttgattttggccatgctacctcctgagagatggtgtgaagatgatttagtcatagcgcatgtttgtaacgacttgaagcaatcgtccggtccgtgggaaacgaccttgttggcgtcccacccgggcaataggcttacaaccatgtctcaggaaattgaaatcggtttgggcaaaaagggccgtctcggctacgcactcgacgatgtggcgatcgtcccctcccgtcgcacccgcgaccccgaggacgtctccacctcttggcagatcgacgcctatgagttcgatgtgccggtgatcggcgcccccatggattcggtgaccagcccggccaccgccatcgccatgggcaagatgggcgcgctcggcgtgctcgatttggaaggtctgtggacccgttacgaggacccgaccccgctgttggacgaaatcgccgggctgccggccgatcaggccaccgagcgtatccagcagatctatgccgagccggtcaagccggagctcatcacgcaacgtctgcacgagattcgcgccgccggtgtcaccgtggccggcgcgctctccccgcagcgcacccagcagttctactccaccgtggtggacgcgggcgtggacctgttcgtgatccgcggcactgtggtctccgccgagcacgtctcctctggccaggaaccgctgaacctcaagaagttcatctacgaccttgacgtgcccgtcatcgtcggcggcgcatccaactacaccgctgccctgcacctgatgcgcaccggcgcggccggcgtgctcgtcggcttcggcggcggcgcggtctccgccacccgccagaccatcggcgtgcaggccccgatggccaccgccatcgccgacgtggccgaggcccgccgcgactacatggacgaatccggcggccgctacgtgcaggtcatcgccgacggcggcatgggcgactccggcagcttcgtcaaggccctggccctcggcgccgacgcggtcatgctcggcgcgccgctggcccgcgccaccgaggcccccggcaagggcacccactggggttccgaagcccgccaccagacgctgccgcgcggctaccgcaccacggtcggcacggtcggcccgctcgaacaggtgctgttcggaccgagccaccaggcggacggcaagaccaacttcatcggcgccctcaagcgcgcgatggcctccaccggctacgtcgacgtgaagaacttccagcgttgcggcatggtggtcaacccgtattccgcacgataatcccgattaccccccctgaaaatgggggtttgccctccatgcaggaggcttagcttgccctaaggcgcgctcaagtcgtttgacttggcgcgcctttcgtgatgttgtagtacaaacgctcgccgatgatggtgagttgcaagggggcttgaaggggtcatcatggagtattcgggatttttccacggcacatatcagtacgggccgttgccgagttatgacggattcatcgttgtggagctgtcggatcgcccggtgcggtatcatatccaacccacattcataggcgggctgaatgcgaaggaatgtcattccatggccatggctgcatgccgcatcgcctgcacatcggcggacgcgatacgtggcaaactcagcgtcgcacatctcaacagagccatgacaaaaccatgcctggaacggctgcaaaccatgcaatacctgctcggcacccacatggtcactcatccggagctcaaagcgaaattctgctatctgcccactgtccccacattgatcgacggcatgatcaccggcaaggacacgctggaaatggcggtattcatgaccatcggccaggaaaatctgcgagtcaacctcaaactgaagttcatcggttctcgatggatgtgcatctatgccgatctgggctgaccagacggccccgcccgcacaccgattcctacgctggcagcggaagacggttctgccgtgtcataggctggttcgcctatagtagtgaccatgcgtgaacatgtagaagaacccagatatgtcaccaccgatgacgacaccgtctactcgctgctggccaaacgagcagctcgcacgccggatgacatcatcgcggaatggcaggatgacaacacccaccaatggcgcggcgccacagctactgaaatgctgtcccgcgtacgcgaggtggccaagggcctgttgggacttggcgtcaaagccggcaccatggtgctgatttactcgcctacctgctatgagtggggtgtggctgatttcgcttgcgcggcaatcggcgctgtggttgtgcccgtctatgagaccgattccgcccgtcagaccgcgggcatcgtcgaggaagtcgatcccgccatcgcctttgccggcgacttccagcgcgcacagacgcttgagcagatccgtgtcaatcatccgggcatgaaatacgtgttcaatttcaaggccgatggccttgacgctgtcgctgacttcgggcatggcgtatccgatgagacgttggatgcggctatcgctcgtatcaaagccgatgatctgcttaccgtggtctacacctccggttccaccggcaagcccaagggcgcgatgctctccaaccgcaattacacgcacatcgtgcttaacggctacgagattctgcgtggcatgctgtacgacgacaaccgtctgctgctgttcctgccactggcgcactgcttcgcccgctacatccagtatgtgtgcatcggtggctgcggcgtggtcggatacattcccgacgccaagcgactgctcgccgatatccgcagcttcaagcccacctacctgctgggcgtgccacgtgtgttcgagaaggtgtataacgcggcctcgcagaaggctggtgccggcatccaggggcatatcttcgcccagtcgttcaagcacttcgtcaagtggagcaaggatgagcaggccggccgcggccattcgttcatcgagcgcatgcgccattcgttctacatggccacggtgggcaaatccattcgttccgctctcggaccgaacctcaaatggctggcctgcggtggtgcgccgctcaacgtggatttggcccacttcttcaacggcatggatgacatcaccttcatccagggttatggcatgaccgaaaccgccgctccgatgctcgtcaattgggaggacgacaacgaggtcggttcggtcggcaagcctgggcctggcatgggcgtgcgtcttggcgaagacgatgaaattgagctgaccggcccgaacgtgttccttggctactacaagcagcccgaactcaccgcacagacgatgactgccgacggctggatcaaaaccggcgatctgggtcgtatcgacgaccgcggcttcaccttcattaccggacgcaagaaggacatcatcatcaccgccggcggcaagaacatcagccccgccccgatggaggatgtcatcgacacctgcccgatcgtggctcatgcagtagtagtcggcgacggcaagccgttcgtgtccgcacttatcgagctcgaccctgaaatgctgcattcctggctggaaggtcagggcctcaatgccgacatgacactcgccgaggccagcgacaacgacgcggtgcgcgcctttatccagcagtacatcgaccaggccaacgccaatgtctcccgcgctgagtccgtgcgcaaattcgcggtgctggatgaggaattcagtcaggagcacggcacgctcaccccgagcatgaaagtggtgcgtcccaaggtattgcagcgctacgccaccgtcatcgaagaggatctgtatgcgcccaagccatccaacaaaccgctgcctgccacagccaagatcatcgacagcacgctggagaccgtcaagaaatcctccgaatcggtcaagcaggcgtccgaacaggtcaaacaggcctcggaacagatgaaaaccagcgtgtctgattcgattgctagcgtgtcggagaagatcaagaagtcgaaggccgaacccgaagagggcgagaccggcgattccgccgacaatgccgacaatgccgctgacaccggcagcaagccggaccggccggctgacgagaagaacgaggagtaacgagaagtggccatccgtgagatcagggtcgtgcccgacccagtcctgcgcaccccctgcgatgagatcaaggaaatcaccccggccgtgcgccgcctggttgacgacctgctggaaaccgtggacgatccgggccgagcgggcctgtccgccaaccagatcggcgtgagcctgagggccttctcctacaacatcgacggcaaggtcggctacgttctgaaccccgtactcgaggagaagtccggcgagcagtatggcgatgaaggttgtctgtccgtgcccggcttgtggtacaagacccgtcgggccgactacgctcgcgtgcgtggcatcgacctggacggcaacgaggtcgtgctcgagggctccgggctgatgggccgtatgcttcagcacgaatgcgaccatctcgacggccacgtgtatttggatcgcctggaaaaggaagaacgccgcgaagccctgcgctacatgcgcaatcgtcaggcgaagtagtccatactcggctcccgctggcgggagccgtcgaacgtagtgagactgagggtggttctgccggtaccgcccgtaactcccctcagtcgcctatggcgacaggttcccctcaaggaggggaacctgtcttcttagtactggctccgtgctattctcgaaacttgtgtgccacccggcaacggacgcagtcgctggcgtccggaaccacccaatattgtcaaccggcacacaacaaattcgcgtcatgctcgcgacggcctgtgtcggtcggctgcacaactcgtgaaaccgggggagcagctgcacgcaggtgcgcatggccaggcaagaaccgacaatgaaaggtagtaataccatggctcagatcactatgagcgatatgctgaaggctggcctgcacttcggccaccagacccgtcgttggaacccgaagatgaagcagttcatcctcacccagcgcaacggcatccacatcatcaacctgttcaagtcgctcgacatgatcgacaaggcgtacgacttcatcaagaccaccgtggcccacaacggcaccgtgctcttcgtcggcaccaagaagcaggctcaggaagctatcgccaaccaggccacccgcgtgaacatgccttacgtctccgagcgttggctcggcggcatgctgaccaacttccagaccgtctccaagcgcgtcaaccgcctcaaggaacttgaggaaatggacttcaccgacgtgcacggctccggcctgaccaagaaggagctcctcctgctcgagcgcgagaaggacaagctcaacaggcagctgggcggtatccgcaacatgaaccgcaccccgtccgcgatgttcgtcgtcgacatcaccaaggaggccctggctgttgaggaagctcacaagctgggtatcccggttgtcgccatcgtcgacaccaacgccgacccggacaccgttgagtacccgatcccggccaacgatgacgccatccgcggcatcgaactgctgaccagcctgatggctgacgccgtcgccgaaggtctgctggagcgctccggcgccaacaaggccgagggcgaagccgccgagcagccgatggccgcttgggagaaggaactcctgaccaacgaggctcctgccgaggcttccgctgaagccgccgctccggctgccgccgagggcgaaaccgccgaggcccccaaggccgagtgatgctctacgatgggaagtgcctgaataagcgcttcccatcgttcatgggtaagcaaaatttctcaaggagaataatcaatggcagcaattaccgccgcactgatcaagcaggttcgtgaagacaccggcgccggcatgctcgacgtcaagaaggctctgaccgaagccgaaggcgacgtcgcccgcgccaaggaaatcatccgagccaagggtatcgccgcagccggcaagcgtgaaggccgcaaggctcaggaaggcaccatcgcctccaaggtcgtcgagaccgccaatggcgagaccggctacgccgtcgagctgaactccgagaccgacttcgtggccaagaccccgaagttcgtcgagttcaccgaggaagttctcggctacgccgtggacgccgacgccaactccgctgacgagctgctcgaggccaaggccggcgacaccaccgtcaagctggctgtcgaggaggccgccgccctgttcggtgagcacgtcaaggtcggccagttcgccaagatctccggcgagcacgtcgaagtctacgctcacaagaagtccgccgagatgccgccgagcatcgtcgccatgatcgccaccgacaaggccggcgccgccgtggctcacgaagctgctctgcagatctccgccatgggcgccaagtggctgacccgcgaggacgttccggccgatgtggtcgagtccgagcgtcgcgtggccaccgagaagtccctggccgagggcaagccggagaagatcgttccgaagatcgtcgaaggccgtctcaacgctttcttcaaggaagtcgtgctcctcgagcagccgttcgtcaaggatccgtccaagaccgtcggcgccctgttcaaggaagtcggtggcaacgccaccgcattcgcccgtgtcgaggtcggcaagggcgaagaggagtgagcctaaggcttactccacgcgcttagcgtaatttcaacgaaacgccatccggttattcaataatcggatggcgtttcgctattccaagggtgtcgttgctagggggtgtcgtcgtaaaccgatacgcttgtctacggataatttcgcactttcggttttgagaaaggcatgatatgactgatagcgacaagccgcgcagagttctgctcaagttgtccggcgaagcattcggtggtggcaaggtcggcatcgatacccatgtgattcgtcgcattgccgaggaaatcgttccggccgtacaacagggtgtgcaggtggccatcgtggtcggcggcggcaacttcttccgcggtgccgaactgcagcaggccggtatcgatcgttcccgcggcgactacatgggtatgctcggcacggtgatgaactgcctcgccctgcaggacttcctggagcaggagggtcaggccacccgcgtgcagaccgccatcaccatgggacaggtcgccgagccgtatattccgctcaaggccatccgtcaccttgaaaagggtcgcgtggtgattttcggcgccggtgccggcatgccgtacttctccaccgacacggtttccatccagcgttccctcgaaatccactgcgacgaagtgcttatgggtaagaacggcgtcgacggcgtctacaccgccgacccgcgcagggacgagaacgccaagcgttttgaaaccctgagctacaatcgcgccctcgtggacaatctggcagtcatggacgcctccgcactgtccatggcccgcgacaacaagaagcgcatccgcgtcttcggcctcgaagagccgggcaacgtgacccgcgccctcgtcggcgatgaaatcggtacgctggtctccaccgccgaatcgcgcgtggccgagtaagccgcaaacgcctacaatcgaatcaaacgttcatagacgaacaacacagacgaacaccaacacacaaggagtgaatatgtctcttatcgaccaggccaaggaacagatggccaggaccgtggaaaacaccaaggaaaacttctccggcatccgcaccggtcgcgcaaacccggccctgctcaacggcatcaccgtggactactatggtgcccccaccccgattaaggccgtcgcctccatcggcgttcccgaaccgcgcaccctgtccgtcaccccgtttgacgcttcccaggccggtgccgtcgaaaaggccctgcgcaactccgacctcggcatcagcccgaaccgtgatggcaacgtcatccgcctgaccatgccggaactcaccgaggaccgtcgtaaggagtatgtcaagctcgccaagggcaaggccgaggacggcaaggtcgccgtgcgcaacattcgccgtaagaccaaggaaaccatcgacaaggccgtcaaggacggcgagatgggtgaggacgaaggcgatcgcctgctgaaggatcttgacaaggtcaccaagtccgttaccgacgagatcgatactctgctggagaccaagcagaaggagatcatggaggtctgattcagaccaggtccggagaattatggaacgcaacgaacaactccatgaagaggccgaggagacgctcgaccggatcaacaagaagaccggccgcaacatgccgcaggccatcgccacaggcgcggcactggtcatccttattgtcgcgtgcctgctgctcagcgtcgacctcttcgtgctgctggtagtcgtgttcatgattctggcgctgtgggagctcagggtggacttcgccaccgtaggcctgcacatcccggtgttcatgctgtggctgtgcgcgtccttcaccctcatcgccacctattattccccgtaccatctcatcacgatgtcgctgagtatcatcgtgtcgattattctggtcgccatcgcggccagcgcaaaaatcagcgtcggcaaccgcctatctctggcggttgccggcaaactgtccaacacggatgccagcgcgcgcctcgaatcctcgttcaatcatgagggcggggaacagcatcattcccggctcagccatgtggctgtgtccgtgcttaccgtgttgtacattccgttgctggccagttgcatcatcatctcgctgactttcaatgggcatccgattgcacacgccatcatgctggtgttcctgcccgccctctccgatacgggtggtttgtttgccggtgcctggctcggcaagcacaagctcagcccgcgtatctcgccgaagaagtccgttgagggcctgatcggctcgatgctcttcgccatggctggcgcattcgccgtattcgcatgcacgtatgatgcctcgaaatgggccactcgttggtgggtgccgatcgtggcgggtattctcatcggcgccgtgggcacgttcggtgatttgtgtgcttccatgctcaagcgcgatatcggcatcaaagacatgggccatctgctcaagggacacggcggtgtgatggatcgtgtggattccattttgatgagtgcaccgttcacctgcgccttgctgtgggtcaccggactgtgattcgcatgcctcgtgcatgaacaatgtggcatcgtgtgtatatcgcacggtgccacatgtcatatatgggggcaatcatcgttcaatatgcgttcgccatgggctaagacatgggccatctgattcgtatgcggcacgccgtatggtggattctgatatttctattgcatgtttgactattttctgatattgagagcgaagcgaacccatcatgaccacacagcatcctgacactccggaaaccggcattactcccggcggcacatcaggtgccttccgtgacgtgctatccaaggaccatgcccgccgtggtaagccgccgctgcactttgtggatatgacgcccgagcagcgcatcgagaaagcggccgaactcggattgccgaagttccgagtcaagcagctcgccaaccattactttggccatttcgatgtgaatgccgccgaattcactgattttccggcagccaagcgcagcgaggccgccgccgcgttcttcccgcagctcatcaccgaggtgacccgccaagtggcggacgaaggcaccaccatcaagaccttgtggaagctgttcgacggctccctcatcgaatcggtgcttatgcgatacccgacccgcaccacgctgtgcatttcctcgcaggtcggctgcggcatgggctgcccgttctgcgccaccggcaagcttggcctgacccgtaacatgtccaccggtgaaataatcgaacaggtgcgtgtggccgccaaaatgatgcgtgacggcgaagtggccgggggagagggccgcctgagcaacatcgtgttcatgggcatgggcgagccgatgggcaactacaactccgtgctgtccgccgtacgacagatttccgccatgcctcccgaaggcttcggcatttccgcgcgcaacatcaccgtatccacggtgggcgtggtgcccggcatcaagaagctcactgccgaaggcattcccgtgcgtctggccgtttccctgcatgcccccagcgacgaactgcgtgacgagctggtgccgatgaacaagcgtttcaacaccacgcaggtgttggatgccgcgcacgattattggctggcctccaagcgccgcgtcagtatcgaatacgcgctgatgcgcggcatcaacgaccaggccgagcatgcgcagttgctggccaagaggcttaaccattacggcgacaactgggcccacgtcaacccgattccactcaaccccatcgagggctcgaagtggaccgcctccaagccggaagacgaacagcggttcctggagatcctgcaccgcgcgggcatcaccgccacactgcgtgacacccgcggccaggacattgacggtgcctgcgggcagttggccgctaaggagcggtagttacttcagcgcatccttgattgcgtccacgaagtagtccaaatcagcgggcttgcgggacgtgatgagcttgaagccgttggcgtcgtccacgtgcagctgctcgtcgacgtaatggccgcccgcgttctcgatatcggcggcgatataacggcagggcgcggcggtcttgccagccaccagacccgcgttgaccagcagccacgcgccatgacagatcgcggcgatcggcttgccttcgtgcgcgaactcctgcgccagcgcgatcgcatcctcattgacgcggatacgatccacattgcaggtaccaccgggcaccaccagtaggtcataatcagcggtctgcacgtcgctcagcagcgcatccggcgtcagcgtctcgccttcgtagcggtcgtgctgcaccgtctcacacgggtccaaggtagtggcggcaagcgtcaccttggcaccggcggccttgagatcgctcagcgggcgcgtcagctcggattctcatattccagaaacgggtgcggcgcatgtaacgggcggtaggtagtctgaaggactgtaatgcaaagccgaacaggggagtgaagcatgtcgttggcggtacgagtcatcccgtgcctggacgttgacgccggtcgcgtggtgaagggtgtgcatttcgaaaacctcaaggatgcgggcgacccggtggagctggcggccgaatactatcgtcagggcgccgacgagatcaccttcctggatgtgaccgcatccagctcccaccgcaacacgatgattgacgtggtctcccgcaccgccgaacaggtgttcattccgatgactgtgggcggcggcgtacgcacgcccgaggacgtcgactcgctgctgcgctgcggtgcagacaaggtcggtgtcaacacggcggccatcaatgacccgtcgcttatcagccgcgtggccgaccgtttcggcaaccaggtgctggtgctctccgtggacgcccgccgcgaaaagggcgagcaacacacgcaatccggcttcgaggtcaccacgatgggcggccgcaaatccaccggcattgatgccatctggtgggtcaagcgcgccgagcagcttggcgccggcgagattctgcttaactcgatggacgccgacggtaccaaggaaggctttgatctcgagatgattcgcgccgtgcgcaaggaagtcaagattccgatcatcgcctccggcggtgccggcaaggtcgaggacttcccgcccgccatcgaagcaggtgccgacgcggtgctggccgcatccgtattccattacggcatcctgaccatcgccgatgtcaaggcggaactcaagaagcacggctacaccgttcgctaaacgaatacaccttgctcccgctggacgaacaatccagtggattgttcgtagcagtgcgctatgcacatgtcgcacataatccgggagctgtcagcgaagctgactgagggtggtccacataaggaagataggtatgacagacactacatacgacaattccactgaactcgatccccgtattgccgcacgcctgaagcgtgacgccaagggcctggtcgctgccgtcatccagcagtacgacacacacgaggtgctgatggtcggctacatgaacgacgaggcattacgccgcacgctgaccaccggccgcgtgaccttctggtcccggtcccgtcaggaatactggcgcaagggtgatacatccggccatgtgcaatacgtcaagggcgtgtccctggattgcgacggagacgcactgctcgtcgaagtagaccaagtcggtgccgcctgccacaccggcaagcgcagctgcttcctcgaaggcggccccctgtccgtggtcgaaggccatcgcccggccgagcagtagaacgggcttccctgactgggggaagccgaacgaccgcgtactacgaaacaagacatcgagttgtaagtaaaggagcgaatatgagcgaatgcagcgtcaaacacctgaagtggggcgccacctggcccagtcgcggccagtcccactaactggccgacgccggctaccgtgtgattccgatcgtgcgccgtctactcgccgactcgctcaccccggtcggcttctacgagcgtctcgccggcggccgatccggcaccttcatcctcgaatcggcggaatacggcggcacgtggagccgttacagcttcatcggcgtcaactcgatggcccagctgcgctccaacaacggtcaggccgactggctgggcaaggtcccggttggtgtgccagtcaccggtgacgtggtcgaagtcgctcacgccacgttgaagactctgaaggccccgcatgtggaaggcctgccgaacctgaccagcggtctggtcggcacggtcggctgggatgccatccgccactgggaaccgaccctgcgcgccgaagctccggacgagaccggccagcctgagaccgtgctcgccctggccaccgatatcgccgtggtcgaccacgtatccggttcggtgtggctcatcgccaacgcggtgaacgtggatgataaatccacccgcgccgacgtcgcctacaacgaggccgtcgctcgactcgaccagatgcagcacgatgccgccaccccggctccgggcgagtcccgcgtcaacatcttggacgaaacggtcgcccagcctgagctgcgcttccgcaccgagaaaagccactacgagcaggccgtcgaacgcgccaagcagcacatcgtcgacggcgacgtgttccaggtggtcatctcccagcgtctcgacatcgattcgcctgccgacccgttcgacgtgtaccgtgtgttgcgcacgctgaacccgagcccgtacatgtatttcatggcgttgaccgatgctcagggccgcgacttcaacgtgatcggctccagcccggaaaccctcatcaaggtggacaacggccacgcgatgaccttcccgattgccggatcccgccctcgcggcgccacccctgaggaagacgagaaattcgccaaggaattgcttgccgatccgaaggaacgcagcgagcacatcatgctcgtcgacctgtcccgcaacgacctgagcaaggtgtgcgtgccgcagtccgtggaagtcgtgcagctcatggacatcaagcgtttcagccacatcatgcacatctgctcgacggtcaccggcaaggtcgacccctcgctgaccgcattcgatgtgttcaagtccgcgttcccggccggcacgctttccggcgcgccaaagccgcgcgcagtcgaaatcatcgacgagttggaaccggccgaccgcggcatctacggcggcaccgtcggctacttcgatctctctggcaacatggacatggccatcgccatccgcaccgcgttcctgcgcgaccatgaggcgagcgtgcaggccggtgccggcattgtgctcgactccgtgcccgctaccgaatggcaggagacgcgcaacaaggccgaggccagcgtcgaatccatccagatcgccgcccagctgcgcgaactgtaacgttcaacgcataacgatgcccctgctgacaactgctgtcagcaggggcatcgttatgcgtatcagtgggtttcgcccatgatgtcggtggcgtcggttccggtgcccacagcggcctcgatggcggcttcgatgccgcgcgccatggtcgcgatttccatggtcggcgtgccgttcggcttgcccacgccctgcgcggtcgcatacggcacatgaatgaagccgcccttgacgccggggaatttgcggtcaatcagatacaacacgttatacatgatgctgttgcacacatacgtgcctgccgtatacgacatgaatgcgggaatcccgtggtcattgatgttcctgaccatggccttgaccggcaacgtggcgaaatacgcggtgtcgccgtcctcacgcaacggcgtatcgaacggctgctcgccatcattatcgggaatacgcgcctcggccaaattaatggccactttctccacggtcagagccgaacggccaccagcctgaccaatgcacagcacatagtcaggctgctcgcgcaccatggcttcctcaaccacggtcgcactgcgcgtgaacaccgtcggaatctccagtttcaccactgtcgcaccggcgatttcatccggcaacagcttgactgcctcgaatgcggggttaaccggctcgccgccgaacggatcgaatccggtcaccagaatcttgctcatcattagctccttatttcacggattgttgtggtatttggacaacgaggttattgcgcgatcagcatatagacgatctgcaccacaatcatcaccaatgcgggcagcacctgcttcttaatcacgcccatgcggtccttcatatcgagcatcgcgacgggcacgatgttgaagttggcggccatcggcgtgcacagcgtgccgcagtagccacaggtcagcgccagaatgccaatcaccgtcgggtccgcaccgtaggcgagcacgaatggcgcgccaatgcccacggtcattacggtaatcgcggcgaaggcattgcccatgatcatcgtgaacagcatcatgcccacaccgaatacgatgatgcccagcgtgacgttgcccttcggaataatgccgccgaccagcgtggcgatcacgtcgccgacacctgcggctgtgaaaatcgcgccgagactggccagcagcatcggcagcatgcagagcgcacccatggcagacaacaggcgttccgaatcgttgaggaatacgaccggcttgttgtcatgcgagaacgcgaacagaatcacggcggcaatcatcacaccgatgcagcagccggtcagggcgctgacgctgggaatcagggcgccgataatggcgaacacgcccagacacagggcgggaatgaagatgcgcatgccgatgcgctggaagttcgcggccacttcggcggtgctgggagcgctcgaatcggatgccgagcccttacgcacttggcggaagatggcgggaatgaccatgatgataatgagcacgccgtccgcaatggccggaatccaacggccgaacgcgatgacgataccgagcgccgtccagaacacgaaagtgccgtagcgggccttgttggttttatcgagtaggttgcgtacgcccgcatacacggacatgaaacccatgaaaatatagaagaactcgaggattttcgtgccaacggtcacgctggggtccatgaagaacgacatatcaggcctccttgccggtggtggtagcggtggcggcctgagcggcggcttcggcaccgtagtacttcttgcgcagtcgtgtgtccttgatgatgtaatagacggcggtgaccgccacggcaatcaccgcgaccgggatctcgataatggccatgcgcaacagttcgacgtcataacccagcggcttcaacgtggactgtacgagcagcgcaccggccgtacccacgaacagcacctggccaaagaaccatgcgacgttctccatgccggaagccatgcccttgagctcttccacatactcgtcgttcggctcgtgaccggacgctgcaatcgcacccaccgccatcggcatgatgaccggacgcacgaacccggccacgccaccaaaactcacgttgaacgcggcgaacacgagacgcatcacaccatacagggcgatcaccataccgggcgtcgcattcttcactttgccgatcagctgcgcagctgcggttttcagaccgttgcgctccaatgtgccggtgaccagcaacacgatgatgaaaaccgccatgctgcggttcgagacgaacgacgtacccaacgtggtcaggaagccgtcgacgccaatgccgccgaccagcgcagtcaccacagccgccacgataatgatcagaatcgcatcaagtttgagggcgaaacccacaatcacgatcacgattcccaataacacgagataatttggttccatgcgggaaatccttcctatactgcacacgcattgcgccgcaagcgtgcccggatatggatagtgtacgacggaaatcacgattcaactgtcttatcgcgcacattgcaggtattacatgagcctacgggcatataagcgtatggacgcatgagcgtcggctgagcccggtcggcatggtgttcgctatgatggacagtcggactttggtaagagacagtattcgtaacaggcaagtaggttattcatggctattgaggtgcagggacttgaaattcagatcggcgcgcgcacgctgcttcaccccaccaacttccatgtggccaagggagacaagatcggtctggtgggccgcaacggcgccggcaagaccacgctgacccgcgtgatcaccggcgacatgttgcccaccgccggcaaggtgcgcgtctccggcaagctcggctacctgccgcaagacacgcacgcctccgatcccacgcagaccgcgctcgaccgcatgatgagcgcgcgtgacatcgccaccatcatcagccgcattcgcaaggccgaaaaggatatgaccgacccggatccggacgtgatgagcaaggccatgacccggtacgacaaggccatgcaggacttcgacaaggctggcggctacgcggcccagtccgaggcgatttccatggccgcctcgctcggcctgccgcaggaggtcatggagcagcagctcggcacgctctccggtggccagcgccgccgcatcgagctggcgcgcatcctgttctccaacgccgacacccttattctcgacgagccgaccaaccacttggatgccgattccatcgaatggctgcgcggctacttgaagaagtacgagggtggcttcctggtcatctcccactccaccgaactgctggacgaagtggtgaacaaggtctggcatctggatgcgcagctcggccagatcgacatgtattcgctcggctggaaggcctacctgcaccagcgcgtggtggacgaggagcgccgccgccgcgaacgcgaagtggccgagaagaaggccgaccgtctcatgaagcaaggcattcggctgcacgccaaggccaccaaggccgtggcagcgcagaacatgatgcgccgtgccgaaaagctgctggaaaacacctccgaggcgcagaaggccgagaaggtggcggacatccgtttccccgagcccgcgccctgcggccgcacgccgatcatggccaaggacatctccaaggcctacggttccaacatcgtgttcgccggcgtgaacctggccatcgacaagggctcgcgtgtggtgatcctcggctacaacggtgccggcaagaccaccacgctgcgcctgctggcccacatcgaggagccggacaccggttccgtggaatacggtcacggctgcaagatcggctacttcgcgcaggagcacgacaccttggatctgaacgccaccgtgttggagaacctgcagcatgtggcgcccgagctcgacaacacgcaggcccgttcgattctcggctcgttcctgttctccggcgatgacgcgatgaaaccggcccatgtgctttccggcggtgagaagacccgtctggccttggccacgctggtcacctcgcgggccaatgtgctgctgctcgacgagcccaccaacaacctcgaccccgcttcccgtgaggagattctgaaggccattgccaagtatgagggcgccatcgtgctcgtcacccacgatgagggcgccgtcgaggcgctcaaccccgagcgcgtgctcctcatgcccgacggcgacgaagacctctggaatgattcgtacctcgaactcgtagccgaagaatagtcctacctcttggctcccctaccgggagctgtcagcaaagaacgggttaaccctaggttcccctcgctgaggggagctggccgccgtaggcggtctgaggggagcctcgcaagcatgcaaaggaatcaaccatgccaaccacaacaggccagaagatcgccatcgtcaccggcagcgcgctgggtttgggctacgagctcgccagccaactcatcgccaagggctggctggtggccggcatcgacttcaacgccgaacgtcaggccgagctgagcgcgcagtggccagccgaatcctaccgcgccttcgtaggcgacatcaccgacgaagcatttgtcaaggaatccgtggcgagcatcgccgcgctcggccacatcgacctgctcatcaacaacgccggccagccttcgttcaaggtgcccaccgcctatgaagccgctgacattgacaaatgcctcaaggggctcaaaggcatgattctgtggacggtggaaaccctcaaggcctgtggagagcgcgacgtgaaaatcgcccagatcatgagcaccgccgccacgcgcggcaacgcgaacgaaagcgtgtactgcgccaccaagtggggcgagaagggctataccaagagtctgcaggccgcatacaagggcaccagcgtcaaggtggtcgccgtctatccgggcggcatcgacaccgccttctaccgtgatagccacgactacgtctccgaagccaagcagcacaccttcatgcagcccggtccgctggccgaggtcatcctcttcaacctgatcaacgaggccaacctcaccgtcaccgacatcgaaatcaaccgcaacagctgagctggcaggttatacacatatccaccgattcggccgagctggttgcgcgcagaagttggttatgccatcgtgagttgtatccgtgaataacgcggttcacggatacaaccatcagggggatggcatggagtcctatgcatacaacacgttcttcacacttgatgaggcgcgagacctcgcccagaaaacactggaacaatgccgtgccagatcgatgcgcacttcacaggagctttgcttcagccatggcaccaggctacagcttgctggcatgacggccacgctgaattacaagcccaactatgaccccaacaaactgcacgttacggtgtccggggctgaaagattgtcgaatcttaccgaaacgcaatgccattattggggccatggcattgaccagacgatgattgatgatcttatcgccgtggtttcagtggaacaggcgctgtgtcagatcgcacagttcgtcgatgtggaaagtatggtcattgccttggattgggccacctgccgtaatgagcatttgaaacagacaacgaaagacaagatatcgttgttcctcgccgatataggtagattcccaggtatcagattatttcgcaaagcgctctcgttgtgcagagagaacaccgattcgccgcaggaaagcatccttcgccttgaatcggtaaaacgtggattacccgaattggaggtgaatgctccgatatacctcccattgcagaacaaagaagtgattgtggacatggtgtatccgaatgatcatgtgattctggaatacgacggacggtaccactatgaccgaaaccgatgggaaggagatatcgagaaaaggaacaacctctccttcgcgggctataagacttttcccgccacaagaagaacgttcgctaccacgcagaatctggatgaatacttcagaatcgttggaagtgcaattgcggaataccgcaataccgggtcattttcacaatgagatatgaccggacgcattcattaggtcgattcttcattcattaggtcggtgagctctgacagtcaccactggaatggtgccattccaacaccgacaatcgcagcctcatgacctaatgaatgaagaatcgacctaatgaatgattggaagcgttccgcgcaacgttatggcacccgcaagaagccggaacccggaatatgtctgttatcgtgggggccaagcaacaggtgaaggattgagtatgcacatcggtgacgatgagtttgaacgggccattgaacaggtgttggatgatttgcctgaacggtttgcgcgggtgctggagaatgtcggcatcgtcgttgcggacgaacccaatgagcgcgaactggccacaatgagcaatccgtgcggtgagctgctcggactgtatgagggcatacccatcacgaagcgaaccacgggctacagcggcgtgatgccggacgtcatcaccctgttcaaggggtcgcatgaacgcgtatgctcaacacgggccgagctacgccaacagattcgcaaaaccgtgttgcacgagatcggccattatttcggcttcgatgacgagtatctgtactcgcacggctactgaagcgctgctgtttcactagcggggagccgtcataccgccgtatgttgccagatctactgcaagtggtgcaacgcacggatgatggcgcaacggtcctcggtggttccctcgttggcgcacatggtgtgcgtaccaacgcggattgcgcaaggtctcggtgccggtggcctcatccgtggcgacgagcgtgtgcagatcgttggcgtactggaaatgcaggtggctgagcagcccgccctcggcgaacgccttgcgcgaaggcagagggttgatggccagcagccagcggaacgggctgtcttcggcggacgggcttgaagccagggccgcaatccggtgccgatacggttccaagtcaaacgcccgcaatcccatggcggccacgcagccgggggagagggacaggaattcatcggcctcgtaatcctgcacgatatgtccgccgtcgaataccacgtaccggtcggccacgccgttgagccatgcgagtcggtgatgaaacagggcagcatcatcgtgacgtccacggccagcgcggagaccacatgcagccacggcagtcccagggcatcggggtcgagcattcccagcgcggtgagtacggcataggtcacgccgaagttcaacgcggttcgccatcgggcggccgccagcaggggcaacaggaacagcacgaccatgacgatttgcgtggcgagccctacatggaagaacagcatgaggttcgccaccagcagaaggaagagtct

SEQ ID NO: 2930 - DNA, 4456 bp, Unknown
  R19_24m  MAG No. k141_3164
atgtgcgcaagggcttcacgccgaactcgccgtcgccgcgcctcatggactggctggagacttggtaccacgagcgggccgaggccaacctgcgtccgaacagcaggcgaagctacgagaacgccatcgtgcggctgaacaggatagccggcgcgaggcgcatcaactcgctgggtcacaaggatatggccgccattcaggacggcctgaagtgctacagcccgaagacggccacgatcacttggtccgtcctgaagaacgcgcttgaggccgcgcgtgacgaaaacctcatacggaggaacccggccaagatggtccgcccggtgttgggccggcgcaggccgatgaaggtcctgtcccccgcgcaggcggcggagctgataaggaacgaacccgacccgatgtggcgtctcaactggctgctcgccttcgccaccggactgaggcagggcgaacggctcggactgacgatggacgaactgacgacgctgaacggcagacgcgccttggtgatcgaccaccagttgcagcgggtaccggactctaagaaggcggactgacctctgggcgaggacgtgaccgatctgggcaacggcttctggttgtgcccgcccaagacggacagcggcgagagaatcgtggtcttggacgatgtgatgtgcggggcgctggacgaatggctcgccatacgcaagcaaaaaggcgtggactcccccatgctgttcgtcaccttgtaatgcagccgctccccctgcacgtcgatctcgaacaggtcgcctttctcggcgagcccaaggttcgtgaacatcagcctgtccgccagaccccggtgggccgcgatgaccgcgtgcgtggattcgtctcccaccggcagcgacgtcccgtagaggtgccctgctgacttctccagcgtggcggagtccgtgccgtggcgcaccggcaggctatgtgcagcctcggatagcggaccgcccccattgtgcccttgccgtccacgtcgagcagcccacggtactccttgtccccccgctgtatgaggtccttgagaagttgtccccggcctcgccaagcaccgactgcggccttgccgaaaggccctcgttgtatgccttgtcttcctcgatcatcccctgccgtccggtgtgggcagggctgcggcctcggcgctcgcggtctgtccggcggagtcgatggcttgcaggacgaatggtgcgctgagcgtcagcccgccgagcagcaggaggacgacgccgagccatccggagatgtcacgtttcataatccgccttccaagcgagcgatggaaaaggccacggccgggggaacccggaaccgtggccttggcttccgaaggggtctgtgccccgaaggccgtttacgcgtggcgcctacgctaccaaatcattaccgctcacaataccatcctgccaacattagtcagcgcgacgccgacgatgaacgaagatcaatgcaatcaccactccggcgattagggcggtcataccaccagcaatcatgtaagccagccacgtcgagacaaggaacgtaccctttcttcccagcgtcttggttgacgtggtcgcaccattggcggtgttcgtcgcggagtattgcatgcagtcggagccgccatcggaacggcactgctccaccttcttccacgccgcctgctgacgctcatactcccgcccgatgagcccggcctcacatgggacattatccgccgcggtgccaacgccgtccgggttcgtcttgcaatcctgcgtgtaccagtccttcagatccgggtattgggcggccgctttcatctggtactccagaatcggattcacatccttgtactgggccgggtcaaccgtcagcaacgcattcaggtccacctcaccgaaccctcgcttgcgttcagggtcaatgaccggcttgcccttgccgctcttcgtgttgcgtatcaaagactggatgatctggttgcccgtcgcgtcgggccacttctgcatggccagcgccaagtacgatgacaacaccgctgccgcggttgacgtgccgccattgcccgcgatatcgtagacattcgaaagaggattgaccgagtctaatacgttcatgccataggacagcaccgccacattgccgtccataacatccgaggtgggagctaggttcccagactcgtccacgctgttcaccatcaccacaccggggaaggtctccatgctgcgcgggtcgccggtcagatcatccaagccgggattcatgtcattcgcacgtccttcgaccatgacgaccccatgacgcagggcatccacatacccagcataatccgtgctgacgagagcacctccctgagaacggttgaggatgcgagcgccccagtccaccgccgtcttgacatctgcaccactgtcgcttgtcgcatcacccgcgagtttctgatcgcaaggtgtcacagcaggccccgcattaaccgccccatccgtaatatgcaacacgtccgctttgggcgccgaccccatgattccgggccacttcgaggtgtagttgcttccatcacccacgatccatgccagcatgtcggtgccgtgcgaggagtagtagccgccttcaccggacttgatcgtcgcggtcaacggcttgccgtccaccttgcactcgaccgtcttgtcatccacgttatggaatcgtcccagcttgtatgtgatcgaggcatgcttcaacgcgggataatcctccaccgcctgcgaatccagcaccgccaccttcacaccggaaccatcaatgccctgcttccacgcggcagccaccacatcgttcgccaccggccaacgcccgtcatccgccgcgaacgcgccgggcgtccacgcgcaaggcaacacacacgccagcgcgaacgcgcacccggccttcaccctcgaccaacgagaaaccatgtaaccactcacctctccactggcctgcatccggacgccatcctcgaacatctcctgatattcgaggatggcgtccagcatacgctacttcgtctcttcgtaccaatcccttgtactgccatcagacaaaatcacgtgaccagtctcaccactcatatgcttgacgcggtgctcaatctcctcatggcgaccatgaaccatcgggcgctgaactgggttacccaaatacccgcaagtacgcttcgtcatgttgcacttgcttggatcggaattgccacactcagggcacttgaaccctccgccccggcgctttgacacatagatgtcccacggctcgcacttgaacccgttgctcgccagcaaccccctcgccgtggcgaccttgccgtccagcggctcgaacacggcctcgccctcgtatggcctgaactcggtcatcctccaattgccgccgaactggtcctcgtagtatgcggcgaccttcctcgcggcggcgctggaggcgaccctctgcgacgcggacagggcgaccaccttcctgtcgccgctgagcgtcttcaccacgtccacgtcctgcggcttgctcaatagcgcgaaagggccgtcctgggtcgtcgcggtcgaagccggccagcacaaggcccgacctgctctgatcctcgttaatccatttgtcgagcttgacttgcagcttcgcgttgtgcgtggcgttgctccacggctcgaacggtatgagggcaccgatcggtcttggtttccggctcccactggcggcatgaggcttcacggtagagtccgcaggtggctagggtgtgtttacgctagttgggttttggctgtgttttttcaggtagatgtgtcgatgaggatgagccggaggtcggcgaggaaggcctcgtcgagcctgtcgtagcgggtggcggccttgcggtagcgcttcatgcggttgaagacgcgttcgaccatgttccgccccttgtgcgcctccctgtcgcaatcccatggggccgtacggttcctcttgggcggcgcaaccggcgtcaggccgaacgactcggccggcggccgggtgggatccccctcgtgcgcgcggtccatgagcaggtgctccatcgcgccgtccccgggccagcggttgaaccgccggtagacggtgacccacttgccgtggcgctccggcaggtccctccacggggctcccgtgcggcacatccacggcagggcgttgacgaacgtgtggttgtcggccacggcgggctccggcgcgggcgcggcaacggatgcgcgaccctcatgaactcatgaaccggtcaagcgtgatgtcatacctcggcgtacacatacgacaattatcacgcaaaacttaaatacaccctaattatttgaagaaatcttccttactatattccattgttaccctccataacttctgattgttgccgtcttgacgattatgtatctttacattaccttctgaaacatatggcgcaccttgtccaggcggctgtttggacggcggggctggatga

SEQ ID NO: 2931 - DNA, 4887 bp, Unknown
  R19_24m  MAG No. k141_3250
ggttcgatcaccaatcaggagcgttccggccgctgctggatgttcgcctccctgaacacgctgcgctacgagcttatgcatcgctggaaccttgaggacttcgagttctccgagacctacctcttcttctgggatgcgatggagaagtcgaacacctacctggagaatgtgctgcgcacgctcgacgagcccaccgactcgcgcctgttcgaggccatcaactggggcccgtccgacgacggcggctggtggcagatgttcgccgcgctggtgaacaagtacggtctggtgcccaagagcgcctacccggagtccgagaactcccgtaattccgatgatttcaagcagtacctcaactccaagctgcgcgagttcgcggccgagctgcgccgccgttcagctgcgggcgctggcgaggacgagctgcgcgcgctgaaggacgagtacatgggcaccgtgtaccgcatctgcgccgtgtcgctcggcgagccgccggagaagttcgacttcttcgcgcgcaccaaggatgatgatgaggataagaagggcgaggcttgcaagtgcaaggccgaggccgacgcagacggcaagaccgaatcctgcaagtgcggcgactcctgcaaatgcgagggcaaatccgacgccaaggcctgcaagtgcgataaggacaagtccgacaagccgaaaaccggtaaggacgagcgcccgcagattcgcgagatcggcatcaccccgcttgagttctacaagaagtacgtgccggtggacgtcaacgatttcgctacgctggccaacgccccgctcaagaaccgtccgttcaaccggcgctaccgcatccgcttcagcgcgaacgtggccgaggcgggcgatatggagttcgtcaacgtgccgctggacgtgttcaagaaggccgcgcttgaccagctcaccgccggccatccgatctggttcgcctgcgactgcacgcagttcgcgctgcgcaaggacggcttcttcgaccggtccgtggtgcgcgtcgaccagctgttcggcaccgagttcaccggcgacaaggcccacggccttgaatacggcgacagcccgagcaaccacgccatgaccttcaccggcgtgaacctcggcgaggacggcaagccgaaccgctggaaggtggagaacagctggggcaaggacgccggcaaggacggctactacgtcatgtccgacgcctggttcgaccgctacgtcaccgagctcatcatccgcaaggaatacctcgacgacgccacccgcgccctgctcgccgccgaaccggtcgagctcgacccctggcagcccctcacccgccgctgccgctgacgttccgctggcgggagcatatatttcgaatgccccttctctctgttcagagagaaggggcattacgttatgcgagtacgcccggccgcacctattcgagactatcgcggctgagctgagcaaaagtgccgtcatcatcggccaattgccggtaggttccggcctcgctaattgttccgaactagttatccacagagttatccacatctcccgcaagctagagccacataccccggttttcatagcgagcatgtgaccgctgcgctacggtggcgtcatgaacgacatattgcccactccaccgcccggcgtattcgacgacgaaccgtccggctggacccggccccacacaccgggcgttgcgtctgcgcgcaccatcaatcctgagctacgttcatcaccacgtatggcgagttccgcgccaactgtgattacaggccctgtgtcgccagcaatgagcgaaaccctcacccaacgtaagcgggaaatgcttaaacgatgcacggacgccgcgctacagctcaggcaaccggtgctcttcggcatgaccacatcgctgatactgcaatccgtgccgcttcccaaggattgcgatatcgaccccgccgagctccataccgtctccgactcacaccgcacacgaatacgtgccatcgtgccgccaacgacaccacacatctggaagccgctgagcgatgcgcacaatgtgcgtatcaacaaacatgtgtacgcactggatctgatacacacttgggcacaactcgccgctcatatatcgctcgaatcgctggtcatacttggcgacgcaatccttacggcaatcgcccgcaagccgggtctggcgagcggccgcactgctgacggcatttatcaggacttcgtgcggcaagtcaccgaactcccgaaattcaacgcaaaatccaagtgcatgatcgctcttgcattcattacgccccgcgtggactctccaatggaatcaaagacccgcatcgcgacgacgaaatacgggcttccgccagccgtgacaaattacacggtgcccggcgcgacattcagcaacggcgcgccgataacgctcgatctcgcttggcccgaatttcgcgtcgccatcgaatatgacggcgatcatcatcgcaccgacaaaaaccagtggcggcgggacaacgacaagcgcgaactgctgcgacatcatcattggatcgtcatcatcgccactgccgcgaacatggccgatgagccatcccaagccgaactcgcctaccgggtcgggcggcagttggcattgcgaggtgccgtattcgatttcactttgacggcaacgccactcgatgagatcgcccggcggaggcgacgaagaatataacgtttatcgcgaaagtcgtacagtatccatgttgcgccgacgctgcgcgactcggtgtccgtgtccgatgtcccggtagcgatgtcaatcgatttatgtgtggaccgggccagatttcgctgtcccggttctccatttcgcccctttttgagcaaccaagacaaaatttcattcacctatcaccccaccgtgcaatattcgccatcgtacatcggcggaattccggggttttgggattacggataatgggcgtttacaaggggggctgtcccggttcccaaaaagaagccgaaatcacgaaccgggacagcgaaatctgtcccggtaatcgcgtcaatcggttgccgtcatcaccggaacatcaactgcgcataggtcgaacgcttcaatgcgcaacaggcatgcgaccatatcgcgatagcgatattccgacggaagtatgggactcaccacgcgaccaatattatttgccgagctttggagcctcgtgcttggcgtggcggatcacggcatcggggaaaccggcgtggatgtagtcggacagcatccgcaatagcctctcgtcaaaggtgtgccgctcatcgctgctggcatcgaccaggatgaaatcccatgagtattcggtgtcaccgtcgttgatgatgagtccgcggccagtgatttttgcggccagcaacgcggcgatctgtatggcgcctcgcttgaccaaggccgattccgcttgagtcaggttgcccgaaaatgtgacggtatacatcatcagtccccccttctttgttattttctagaacagcaatgccttattgtaaacagacagcactctgccataatccttttttcaatatgcggcccatggcattcccagcattaaaaaaaaaagaaacccggcggagggggccgccgggtgagagagaagagagaagaagggttcagttatggggttcgaagaacctcgccaccggtatgaacttcattccgttgacatcttctatataaccgccccatgcttggcgaattgatgtgcttgtctgggaaaagtcttggcggagtgtgacgaatttgtgacgcccgccgacaaccggcctcgcattgtcggggcttgaccgcacatacggcaacgggccacctcgcaacacttcatgtgcgaggtggcccgtcagctacgagctagcaatgccgaatcactcggcggcgagtttggccttctcggcggccagacgctcggcttcggcggcacggcgagcagccagcgcttcatcgaagcgagccagctcctcttccacggcctcggtcggaatcttggcgaagatcggtgcgggcttaggcaccacggcgccgacctcgatcgcctcgctcttccacgggtgcacgttcacaccgagctcgtaatcgccggtgatgatcgggtacgtgaagccgggcttgtcgagatcctcgacttccttgagctcaggcagcggcgagaaggtgccggtgccgccgagcgcctcccacaccctctgtgcggagtgcggcaggaacggcgcgagcaggtggttcgcgtcagacacggcctgggcggccacgtgcagcacggtgccgagacgagcctggtcgtccttaatcttccatggttcggtggcggaaatgtacttgttgatgtcgccgaccacacgcatcgcctcggacagggcgtgcttctggtggtgggtttcgatggaggagccgaccacgtcgaacgcggcggaagcctcttccagaaggccacggtcttcgttggtcatcgaatcctcgtccagcggcggaatctcgccgaagttcttgttgatgaggttggccacgcggttcaccaggttgccccacgaagaggcgagctcctcgttgttgtggcgcacgaactcggcccaggtgaagtcagaatccgaggattcggggccggccacggaaatgtagtagcgcacggcgtccacggggtagcgggcgaggatgtccttgacgtagatcacgatgccgcgggaggaactgaacttcttgccttccatggtcatgaactcgctggccaccacctgctcaggcaggttgagcggacccatcgggccggtttcgccgcccttggagcccttgccgttgtatgcgagcatttcggacggccagatctgggagtggaaggtgatgttgtccttgcccatgaagtagtaggccgggca

SEQ ID NO: 2932 - DNA, 5705 bp, Unknown
  R19_24m  MAG No. k141_3503
ggcgtcatacccgcatgacgtgagttacactatgtagtaaagttatttactgaaatactgcgtattgttacgtactgaggcgtggaaggctcaactatggtcacgatgaaggaaatcgcacagaaatcaggcttctcgcaggccacggtatcccggctgctcaatggggacccgacattgtctgtcaaagaggagacgcgacgtcgcatcatcgaggtcagcgagcagcttggctacgctaccggatcacgccgtatcgcattgccacgccgtgtggccgtactcgacaacgccacccgcgaggaagaactggcggacgcctatttcgatgaactacggtccgtgctcggcgacaatgccagagcccagcacatggaactcacgtcgttttcccatatcgacgatctgattgccgacgccggtgatttcgacggcttcatctccatcggaccgtccgtactctcttcggatagactgttgaagctccatctggtattgccctatggcgtattcatcgacaccaatcctgcgcccagcctgttcgattcggtacaaccggatttaagccaaaccattttggacgcattggatatgttggtgtcctcgggcaaacgacgcatcggctatatcggcggtactggcttcacgatgggtttgcacgaatatccggaagacggccgattaaccgcattccgcaattggaccgagcgtttggggctggatgcggaaggcctgatttacgcgcaaggcgcgttcactgtggacaccgggcgcactctaggggaggaagcggttaacgatcatcgagatgacatgccggatgcgttcatcgtggctgcggactcgattgcagtcggcgtactgcaggcgtttaccgctgcgggagtgctggtgcctcgcgataccagtgtgatcagtatcaataaccaggccatcgcccagtacacttcgccgacattgaccagttacgatatcgaccagaatgagctggccgatactgcgattacgatgcttgccgaggccatctccagtcggcgcacgctgcaccaccataccttcatctccaccaccctagtggtgcgtgacagtttcgtaccagcacgataaagaagctccctctgtgcgataaagaagctccctcgtcagagggagcttctttatcgctgttagaacagttccagattcacgtcgagcgtgtaggcgcgatcggcgggcagctggtactgctcatggacgggcgcgccccatgaatcgtctccgcccacgcccatttgcgcggccaacaggcgcaggaacgtgtgacggaccggcggcaactcgttctggtgggtcgcctcttccagcatgagcgagctgtacggcaacgggctcgccgcgaaatgttcgctgccggcctggctgatacgcatgccgtgtccttgggcgtcaagcacttcggcccaacgcaagttttcatggttgccggtctcctgcggcaccagatacggtgcattgtcttcggccgcggtgcgctcgaaaatgccgagcttgccaccgtgcagacggtcgtgataggtttcctcggggccaaggccgtagaagcgcaggttctcgtactgcttgggaagtgtccattccaatccgaatgccggcagcgtcggcgcatcggtggcaccggcatatcgggcggtcagatgtacacgtccgctggcggcatccacctcatagcgcacggcaacttgggtttcgcccggttcggccaacgtatgacgaatgccgccaacgggcaccaacctcgttgacggcattcgtctttccaggacaccgcaatcgcggatgcatgccgtttacgcgttgaatacgtattggtcaaggcggcgcatggcctccttgacgcggctcaagggcaatgcgagattgacgcggatgctgtagggggcctggaacatgtcgccgtcctgccatgcgacgcccacatcccagccgcgtttctccaactcgggcaggctcaggccgtggcgttcgcaccactgctcgcagtcgagcagcagcatgtaggtgccttccggtttggtcaaactcactccttggaaatgcttggtgatgtagtcgtaggcgtaatcgacgttgccggtgagcaccgccttcagttcgtcgagccactcatggccttcgggccggtaggcgccgatcagcgcgtgcatggaaagcacgttcatgtcgttgtagtggcatttcgagcttttggccacgatgcggtcccggagtgtgggattgtagatgatgtggtagcttcccaccagtccggcgagattgaaggtcttgctgggcgcgtagaacgccacggtcctgttgcgtgcgtcctcgctgaccgattgggtggggatgtgctggtggttccccagagtcaaatcggaccaaatctcgtcggaaatgaccacgcaatcgttggccttgtacacttccatggccttctcgatttcccaacgttcccacacgcgcccgcaaggattgtgagggctgcagaacacggccacgtggatgtgatgctccttgagcttcctgtccatatcctcgtaatccatgcgccatacgccgcgctcgtccagcgtgagcggactgtggacgatgcggtagccgttgttttcgatgctccgggtgaacccgatgtaggtcgggctgtgcagcagcacgccgtcgccgggggcggcgaacgcggtcagcgcactgatcacaccgcccaggaccccgttctcgtagccgatcgcctcccgggtcaatccggtgaccccgttgcgcgtggactgccagtcgatgatggagctgtaatagtcgtcggtgggggagaagtacccgtaggcgggatgcttcgcccgttcgatgatggcctgcggaatcgtgggcacggtcgggaagttcatgtccgccacccacatggggatgacgtcgaaaccctcgcgtggcgggtccggcgcgaatcccgggtcggtgcccagtccgtcgaccgcgatcgaatccatgccatgcctgttcatgatggacgtgaaatcatacgtcattgtccgacaatcctttctcggtccgtggtggccggtcccaatctaaatcgggctcctgacggtgccgtggccgtgggcggcgatttgaccgcgtggcgtgttaggatatgcaccgttgtgaggcagtgatccgttatcagcggggagtcttcggaagaacggcggcaatcgcccagtagaaccgacgggatcggcccgagacagccgaacacaagcggtcgcgcaggctcgcggctccgagtgcaacagttcggagcggcgcaaccggtgcgataagcgaggtggtaccgcggtgcggagcgcataccagcgctcgtcatcgtcctcgtaggcaggaacggcagacatggctgttccgggcggaacacagtcggttccggctgcgaggcgattgactaatcggcccacggttcggtacgtgacattcgtgaaaccagccggcacacgtcggcgcccggcaatcgccatcaatgacgctcctgtaggaccagtgcacagtactaacaggagatttacggtgagcgaaaacgtatatcccaaggcgagcgagggcggcgagaccgcgcacgtcgcgccgaaccccagcttccccgacatggaggagaccgttctcgactactgggacaaggacgacaccttccagcagtccgttgaacgcaacccttccggcgaccacagccagaacgaattcgtgttcttcgatggcccgccgttcgccaatggcctgccgcactacggccacctgctgaccggctacgccaaggacgtgatcccgcgctaccagaccatgaagggccgcaaggtcaaccgcgtgttcggctgggacacccacggcctgcccgccgagcttgaggcgcagaaggagctcggcatcgactcggtcgaccagatcgagaagatgggcatcgacaagttcaacgacgcctgccgcgcttctgtgctgaagtacaccaacgaatggcagaactacgtgcatcgtcaggcccgttgggtggacttcgagcacggttacaagaccctgaacatcccgtacatggaatccgtgatgtgggccttcaagcagctctacgacaagggcctggcctaccagggctaccgcgtgctgccgtactgcccgaaggaccgcacgccgttgagtgcgcacgagctgcgcatggacgccgacgtgtaccaggaccgccaggacaccaccgtatccgtggccgtcaagatgcgcgatgaggacgacgcctacgccgtcttctggaccaccaccccgtggaccgtgcccaccaacttcgccatcgtggtcggcgccgacatcgactacgtcgaggtccgcccgaccgaaggcaagttcgctggcaagaagttctacctcggcaaggatttgctgccgcactatgagaaggaactcggcgagaattacgaggtcgtgcgcgaactcaagggcaacgagctggcaggccgacgctactacccggtcttcccgtacttcgcgggtgacgaggccgaatccgaaggccacgtgcccggcccgaacggctacacgatcttcaccgccgactacgtcgacaccgtcgaaggtaccggcctggttcaccaggctccctacggtgaggacgatatgaatacgctgaacgcgcacggcatcaagagcaccgacgtgctcgacgatggctgccgcttcaccgcgcagtgccctgactatgagggcgatttcgtgttcgacgccaacctgccgatcctgcgcaacctgcgcgccggcgacggcccgctcgccgagattccggaagagcgccgcgcgatcctcttccaggagaagagctacgtgcactcctacccgcactgctggcgctgcgccaccccgctgatctacaagccggtctcctcctggttcgtgtccgtgaccaagatcaagccgcgtctactggaattgaaccagcagatcaactggatcccgggcaatgtcaaggacggtcagttcggcaagtggctcgccaacgcgcgcgactggtccatctcccgcaaccgcttctggggttccccgatcccggtgtgggtgagcgacgatccgaagtacccgcgtgtggacgtctacggttcgctcgaagagctcaaggccgacttcggcgactatccgcgcgacaaggacggcaacatcaacatgcaccgtccgtggatcgacaacctggtccgcgtcaacccggacgacccgaccggcaagtcgcacatgcaccgtatttccgatgtgctcgactgctggttcgagtccggttccatgtcgttcgcgcagttccactacccgttcgagaacaaggagaagttcgaacagcacttcccggccgactacatcgtggaatacatcggccagacccgcggctggttctacctgctgcacgtgatggcgaccgccctgttcgaccgcccggcgttcaagaacgtgatctgccacggcatcgtgctcggctccgacggccagaagatgtccaagcacctgcgcaactacccggacgtgaacggcgtgttcgacaagtacggttccgacgccatgcgctggttcctcatgtcttcgccgatcctgcgtggcggcaacctgatcgtcaccgccgaaggcattcgcgacaccgtgcgccaggtcatgctgccggtgtggagctcctactacttcttcaccctgtacgccaa

SEQ ID NO: 2933 - DNA, 17611 bp, Unknown
  R19_24m  MAG No. k141_3531
cagatgcagcgcatcgccatcgcccgtgcgctcgccgtcaaacctgccgtggtcttcgccgacgagccgaccggcgcgctcgaccaagccaccggccgcgaggtcatgggcattctcatggccgccgcgcgggacaacggttccgccgtggtcgtcgtcacccacgaccccaacgtcgcttcgttctgctcgcgcaccgtgaccatgcaggacggccagctgggaggcgtacgatgagcgctttcgcattgtggcgattgttccatcgccccggctcgcgtggcagtgcgggtcatacttcggtgttggccatcattgcttttgccgcagccaccactatctttctcaccgttttgggcggcgtgcatgggttcatgtggcgcgcctccgccgaccacaccattggatgcgcaatcaatctcgacgcttgcaaacccggaacagcggaaatctggaagcagcgtatcgccaatccccacagcctggatcaatacgccacggcatacgtcgtgctggcgttctttgcctgcctgctgctgattgtgccgttcgtggcgcttgccggttccgccgcgcgattggctgcgtcccgtcgtgacgctcggctcgcatccctgcgcttggcaggcgcgaccacggggcaagttattcgccttacggcgcttgatgcggctgggcaggccttggtgggggcgctgattggcatcgcggggtactgcgtgttgatccccctaatcatgttgctgcatttccagaatcagacgtttacgttcgagcaactgtgggtggggccgattgccttgatcattacgcttgttggcgtgaccgtgttggcgctgatctcttcgctggtcacgcttcggcgcgtggccatcacgccactcggcgtcacttcacgcgttgcgactacgctgccgtccggctggcgtgtggtggtgttcgccgtcatcatggtgattgccgttcttctgttcaagaatccgatggtgctggctcaggccggtgaagtagtgatgtacggcgtgatcatcggtttcatgctgctgtgcttcgcgctggtgaacctcgtgggctcctgggtggtcaccgctcgcgccaaggccaaggccaagcgccccaaggatgcggccacgatgattgccatgcgccgtattctcgacaatccgaagcgcgcctggcgcaatgtgtccggcattgcactggccgtgttcatcgccggcatcacctcgatctgcggattctttggctcggccgccgtggtcggtgacgccaacgacccgtccaccgtgttcattcgcgacatcggcaccggcggcatcctgacgctagtgttcgccgctgtgcttgccgcggtcagctccggtgtgatgcaggccggcagcgtgtacgatcaggccggcgaatatcgcatgctggtgttggagggcactgatgtcaagaccttgaaccgtgcgcgattcatcgaggtactcaccccgctcaacatcgtggtgatcgtggccggcggctgttccatgctgcttatggcccctctgttcgccgcttcgatgaccgaaccggccacgctggccagcttcttcggcgggcttgcgctgtgctatgcgctggtttcggtgggtgcgttcgcgtccaatcgggtggccgccagcttgaatctggccgattatcgggccgatgactgaggcggtacggtactttcccgggtgacgacactggtggggaggatgacgtgcatatcaccctgattgcccttgcggctgtcgatgatcatctgcacggcgcgttgggctatttcgctgaacggctgatgcacgctggtcagggagggcatgagttggccggcggggaaaatgtcgtcgaaccccatgacggacaattgctttggcaacgcgatcttatgctctcgtgcggcacgatacgtgcttactgcagataagtcgttgcagcaaaaaatcgcggtgggtcggtcggtgagttccagcagccggcaggctgcttcatagcttgtttcggcggggaagtagtcgccctgttcgatataggactccggcagatccaccccggcctgttgcagagcggcggtgaatccgctatagcgcgcgatgctggtctgtaggttcgccggcccccggataacggcgatgcgtcgatggccgagcgacagcaggtgtttgccggcctggtatcctgcggtccagttatcgatggacacgctcatcacatccgaatcgacggtatcgattgggtcgatgatgaccacgggaatactgcgcgatttcaacaaagacttcgcttgagtggtcagaccgcccatctgctgcataatcacaccttggggatttctatcgatgatgccgcggaaacagtcttccgtggcatcgccatggttggtctgggtgaccgtgatggcgaggcccgcctgctgcgcccagtatgaggcgtatttgatgagttccatcgtgccgttgtgctcaatgtattcgacgacgagctctatggtgggggagagtttggtgttgaccagaggccttgagtaaccgtgatctttgaggatttgctcgacttgtctccgcgtctcgtcggaaatgcctgacctgccattgatgactttggaaacagtggatgcggatacgccggcgatttttgcgagctcgccgaccttgagcttgtgggtggatgtatcgttaaccatcggtgtttccctcttggatattcgccgttcaattactgagacgatttcgtcgttgttcccaccattatgacgcattgtgccgtaacaattccgtgttttcttgccctttgtccggccttgaataaaaattttcgcaaataggcttgcaaatttctttattcggacgtacgatatagccgttggttcacaccaggcgaaggagcccgaacacatgagtaccatcaccaaagtcaagacgtatgacttccgattccccacttcaacgacgctttccggctcggatgcaatgaaccccgatccggattattcctctgcgtacgtggagatttccaccagcgccgacgacggcatcacgggtgtgggattcgtgttcaccatcggccgtggcaacgacgtggtttgcaaggccatcgaatcgatgtcgcaggtgctgattgggcgcaacaccgaggaactgctcgacaacatgcgcattgcatgggacctgttcgtgcatgattcccagctgcgttggcttggccccgaaaagggcgtggagcatatggccatcggcgcggtgctctccgcgttgtgggatatcaaggccaagcgtgcgggcaagccgttgtggctgctgctgggcgagatggagccggaggagctggtctccacgctcgatttccgctacatgaccgacgccctgcgccctgaggaagccgttgcgattctcaaagagggtcagaagggcaaggccgagcgtatcaagcatctgctggaggtcggttaccccggctattcaaccgctcccggttggctcggctactcggatgagaagatggtggccctcgccaaggaggagacccaggtcaagggcttcaagcagatcaagctcaaggtcggccagaacatcgacgacgatctgcgccgcctggccaaggcccgtgaggccatcggccccgacgtgcgtcttgccgtggacgccaaccaggtgtgggatgttcccaccgccatcgactggatcaacaagttccacgacttcgatctggcttgggtggaggagccgaccagcccggatgacgtgattggccacgccacgattgcgcgcgccatcaatcccatcaaggtggccaccggcgagcagatgcagagccgcatcctgtacaagcagtatctgcaggcgaacgccttcggcatcatgcagatcgacgccacccgcgtggccggtccgcaggagatcgtgctcgaatacctgctcgcgaagaagttcaacaagcccgtctgcccgcacgccggcggcgtgggcctgtgcgaggccgtatgccacttcgcgatgttcgattacgtggccgtgtccggcacgatggacggccgcatgatcgaatacgtcgataaccagcatgaacatttcgtccacccgaccgagatcaaggacggcaactacgtcgctccgaccgctccgggcaacggtaccgaaatgacgctggagacggccgagaagtacctgtatcgcggctgaccgcaactgaaaattcataactgaacaacacaactcaacacaacaacacacaaccactccggctggggtgccgaagccccggccgggcgtgacatggaacacccatgaaacgcagaataaggatggacgaaggagttcccatggatctgcatctcgaaggcaaagtcatcatcatcaccggcggtttcaaaggcatcggcaaaggcatcacgctgcaactggcccaggagggggccatcccggtggtgattaatcgacccgacagcgctctcgacgagttcaagaaggatatcgagcagtacaccaccacctatgatgtgcacttgcttgacctcaacgacaccgacaagatcgccggcgtcgtcgaagcaacatacaagaagtacggccatatcgatggcattgtgaataacgccggaaagaacgacaacaaggatctcgagaccactacttggcgtgagttcgaggaatcgcttcacggcaacctgactcactattacgagctggtccacgcggccgtgccgtatctcaaggaaagccgcggatccatcgtgaacatctcgtccaagaccgcgcttaccggccaaggcaagaccagcgcctatgcggccgccaagggcgcgatcctgggcctgacccgtgaatgggccgccgcattggtgcacgatagcgtgcgtgtcaacgccatagtcgtctccgagtgctggaccccgctctatgccgattggatcaagacctttggcgatgaagcggcccagcaggcgcgcctgtcggtgatcaccgacaagattccgctggaacatcgtatgaccaccaccgaagagatcggtaatgaagcggcattcctgctctccgaccgctccagccacaccaccggtcagtgggtgtacgtcgatggcggctatgtccaccttgaccgtgcgctgagctgacaagcagccctttcccgaatattcgcgcggcaattccggagctttgatcattgctccatccgtacgccgtatccgcgtatgccgcccgtatcacccgcgccctgggtcatccgtttaccaacatggcccagggtggtccacttctcgctaggcaatatcggggaaactcgtatcactaaggagtcaatgatgacatccaaaaacacaaccggttccaaggcgaccatcgccattgtgctggtgacctcactgttctttatctggggtttgaccatgaacctcgtgaacgcgttgaactcgccgttcgcaaactacatagaactcagcagcgccgaagcgtcattactgcaggtggcctattacggcgcatacttcgtcatggccattccagccggcttgatcgccaagcgtttcggttataagggcggcgtcatctccggtctgttcctgttcgctctgggcgcgttcatggtgatccctgccaccaacatggccagctacggcctgttcctgttcgccatgttcgttatcgcgctcggcgcggcatcgctggagaccaactgcaatccgtatatcaccaagctgggtgatgaaaagggcgaatcgttccgtatcaacatggcgcagagtttcaacggcgtcggcaacatcgttggcccgctgattcttggccagattctcggcaccaccgtcgcatcaggcgagtccggcttcgacgccgctaaggcgcagttcctgaatgatacccgcacgatatacattgtgatcggcgttgtgctggtcgtggtgctcgccgtgttcgcgctgttcaagctgcccacgcctccgggagacgaagaggaggccgcgggcggcgcctcctccgagaacagctccttcttcggcctgctcaagcgcccgcacttcgcattgggcgtgcttgccgagttcattttcatcggcctgcaagtggccggcatggcggtcttctccgcctacgcgctcaagcactggggcgcaggcatcacagccggcaccgcggcgatgatgctttccgtgctttccctgctgttcaccatcggacgcttcgccaccaccccattgatggccaaattcgatccctcgaagattcttggcgtatacatgaccatttcagccgtgctgatgttcgtggtattccttggcctgggcaaggtctccgtcatcgcgttcatggtggcgtatctgttcatttccatcggatacccgaccatattctccctgacgctgaaaggtatcaagggttccgcggcgaagaccggttcctcggctttggtgatgagcattgtgggcgccgcgttgattccgctgctgctcggtgtgattcaggatgcggcaggcatcgagatcgccatcctggtgatggtcccgggcttcctgttcgtggcatggtacgcattctggggttccaagatcggtctgaaggaggcctgacatgacactcaacgtaatcgattcccacttccatatctgggatccggatgcgcaggatctgccatggctggcaggattgccctcgctgcaacacaagtacacgattgaagacctagccgcacagtacgccaaatttggcgtgaatttcctcggcggcgtatacgtggaggtcgacgcggccgaccatgagctcgaggaccggctgctgtacgagaatgcaagtcctctgatcctgaagcgcatgttgcaaggacgggtaagcccttggatgcgtgtcccgatcaacgccgatggcatcagggaaccgctgcatgtggattccgagccgcggggccgtgcgctcgaacccgaattcatcgccggtctacgcgcgatggccgccaagggattgccattcgagctgtgcaaccgtggcccggaactgggcgacatggccaaggcgttctcgcaggttcccgaagtgacggtcatcatcgatcatctcggcaacgtgcccgggcttgatgaggaatcgtgcgccgcactcgcagcgttggccgaactgccgaattcgtatatcaaggtttccggcgacaacccggtggacccggacatcgtgaaatacgtgcgggacacattcggcccgaagaaggtgctgtacagctccaactggccggtcgtggaactcaactcgacctttgccacgcacttccaactcatgctggacacgttcggcgaggacgaggacttcttcgaaaacaacgcccgccgcgcttacaacatcgactaaacccaagccccctctgatgagggagctatcgtccgcaggacgactgggggagaggccgcaaacccggtgccgcctgtgcggcacccctattccgtgacgaaaggaacaatcatgacaagcagcgccgaattctcaggcatcatctgcccatccatcaccatcaccaaggacgacggtgacatcgactatgaacgttgggggcagcatctcgatcatctgatcgaggccggtatcaacggcgtgctggtgtttggcagcatcggcgagttctatgccttccctctggacgtcaagaagcaggcggtcgacttcgtggccaagcatgtcgccgggcgcatcaaggtgttcgcgggcgtgggcgataccaacttgaacaatgtgatcgacttcgcgcgggcagtcgaagcaagtggagtggatgcgctcgtggtcgtttcgccgtattacttcggccctactgcgggaggcgcgaaggcgtacttcggcgcggtcgctgaagcgacgaatcttccggtgatcctctataatttcccaccgcgcaccggcagcgacttgaccccggagctcgtggccgagcttgccgccgcgcacccgaacatcgtcggcatcaaggacacggtcgacacaatcagccacacccgcaaggtgattcacgcggtcaaggccgtgaatccacggttcgcggtgttctccggtttcgacgagtactatctcgtcaaccgcgtctccggcggtgatggcgtgatctgcggcatgaccaatgtggagccggagaccttcgttacgctgcaccgtgcatatgaggccggcgactatggcaccgcaattgaggccgccgaacgcatcagccacctgatggcgctgtacgatcagaccgacctgttcatctccgccatcaagggtgcggtcaaggccaagggactgaacatttccaccctgatccgtgagccagcggtgcaactcactgctcagcagtatgaggcgattaaggcgattctcaagtagtgtatatctcaggcttccgcggaatcctacggtggatttcgcggaagtttttttttacggtgattacagttgccggctcagctcagcagcgccgcgatgatcgcgataaacaccgggctggtcatggtgctcatcagaatgccgtcgcgcgcgaaggtgaggcccacgttgtagcgggccgcgtagttgtagacgttctggccggtgggcagagcggcgagcaccacgcaggcatacagctcggagccgcggaagcccatcacgaagtaggcgagcaggaacgcgatgatcggcatgatgatgttcttgaggaccgcgaccgtgaagatggccgggcgatcgcccttctgctgcagcggcttggtgccgtgtagggacatgccgaacgccatcaggatcattggcaccgctgaatcgccgatcatgtcgatcgggtcgaaaatgaatttcggcactgggaaccagccgcttttagcggaaatcgcagagaccacaatgcccagcagcgaaccgataagcagcggttgatgcagtggctgcttggcgatttccttgatggagaccttgcccttggtggtcacgtccagcactgtcaggcccaccggtgtgaagatggcctgctgcatgaccagaatcggtgccaccagagccggattgcccagaatgtaggtggcgattggcaggccgatgttattggaattgaggtacagcgaattcagggcgccgatggtggcgtccggggcgttcaggtggaagaacatgcggttgagcaccaggaacaccacgcctaccagcacggcggagaagaacgccacgataatcgagggatggaagatgtcgaagatcggttccttggagaggatggcgaacatcaggcacgggctcgatacgaagaaggagaaccggttgagcactatctgagcggacggcccgccgattcgcattcgtgcggcgacatatcccaccgcaatcacgatgccgataacgcagaagccttgcatggcgctgattagacctgacataatcctccctttcgccaccccagtgtggcacataaaaatgtattcggccgcaaaatctcatgtagtgggtgtgctgggcccgccgcccacgcggtacgctgttcacatgacgcttgaattgaaccgcaccgcatccactgccgagcagctgaacagcctgctcacccagatcatggagaacttctccgtgtccgaccacgagggccccctcaccgacgaggtcgaggccttccttaacgagcaagagcacctgaccgtccgccgtcacggcgacacagtggtggccggcaccgacttcggcgagccgaaccgtgtgatcttggccgggcacctcgatactgtgccggtcatcgacaatttcccaccgaagtggctggagcccggcgattcgctgattcgcgaagaaatcgcccacgctcatcccgaagaccgcgtgctgtggggccgcggtgccaccgatatgaaggcctccgacgcggtgatgctctacctcgccgccacgctcgacggccgcacgccggaaaccaccccgaaagtcgacctcacctacgtcttctacgaccatgaggaagtcgtcgccgaaaagaacggccttcgtaaagtcgtcgaggcccatcccgattggatcaccggcgatttcgccatcatcggcgagcccaccaacagcggcatcgagggcggttgcaacggtacgattcgcttcgacgtcgtgacccacggcgtggcagcgcactccgcccgcgcgtggatgggggagaacgccatccacaaggcggccgacatcctgagccgactcaacgcttacgagccggccaccgtgaacgtggacgggctcgactatcgcgagggcctcaacgccacgctgatttccggcggcaaaggcacgaacgtcattccggatgaatgccgcgtacacgtcaactaccgcttcgccccggacaaatcgctggccgaggccaaggctctgatgatgggcgcggatgccggtgccgaactcggcaatggcgagcatgtggccactggcggcgtgttcgagggctacggcatcgaaatgaaggacgaaagcccctccgcgcgcccgggcctgaacgccccgctcgcccaagatctggtccgactggtcaaggagcgcaccggccgcgacccgttggccaagctcggctggaccgacgtggcacgcttctcccagctcggcatcccggccgtcaacctcggtgccggcgacccgctgctggcgcacaagcacgacgagcaggtgcccgaatccgacctggccgccatgaccgcaattcttaccgactggctggtctgacacctctctagctcccctctctgaggggagctgtcaccgcagggaggggagccgagagaacgtcagcctcgccgggccacgcccgcacaaaatatgtggcatactaaaggatggtggttctgcataaccatcagcgtgcgagatggcgtcgatccccttgcggctctcgagaatgagacaacgcaagcgccggtgtccgccacccgcaggacagacttgagacgaagttgcctttacgcggcgcgttttcgcgcggccacggtgagagcgtggtgtgagtcaagcgtataggcctggaaataggcgtcgtgatgcagcgcgccgcgaggagcattgtgcccactgacaaccgtgaaggtttcgtcaacgacggaaccgataattcaaccgtatccaatgccgattcggctgcagccgtgaacgctgcgcctgccgccgcctcccagcccgtcgaacctgttcgccgtcgtcgtggcggccgccgcgtggtccgcggcaccggtgctgccggcgcctccctggaactgcaagtgcaggaacgcaccccgctgttcgaagcccccgcgcttcccaatgccagcaccgcggccgattccaagtcatccgattccggcgattccgatgaatccagcgattccaaggattccgccgaacgtccaacccgccgccgtacgcgccgcgtttccagggccgacgatgccgccgaaacgccgcgtcgcacccgtcgtacgtccgccgcatcttccagcgataccgatgatgacgacgagactccgcgccgtccgcgccgcgccgcttccgcagtggccgacttggatagcgaggatgatcgtccgcgccgttcgcgccgcacggtcagtgccgatgatttcgatgacgatgacgccccgcgttcccgccgccgttcagtcgtgggcgatgacgattacgacgaggaccgttcggttcgccgccgctctcgctcccgccagtccgacgatgatgactacgaggatcgcccggttcgctcccgcctccgccgtgcgcctatggatatggatgatgatgacgaggaccgtacggttcgccgtcgttctcgccgtgcagttgcggatacgcacgaggacaccccggatgagcgcctgttcgacgcggtcgaatccctgccctctggccacgagaccgtgcgccgtggcaagccgatgacgtccctgctgttccaggaaccggtgctgcccgccgccgtggatgcgcacgataccgctgacactcgtgatgacggtgttgacgccgacgaacgcccgtctcgtcgctcccgccgctcgcgcagccacgacgatgacgatgcccagccgcgcagccgtcgccgcgacgatcgcgacgaccgcggccgcgcctccgccgaccgtgacgcttcccgtgacgccgcgtccggcgataccaacgccgatcacgacgatttcgacgccgacgacacctcggactcccgccgttcgcgccgctcccgccgtctgaacgcccaggagcgccgtgcagccgccgaagtcgagcagattgaggaagacctcgagctggacgatatcgcctactcgccgattgccgaggaggagggcgacgaggaatccgacgtcacccgcacccgttcgcgccgtcgccgccgtcgtggctcacgcggcgaaaccggtgccaacggcgagcacgataccgccgagaacgatgccgaggatacgcgttcccgccgtcgtgacgatcgcgatgatcatgaccgtgatcgcgatgaggacgatgaggagcagaccgtcactcgccgtcgccgccgtcgtcgtggcggcaagaacggcgagggcaccgacgaccagagtcagaacagcgaacagccgctggtccgccgctcccgcaagcagcagtacatcgacgaaatcaccgatgtggaaggctccactcgtctcgaggccaagaagcagcgccgccgtgacaaccgccgtgagcgcagccgccagagccagcttatggaacaggacttccttgcacgccgcgagaacgtggaccgcctgatggtggtgcgcgagaaggaacaccacacccagatttccgtggtggaagacaatgttctggtcgagcattacgtctccgacattcaggaagtacagaccgtcggcaacatctatcttggccgcgtgcagaacgtgctgcccagcatggaggccgcattcgtggatatcggccagtcccgcaacggtgtgctctacgccggcgaggtcaactgggatgccgctcgtctcgaaggtcagccgcgccgcatcgagctggcgttcaagtccggcgacccggtgctcgtgcaggtcactaaggacccgatcggccacaagggtgcccgcctgacctctcaggtcacgcttgccggccgcttcctggtgctcgtgccctccggtggcatgaccggcgtgagccgcaagctttcggagcgcgaacgcagccgtctgaagaacatcgtctccaagatcgccccgaaagacatgggcgtgattatccgcaccgcggccgaaggcgcatccgaagacgccatcgtcaaggatctcgaatcactggtccgccagtgggagcgcatcaacgccaagcgcgaggaattctggcacggcaagcgcccgaaactcctgcagggcgagcccgacgtggccatccgcgtggtgcgcgacatcttcaacgacgactttagcaagctcatcgtggaaggtgacaaggtctacgaccgtatcgaggaataccttgacaccatggcccccgacctgaaggacaagctggagaagtgggacccggccgagcacgaaggcaaggacgtgttcgacaaatggtccatcgactcccagctgcgtaagggcatggaacgtcaggtctacctgccgtccggcggctcgattgtcatcgatcgcaccgaggccatgaccaccatcgacgtgaacaccggccgctttatcggcaagggcaagtccttggaagaaacggtgacgcgctgcaacttggaggcgtctgaagagatcgcccgccagctgcgcctgcgcgatatcggcggcatggtgatgatcgactatgtggatatggtcatgcccgccaaccgcgatctggtgctgcgccgcttggtcgaatgcctggcacgcgaccgcaccaagcatcaggtggccgaagtcacctcgctcggtttggtgcagatgacccgcaagcgcatcggccagggtctggtcgaggcgttctccgaggaatgcccgacctgcaagggccgtggtttcatcctgcatgatcagccgaccgtttcggccgactacgacgatccctacgcgcttcgcggtggcgacccgttcgtcaaaaccaacaagcacggtcgcggcaccgctcccgctcccgaaccggctggttccagcgccgacgtcaaagccaaactggctcagattgccgccgctgccgtcgccgccaacaatacggcggaagagtaacaggtgtgtcgtgcttgacacgcgggcaaaaatcatttgatttagtccgcatggtggtgtagatttgaaactcggtgtctgaccgcaggctcggtgcgtgttaggcaaggtagctttccaaaacataaaaggaacgataatgtacgcgattgtgaaggccggtggccatcaggaaaaggtcgaggttggcgacgtcatcctcgtgaaccgtctcgacgccaagaagggcgataccgtggaattcccggtctccctcgttgtcgatggtgacaaggtcaccctcgccgccgccgatctggccaaggtgtccgtcaaggctgaggttgtgaacgatgaagccaagggcccgaagattgacatccagaagtacaagaacaagactggtgttgctcgccgtaagggtcatcgccagaagctgactatcgtcaagatcacggcgattgcctgagttatagaaaggaccatgaatcatggcacataagaagggtgcgtccagctctcgcaacggtcgcgattctaacccgcaatacctcggcgtgaagaagttcggtggcgaagccgtcgtggccggcaacatcatcgttcgccagcgtggcaccaacttccacccgggccacaacgtcggcatgggcaaggaccacacgctgttcgccctcaccgatggctccgtgaagttcggtgtgcgtcgcgaccgcaaggttgtcgacgtcatcgcctgagcgatatagcgtcaagctttttcaagccgcgcccgtaaggacgcggcttttttgtaaggtaatcaatatgagtgattttgtggatcgagtaaccgtccatgtcaagggcggcgatgggggcaacggttcggccggcatccgtcgtgagaaatacaagccgttggccggtccgaacggcggcaatggcggcgacggtggttccgtggtgttcgtggccgaccgtaacgccaccagcctgctcgactatcgtttcatgccgcatcgtgtcgccggcagcggcaccatgggtttgggcgacaataaggacggctccaagggcgaggacctgattctgcccgtgccctgcggcaccgtcgtctttgaggcgcgcggcgaacagggcaaatccaagcatcccggcgcacagctcgccgacttgcgtcacgagggcgaccgctgcgtcgtcgcccaaggcggtgccggcggcctcggcaacatcgccctggccaacaagacccgacgcgcccccggcttcgccctgctcggcgaactcggcgaggaacgcgacgtgattctggaactgaagtccatcgccgacgtggcgttggtcggtttcccctcggccggaaagtcgtccctgattgcggcgatgagttccgccaagccgaagatcgccgactacccattcaccacgctggtgccgaatctcggcgtcgtcatcgccggcgactctcgatacaccatcgccgacgtgccgggcctgattcctggcgcctctgaaggcaagggcctgggactggagttcctgcgccacatcgaacgtaccgaaatcatcgcccacgtgattgattgcgccacgcttgaaccggaccgcgacccgatgtccgactaccacgcgctggaaaacgagttggcactctacgccgacaagctcgaactgccattgggcgccatcccgattcccgaacgcccgcgcatcgtgattctgaacaagatcgatgtgcccgaggccaaggaattggccgagttcgtgcgtccggagttcgagaaactcgggctgaaggtctttgagatctccaccgcctctcatgaggggctgaaggagctcaacttcgcgttgtctgcgctggtgcatgagatgcgtgaggaagtggccaaccgcgagcaggccgaagaggagacgcgcgtggttatcaagccattggagaccaagggccgccgtccgcgtcgcgctgacgagggcggcagtgcgcttgagttcacggtcgagcgccgcgaactcggcaatggcgaagtgttcttcgaggtgcgtggcgtcaagccggagcgctgggtcatgcagaccaacttcgacaacgacgaggccgtgggctatctggccgaccgcttggccaagctgggcgtggaggatgagctgcgccgcaagggtgcccaccctggtgacgaggtgcgcatcggtcgtggtgcccgtatggtcgaattcgattgggatccgaccatctccgccggtgccgaaatgctcgacggctccaacctcggtgcccgaggcaaggatctgcgtctcgaagagcaggacccgcgcacgcaccgccgctccaacgccgaacgtcgtgcccaataccacgagatgatggacgcccgtgccgccgtgcgcgatgcgatgatggccgaacgcaaggccggccactgggccgacccgaccgttgacgacgatcgccatgacgaaaccagtctgttcggccacggtgagtccagcgaagatggtgaaaccgaggaataaatgagcactccgagtcaggccgaggtgcggcgagccgtcgcatccgctggaaccatcgtcgttaaggtcggttccagttcgctgacgcagccgagcggtcacctcgatccaggcaagctcgacgctctggccgccgcccttgcccagatacgactgatgggcgggcgtgtggtactggtttcctctggtgctattgcggccggcttcggcccgctgggctttgacgaacgcccggccgacgtggctactcagcaggccaccgcagcggtcggccaaggtttgcttatggctcgctacgagactgcttttggccgtttcggtattcgcgtcggccagattctgatcactgccgaagatacgattcgtgccacccagtaccgcaatgtggaacgcacgctggaccgtctgctcgacctcggcgtggtgccgattatcaacgaaaacgattcgttggcctcgaacgagattcgtttcggcgataacgatcgactctccgccttggtagccaatctggtgcgggccgaagccttggtgctactgaccgacgtggacgcgctgtacactgcaccgccctcgcagcccggctcccgccgtgtggaatatgtgccgaacgttatcgatgcacttggcgacatccaggtttccggctccggctccaaggtcggcaccggtggcatggtcaccaagcttgaggccgcgcgcgtggcggcagtctccggcatccccacggtgctcacctgcgcctcgaacgcgggccctgcgatgatgggcgatccggtgggcaccgtgttcgcaccggttaaggcccgcggttcgtcgcgtcgtctgtggattggcttcgccgccgacccgcgcggcactattgtggtcgatgtgggtgccggccaggcgattcgcggcgggcgtgcctcgctgctggcggccggcgcgctcgaagtgcatggcgatttttccgccggcgatccggtctggatcgatgccgaaagc

SEQ ID NO: 2934 - DNA, 19473 bp, Unknown
  R19_24m  MAG No. k141_3534
agagacgcccggtcccattccgaacccggaagctaaggcctggcacggcgatggtactgcacccgacagggtgtgggagagtagcacgccgccgcaccacacgtacaggaagcccctcggagcacacgccccaaggggcttcccctatatccgaaaccaacaagacataggctctcgcacctagggtgtggccgaatcgaaagcatatagaagagggaaccctcaaatgacggagagttccctctttgcgtatctggacctataaaggtctagaaattgaaattgtcaggatcagcaccgttgcgcttgccggtgttgatggcggagatggcggtcatatcatcgactgataggttgaagtcgaagacctcgaagttctgcttgatacgctcggcatgagtggatttcggcagcacgacgataccgcgctggatgtgccagcgaatcaccacttgggcaggtgacttgccgtacttggcactgatctcggccaatactgggttgctcagcaggttgccgccggtaccgccgagcggactccaagcctcggttgcgatgcccttggcacgcagctggccaatgagctcttgattggtgaattgtggggaagactcaatctggtctacggcaggtaccatatcgctgtgggtcagcagctcatcaatatgatgcttttggaagttactgacgccaatggccttggcacggccagaggcataaatctcctgcaagtcatcccaggcctgctgccagccgtctgccggccagtgaatcagatacagatccacataatccacgcccaagcggtcgaggctttcttggaatgcatccttgccgtggcgtgcgcgaatatcgtcattccacagcttggtggtcaagaagaaatcgctgcgcggcacaccagcacggcgaataccttcacctactgaggcttcgttgcggtaaatcattgcggtatcgatatggcggtagccattctccagagccgtctgcaccgcgttcactgtagtatcaccatccggtgtctggaatacgcccaagcccacctgcgggatgacagtgccgttgttcagcataattgtcgattgaattgccataatgcctcactattcgtagtgttcattcaatttcctattttagaaacaagacgatgcaatgagccgcgtttcgcgggcaaagaattgcgtaatgatggcgtgattctcgttcattaggtcattattgcattcattaggtcaatgggtccagggtcttcggcatcagaacccagtcattacgccattcctgaagagccgtcttacggcataccgacctaatgaacgtgaaatcgacctaatgaatgcaacgagtaagcggctacgataataaccagtagaatcacaacccagattgaaggggagagcacgtggcagaggaatatgtggctgcattcgatgcagggaccacggcgttgaagggtgccttggttgataggcaaggccgtatcgtagccagtgcgagtagtgagcttaaccttattatcaacggcgactatcgggaacagagccccgatcaatggtggcaagctttctgctcggcctccaggcacatgattgagcaggcgcggcaatccgagtcagaattcaatgtgactcgcattcgtggcatcattttcagcggtcagatgcaggatgttattgctttgaacggcgagctcaatcccgtccgcaatgccattctgtattcggatggccgagccgaggaacaggccaagcaactcgccaagacatatcagggtggagtagaacgtttcctgaacaccgttggcaaccggctcgaaggctgcttgccgttgcccaagttgatgtggctgcgtgaacacgagccggaaacgtacgcgcgcattcgtcatgtattgatcagttccaaggactacttgatcgcccaattgaccggcgaatgcgtgggcgatgtggcggcttgttccacagccggtgccatgaatatccgtaatggccaatgggatgccgaattgtgcgaggccgcaggaatcgacatgaccatgttgccacacctgcacaatccgcaagacaacattggcacagtgacggaatccgctgcacaacgcaccggtttctccgccggaactgcggtatacgcgggcattggcgatgcgggtgccaccacgctggccagcggtgtcagccgccccggccaatacaacatcaatatcggcacctcaggttggatcgccaccgtttcgcccgaaccgttcaccgacaagccaggtgctgcgaatctggcatctggtgtggaagaaggattcgtgaatgcggtgccattcctcaacgccggcgacgtgcataaatgggttaccggcgtattcgccgatggtgattacgcggaagcacatcagcttatcgaaacatccaaacccggctccaacggtgtgatgtgcctgccctatctggtaggggagcggttccccgtaatgaacccgaatattcgcggggcctatgtaggcctcgatccagacaccaccaaggcagacatgatgcgtgccgcgcttgagggcgtggccttctccattcgtcaaggtatggaaagctttgatgctgagcctaccgagatttccctgattggcggcggggccagagaaaatgcgtggtgccagattctggccgatgtgttggagcatcccatcgaagtgttcgccaatgccgatattctgccagcagtggcaatggcctcgttggtattcaatgtaccagacctgctgcaatcagtatgcgaatgcactgtataccagccgaatcctgacaccgcacgcacatatgccgacgcataccggcgattcctgagcctctacccgatgctgcgaacgatggattaggaactgagcatcatgaggcaatcagcgaatttggtccgcaaacatatagcggtcactggactggtgcaaggcgtgggattccgttattttacggtgactcaggcacgtcgacttggtgtacagggctgggtgcgcaattgccgcgatggctcggttgagctggaagcacaaggcagtagcgacgcagtgcaagccttggttgagcaattagccattggtccgcgatggtccgaagtgagtcacgtcgccgtacatgacatgccgattatcgatgagaccgctcgggcatttggcgtgcgtcaataacctgcatcacgaatccacatcacgcacgataatctcacgatacgggtgaacatgggcgttcctcgacgcttaggaccctcacattggtacgatggggctttatgagtgagaacatcatgcgaatcattgacctgcgtggtcagaaactgtcccgtgccgaactgctcgccgcgatgccgcgtgccgcaatgggtacttccgaagccaccgatctggtgcgtccgattctggacgatgtcaaggagcgcggcgccgctgccctgcgcgacttcgaggagaagttcgaccacgttcgtccgaagaacctgcgcgtgccggccgaagcgatccagaatgccctgaccacgctcgaccccgaagtgcgcgccgccatcgaggaatccgtgcgccgcgcccgcgccgtggcggccaaccaggtgccgaaggacttctacaccgatctggccgaaggcgctcgcgtcgccgaacgttggattccgatccagcgcgtcggcctgtatgtgcccggaggcaaggccgtctacccatcttccgtgattatgaacgccgtgccggctcaggccgcgggcgtcgaatccctggccatcgccaccccgcctgcgcgcgatgatgcggagggtctgccgaacaagaccattctcgccacctgcgccatcctcggcgtcgacgaggtgtacgcggtcggcggcgctcaggccatcgccatgttcgcctacggcgccaagggcagcgagccgcaggacggcgacgtgctgtgcgacccggtcgacaagatcaccggcccgggcaacatcttcgtggccaccgccaagtcgctcgtctccgcattcgtgggcatcgacgcggtcgccggcccgaccgaaatcggcatcatcgccgacaagaccgccaacccgagcctgctggcagccgacctcatcggccaggccgagcatgatgagctcgccggttccgtgctgttcaccgactccaccgagattgccgacaaggtgcaggagaatctcaagtaccgcgtgccgcgtaccgagcacgccgagcgcgtccacacgtcgctgtccggcacccagtctgccatcgtgctgaccgacggtcttgaccagtccatcgacgcggccaacgcctacgccgccgaacaccttgagattcagaccaaggatgccgatgctgtcgtcaagcgcatcaagaacgccggtgccatcttccgcggcccgtactccccggtgccgctgggcgactacatgtccggttccaaccacgtgctgcccaccggcggcaccgcccgcttcgccgcaggcctcggcgtgcacacgttcatgaagccggtcgaagtcatcgaatacgacgaggaaggcctcaaggctctcgccgcccgcatcaacgccttcgcggtgtccgaggacctgcccgcccacggcgagtgcgtgctctcccgcttcgtcaaggatccgtatgacaaggccaccctgcgcgagcaggagaagggagccggtctgcgatgagctcgattcccgaaaacctgccgctgcgcaacgacctgatcggtgaggagccgtacggcgctccccagctggacgtgccggtgtgcctgaacgtcaacgagaacccgtatgcgccggacccggccgtatgcgacaccatcgccaagcgtgtgcgtgaaatcgcccccacactcaaccgatacccggaccgtgagcacattgaattgcgtcaggcattctccgattacctggcccgtgaatccggtacccgtctggacgtggacgagctgtggggcgcgaacggctccaacgagatcatgctccagctgttccaggctttcggcggcccgggccgcaccgcactcggtgccgacccgacgtactccatgtacccggagtacgctcgcgacaccttcaccggttggaagctcgcccaccgcaacgccgacttcacgttgaacgtcgacaaggtgcttgaggccatcgccgaggtcaagccctcgatggtgctgctcaccagtccgaacaacccgaccggcaccccgttgccgatggaggatatcgagcgtattctcgccgcctgcgaaaccgccgaagtggccggcgcgggtgagggcgtgcacccgattctcgtcatcgatgaagcgtacgtggaattccgcaagcccggcaccccgagcgccgtgagcctgattaaggaccacccgaacctggccgtaagccgcaccatgagcaaggcctttgccttcgccggcgcgcgagtcggctacctagccgcatccaagggcatcatcgactgcgtgcgcatcgtacgtatgccgtaccacctgtccgccgtgacccaggccgccgcactggccgccttcgaacacaccgatgaacagctgagccgtgtcgagcatctgcgcgaaacccgcgaggccaccgccgcatggctcaaggaacagacctacaaggaccagccgcttgaagtggccgaatccggctcgaacttcctgctgttcggcgggcacttcgacaagcgcgaagccatcttcgacgagctcctgaagcgcggcgtactcatccgcgtggtcggaccggacggttggctgcgcgtgtgcatgggtaccgacgaggagatggaaaccttccgtaacgcccttgttgaagcgcttcgtatagtggaagcagcataagggacgtttctttccgattgcggcgagacccgaagcgattcgagtcccgccgcaatccaatatgacgaatcacacaggagacatgatggcaagaaccgcgcacatcgtccgcgaaaccagcgaatcacacatcgacctcgaactgaacctcgacggcaccggcaaaaccgatatcgatacatccgtgccgttctacaaccatatgatgaccgcgctcggcaagcattcgctgatcgacctgaccatccacgcccacggcgacaccgacatcgacgtgcaccacaccgtggaagatacggccatcgtgttcggcgaagctctgaagcgggccctcggcgacaagaaaggcatccgccgcttcgccgacgccaccgtgccgctcgacgaggcgctggccaaggccgtggtcgacatttccggccgcccgtactgcgtgtgcagcggcgagcccgaaggctacgaattctgcatgatcggcggccacttcaccggctctctggtccgccacgtcatggaatccatcgccttccacgccggcatctgcctgcacatgcaggtgctcgccggccgtgatccgcatcacatcgccgaagccgaattcaaggcgctggcccgtgcgctgcgcttcgccgtggaaatcgacccgcgtgtagacggcgtgcccagcaccaagggagccctgtgatggccgacgacaagttcgatccggacgaatcgcacttctccgacgaggagcttgaggccgcgctcgccggattcgagaaagaattcgcggacgattcggcatccggcgatgccagtgataccagtgatgccgataaaacggcggacgctgcttcagcgaagtccgattccgacgcgaatgatgatacggctgataaggcttccgctgattccggccagcctatgaccgacgacgtcaccggatcggtcgctgatgcggtgaatgaggccatggccgacgtggtcgacccctcgctcggcttcgacaacgaactcgctggactgttgggtaacaaggcgaaggtggcgctgatcgtcacccgtcttgcctccgctgaactgttggccgcgttctgccagctgtcggacatctccgccgcatgcgtcggtgccaatcagggggccgtcgcggtgctgaagaatctggacggcgacggcccggaagccgcagccaaggacctgaccaccgtggtatccggcatggccgtgattcttgcagtcaatcgtgccgacaagctcgaagtggccatgtacgtgcagggagaggccggacagagtttcgcgccgcccgtgctgttcacctccacaccgcgcttcgtcgaggacctgatgctcggcatcgtaaccctgaaccaactcaagacccaagggttcgaagtggtggattccgctggactcgaccatgaccaggcgatgcagattctcgccaaccataccaagcgtgggcgtggcggacgcggctcccgcatcgaatagacgccaaccaaccagtaggggataggagagaatatgaccacagcggttgttttcgattacggtttcggcaatgtacgttccatggtgcgtgcgctcgccaatcttggcgtcgacaccaccctcacctccgactaccggcagtcgttggaggccgacggtctggtcgtgccgggcgtgggcgcgttcgccgcatgcatggaaggactgaagaaggtcgacggcgaccgtgtgatctatgatcgcatccgcgccggccgcccggtgcttggcgtgtgcgtgggcgagcagatcatgttcgaacacggtctggagcacggagcccatgccgcgggcatcgggctgatcggcggaacggtgaacctgctggacgccgacgtggtgcctcacatgggatgggacacgatcgaggccgcccccgattcggtgctgctcaacggcgtggagaatgaacggttttacttcgtgcactcctacgccgcgatggaagtgaagccggcggatacgtcccgcttcgacattgatctgagcggtgcgcccgaacgcgtgagctggtgctcgtacggccggtcgcgtttcgtggccgcctacgaacacggcccgctgtccgccacgcaattccacccggaaaagtccggggacgctggctcccagctcctcaagaactggattgccacgctgtaaaaagcatgaagctcccctctgacgagagagctcaaattatgtataagtaactgaagaaaggctcttcttatgtcgttgactctgctgcccgccgtcgatgtacgcgatggcaaggccgtgcgcctgcgccaaggcgaatccggttccgaaaccgattacggttcgccgtttgaggccgcccgtacctgggttgaggccggtgccgaatggattcacctggtcgaccttgatgccgctttcggtacgggcaacaatcgcgatcagctgcgtgagatcgttcatgagcttggcgaccgggtgaacatcgaactgtccggcggcgtgcgcgatgacgcttcgttggacgcggcccttgaggccggtgccgcccgagtgaacatcggcaccgccgctttggagaacccggattggaccgcttcggtcatcaagaagtacggcgaccgtgtggctgttggtctggatgtgcgcggtcacacactggcggcgcgcggctggacgcgcgaaggcggcgacctgtttgagaccatgaagttccttgactccgtgggctgctcgcgttacgtggtcaccgacgtggccaaggacggcatgatgtccggcccgaacatccaactgctgcgtgaagtcgccgaacgcaccgacgccaaggtcacggcctccggtggtatctccaagctggacgatttgcgcgccatcaaggaactggccgagatcggcgtcgattccgccatcctcggcaagtcgttatacgcacgtgcgttcacgctccaggaggcgctcgcagtcgcgaagtaggcaaaggactcgccttagcgagactgttaagctacctttgctcagctatcgcttcactcaggcctcgcctacggacagcccattgggctgtccgcttaacggctcagcaaggaaggtcgccggatttgaggagctttttgaagacggtgtagtcttcatcattctgttcggcatagctgacggcgaacgaggcaatggcctgatcgaattcgtcggtgccacccatgtaattggcgatcgcgatcgaatcgccggtgcgggcgtgggcatgcgccaacgaccatgcgcacatgcgcgacagatcgctcaatcccgaagcgttgagattgtcgatatcaatcgaacccttgccattccacaactggcgcacgtaatagtcgcgcggtcggccatcctcggccataaagctcgaccaacccaacagcacatcggccgtattctgaatcagcttctgcccctgaaccacgcgctcaccgtgcgtggcgtacggcgacgcgccgcagtaatgctcgagcacggaatacgtggcctccttcatctgaatcatcatcggatcgtcgatatcacgcgcgatccacaccgacgtccacgcgcgctggcccaccgagcccacgcccaccaccttgcgggccgcgtcctgatagcgcaaatgatcgaacacccaacggcgatcgtcgtacagggaatgccggtagctctcgaacagcgtgtctatacgtgcctgcaacgcatccaagtcggcgtaatcatccagctgatatcggcaccagctcgggcggattggcggatggggtgagatgatcttcgcttatagtcactaccatagtgccgtgccggcatgggcccgaaccatgcctgacatgcggaccggggcatgttgatgaaatctcgcgactcgcaggtgacaaacagtgagatgttaacgcccctcgtaacacggttatggaacgataggcgactatggataaacagcaggagtttgcgctgcgcacggtcgaagaacgcgacgtgcgctttattcgtctgtggttcacggacgtgttgggaacactgaagtccgtggcgattgctccggccgaactggaagccgcgtttgaggagggtctcggcttcgacggttccgccatcgagggcatgacccgcgtgtccgaagacgacatgatcgttcaacccgatcccgcgacgttccagatcctgccgtggcgcggtggcccgcaaggtaccgcccgcatgttctgcgacattctgaccccagacggcgagccttcgctcggcgatccacgtcacgtgttgaagcgtacgctcgccaaggccaaggacaagggcttcacgttctacgtgcatccggaaatcgagttctacctgttcgaaagccaggacgactggtccaaggccccgaccccgatcgacgagggcggctacttcgaccatgtgccgcgcagcccaggcatggacttccgccgcgccaccgtgaacatgctcgagcaaatgggcatctcggtggaatactcgcaccatgaggcggggccaggccagaacgagatcgatctgcgatacgcggacgcgctcaccatggccgacaacatcatgacattccgtacggtggtcaaggagatttccttggagcgtggcattcacgccagcttcatgcccaagcccctggccgacgcgcctggttccggcatgcacacgcacctgagcctgttcgaaggcgattccaacgccttctacgaggccggtcaggagttcaacatgtccctgaccgcccgccagttcgccgccggcatcctgtaccatgcggccgaaatctgcgcggtcaccgaccagtacgtcaactcgtacaagcgcctgtggggcggcaatgaggcaccaagctacatctgctggggccacaacaaccgttccgcgctgctgcgcatcccgcagtacaagccgggcaagggcaactccgcgcgcatggagttccgtgcgctcgacccggtggccaacccataccttgcctactcggtgctgctggccgccggtctcgatggcatcgataagcagatgcagctgggcgaacccaccagtgatgacgtgtgggagctcaccgacggcgaacgtcaggctatgggcattcagccgctgccgcgctcgctggacgaggcgctgaagatcatggagaaatccgacttcgtggccgacgtgctcggcgaacacgccttcggctacttcctggacaacaagcaccaggaatgggaggagtacaaccagcaggtcacgccttacgagctgaagaagtatctgccgaagctgtaatcgcaagcgttgcacatgtgccgaaccccgtcgatgattggtcatcggcggggttttctatagcgtgtcgtggtggtgggtagcgggcagaggtgggaatagtgttgtcgctgagttgatacgaaaaacgattgacgtaaccgacgaatcagcttgtagtacgagcgagagcactcaagagagcacccatgacgaacacacctgcgaacaccgcgcgcaccgaccgcttcttcaatctgccggtcaccatcctgatcttcgccagcttcatgctgggcatgagcgaattcgtggtagtgggcatcctgccggacatcgcatccggacttaaggtctccgaagtgaccgtgggtaatctggtggccatcttcgcattcgtgtacgcgccctgcacgccgctcggatccgcattatccgcccgattcccgcgctttctcacctatctgacgttgatgggcgtgttcctcgtcggcaatatcctgtgcgccttcgcgccgaactatccggtgctgctcatcgcccgactgctcatcgcctcggtgtccggcacgctggtggccatctccatgaccttcgcgcccgacgtgaccaccgacaaataccgcaccaagttcattgcctgggtattctcgggtttctccatcgcctctgtggtcggcgtaccggccggcacttgggtggccaatactttcggctggcgtgtcacctttgccttggtttcggtgctcaccgccgtgctgatggcatcgatggcggtgtctctgccacgcaactcgcatccggcgaagatcggtttcctgaggcaattccgtctgttcttcgaccgccgcatccagctcggcgtggcggatgtggtctttggcgcagccgcctcctacgtcttctacacgtatctctcgccgatcatgcgcgacgaaatcggtgtgcccgaacgctatatcagcgtcggcttggtggtctacggctgtgcctgcctgtggagcaacctgtacggaggcaagctggccgatcggggcaggggggtcgagccgctgacccacattcgaccgatctactgcgtgcaggccgtctgcctgtgcctgctggctttcgcctcgctggtgccggccggcggcgcactgctgctggtggcgcttggcatgctcatgtacctgcagaattccgcttcccaggtgctgtatatggatgtggcctaccaatcccatcccggttcggtgaatctggccgcctccctgaattccatgtcgttcaacatcggcatcgccatcggctccgcggtcggcggcctggtcaacgacctccttggcctgacctggctcggcccggtcggcgcgattttcgcgctgctggcagccggcaccacgacactgctgcgtccgtacgtcagcccggtcggggaatgacgggtggcgtgacgcgcgggaacgaagggtttttcccgcgtgtccccgcggcatgccttatccgccgattgccgtccattgataacctgctatccaaataaccgataaggccacagcatgtcatcctgctgcgaaaccttaatgttaggacaccggctgcagggggacccggctcacgggcgcccacctgcgcggattgatgattatcggcatgttcagcgtgaaaatggggatgacaatatgacggatgcgactgcgaaagccgcgccgaaggcggaaagacggcggcgcgttctccgttccggcgctcgctcatcgatagtggtcggcggcgccatcgtgctgttcttcgtgctgctggcgccgctggccgggccgttgtcggccatcaccggcaacgacccgtacgccgagcatcccgaggccttgggtgccgggtcggtgccggccggattcggcggcggcatcagtgcccggcactggttcggcgtcaccccgctgcgcggcgtcgacctgttctccatcgtggcgtacggctcacggatctcgctgggcatcggcgtcgtctcgtcggtcatctcgctggtcatcggcgtggcgctcgggctgctggccggctatttccccgggttggtcgatgcgctgatctcgcgcacgatggacgtcttcttcggcttcccgttcctgatcttcgcgatcgcgctgtcggcggtggtgccgcagggcttcccgaggccggtgctgctgacgctagtgctcggattcttcggatggcccggcatcgcgcgtcttgtccgggggcagacgctgacgctgagcaagcgcaatttcgccgtcgcgtccaaggtgatgggcgcctcgcctgcccatgtgctgtggcatcagatcctgccgaacctcatgccgctgctcatcgtcaacatcacgctgtcgattcccgggcgcatcggcgccgaggcgggcctgtcgttcctcggcgtcggcatgaacccaccgacgccctcatggggccggtccatctccgacgccgtgcagtgggcactggtcgacccgatgtatctgatcttcccgggcgccgccctgttcctgctgaccttcggcttcaacctgcttggcgatggcctgagcgacgccatcgacccgcgcaagggggtgcgtgcatgagaatcctgcaatacatcggcaagcgcgtggcgagctcgatcgtcgtcatcctgctcatcacgctggcgctgttcctgatcttcttcctgctgccgaccaatccggcgcagctgtcgtgcggcaagccgtgcacgcccgagcagctgcagcgggtctccgccttcatgggcaccgataagccgtggtacgagcagatgggcaattacgtggcgggcatcttcgtcgggcgcaccttcggcagcggcggcggcgccgtggtctgctcggcaccatgcctcgggtattcgttccgtctcaacgaatcggtgagccagctgatcctcgaccgcttcccgatcaccgcgtcgatcgcggtcggcgcggccgtgctgtggctggtcatcggcgtggcgaccggcgtgtgggcggccctcaagcgcgatacgctgatcgaccgcacgctgctcgggctgtcgatcgtgggcgtttcggcaccgtcatacctgatcggcctgctgacggtgatcgccttttcgctggtgctgcagatattccccagcggcgggtacgtgaacttccacgacgaccctgtcggctggttcacgcatctgctgctgccgtggctggtgctggccgtgctcagcgccgccggctacaccagggtcacccgcacgcagatgatcggcgagctgagccaggactacatccgcaccgcccgctccaagggcgtgcccgaatcggtgatcatcttcaagcacgcgctgcgcaacgcgctgctgcccgtgatgaccatgttcggcctcgatctgggcgggctgctcggcggcgcggtgctcaccgagaaggtgttctcgatgcaggggctcggctcgctgctgctcgattccgtgtcgaacctcgacctgcaggtgctggtcggcgcgacgatgttcgccgccgtgctggtcatcgtcgccaacctgatcgtggacatctgctacagcctgctcgaccccagggtcgcgctcggcacgaagtagtgcggctgcggccgcaacacgcgatacttgccggtctgctccacggaccggcaccgatagagaggaaaaccatcatgaagaacaacgcatggcgcgtattcgcggcgggggcttgtgccgcggtactggcgctgtccggctgcggcgcgtccaacgacaacgccgccaccggctcggcgagcggcaccaccgtcaagggcggcacgctgaacgtgctgctgtccagcacggagatggatctggacccggccaagagccagggtctgccgaccaccacgaacggcaacatcttccgccgcctgaccgcgtggaagatcaccgacaagggcgagacgaaggtcgtgcccgatctggccaccgacaccggcaagtcgagcgacgacggcaagacgtggacgtacacgctcaagaacgggctcaagttctccgacggcacgcccatcacctccaaggacgtcaagtacgggctggagcgttccttcgccgactcgctgaccggcggcctgagctaccacaagacgctgctcgagggcgcgcaggactaccacggcccgttcgacggccaggagctcagctccatcgagacgccgaacgacaagaccatcatcttccacctcaacgcgccgttcggcgactggccgtgggtcgtctcgctcgccgcgttcacccccgtgcccgacggcaagggcccggcgtccggctacggcaagctgccggtggcctccggcccgtacaaggtcgagtcgaacgaggccggcaagcaggccgtcttcgtgcgcaacacctactgggacaagaagaccgatccggtgcgcaccgcgggccccgacaagatcgtgttcaagatgggacaggacacctctgtggccgcccagtcgatcatgcagggcaccggtgaaggcaagaactcgttcctgtccggattcgtgccggccgcgcagctcgcgcaggcgcaggccaacccgaactacaagaagctgctgaccaccagcggcgacggcgcgctggaatacctcgccatcaacacccaacacgtgaagaacgcgaagattcgccaagcgctgcagtacgcggtcgacaagaaggcctaccagacggcttccggcggcgagatcgccggcaacttcgccaccacgctcattacgcccggcatcgagggccgcgaggactacgacctgtacaaggccgatccgaccggcgacgtggacaaggccaagcagctgatcaaggagtcgggcgagcaggccccgaccctcaagctcatcgccacctccgctcaggccgaaaccgcctcctcgatccagacgagcctcaagcgggccggcgtcaaggtggacatccagacactcaacgacgatgtgtattccgatacgctgaccaacgacaagggcgactacgatctggccatcagctcgtggcagcccgacttcccgtcgccctacgccaacatctccccgctgttcgactcctcgcagatcggccacggcaactacaacctggcccgttacgcgaacccgaaggtcgacgagctgatcaagaaggccaccgagaccatcgatcagaccgaggccggcaagatctgggccgaggccgacaagacgatcatggccgacgcgccggtcgtgccgctgatctattcgaagaacacgttcatccacggatcgaacgtgaccaacttcgtcatcggcaacttcccggcgtacccggactacacgcaggtctcgctcgccagcgcgaactgagccggcatccgcatccggcgcgcgccggcggcatggtccgctggcgcgcgcgccggacgcattccaacgcttgtgcatccaaggagcttccaatgagtgaaccacgcgcgatcgtgaccgtggacggtctggccgtcagcttcgacgagcgggaggtgacccacggcgtcagcctcaggctgttcccggggcgcatcaccgctctggtcggcgaatccggctccggcaagtcggtgacggcgatggcgctgccccgtctcgatccgtcggtggccagcgtgaagggccacgcgtacctcgacgacgcccttgtggatgacgggccggactccggtccgggcggcgacggcaaggacgccgccggtcgcggcatcgatctgctggccgccgacgcgccgctgcaacgcatccgcggcgaatacatcggcacggtgttccaggaaccgtccaccgcgttcaatccggtgttcacgctcggcgtacaggtcgcggaatcgctcaaataccaccagaagcagctcagcgccgccgagcgcaaggccaaggtgctcgaacagctgcgcgaggtcgggctcgacgacgccgaacgcgtgtggtcgtcgtacccgcatgagctgtcgggcggccagctgcagcgcgtgatgatcgccatggcgatcatcaaccgacccaaggtactcatcgccgacgagccgaccaccgcgctcgacgtgaccacgcagaaggcgattctcgccctgatctcctcgctggcggtcgacctcgatctggccgtgctgctcatcacccacgacatgggcgtggtgtggcaggccgcgcaggacgtgtacgtgatgcacaacggcgtgatcgtcgagcaggggagcgtcgcgcaggtcttccgccacccgtccgacgactacacgcggatgctgctcgacgccgtgccgcgcctgcgcatcgacgagcatgcggtagacggcgaacatgcggccggcggcgaacgcatcacggaaagtgacgcgcccggcggcggcaggcgcatcacgcaggtgaacgacgtggccgtgtcgtacaaggccggcagcttcgccgtcaaggacatctcgttcgatctggtggccggcaggacccgcgcgctggtgggcgaatcgggagccggcaagaccacgatcgccaaggtgatctccggccagctcgcgccaacctcgggcacggtgctcatcgagggggaggatctcgccaaggcgcatggcaggcgcaagcgcgagatcctgaagcatatgggctatgtgttccaggacagcggatcggcgctcaacccgcgcaagtccgtggcatggagcatcggcgagccgatgctcgtgcagggcgggctcagcgagacggaccggcgcaagcgcgtccttgaattgcttgatcaggtggagctgcccgccgatgtggccggccggttcccgcaccagctgtcgggcggccagcgccagcgcgtcggcatcgcgcgcgccttggcgctcaacccgtcgctgctcatcgccgacgagccgacgtcgtcgctggacgtgaccgtgcagcgcaaggtgctcgacctgctgcgccggctgcagcgcgagcacggtttcgcatgcctgttcatcacccatgacctgggcatcgtgcaggagatgtccgatgtgatcacggtgctgcgccacgggcgcgtcgtggagagcggagagaccggccgcgtgctcaaccatcccaaggccgagtacacgcgtaccctgctcgacgcctccccgaagatcgacctgtgagccgtgccgctcgtcatccggccggttctccggccgtgcggcggggcggcgacggcgcggatgacacctagccttaccgtggtttcggtttttgccgttcccgcccctatcggcgcgcggcaccgaaccagttggtgtatatgagggcgaagttgcggttgccgtagctggagcatgagtcgccctcgccgaacccggccgccagcgaggcgtcgttcggctggtagggcgtgtagatgtagagcagcgcggttgccttgttctcgatgtacacgttggtgccgccgcacccggcatccgggtggtactggatgtagttcagcgcgttggcgtgatagccgtaggcgctttcatgcgccacatagtattggtagcggtgcgccgccccgtacacctgtctgaagaagccggcataggccggatcgcagttcgcgttgtccgggcagctcagccccatggcggccttgtactggaagtccgtcggatcgacggccgtgaccaggtgctgctccttctgcagcacggtgagcagcaccttctggctgatgccgcacgcgcgcgccgacttgtcgatgatcgcggccgcggtctcctttctcgcgccctcgtacgccgcgcaatactcgttcgccgcctggtcctcggtgtcgaaggtcatggttttcaggcaccgggaaccgctgcacgccgcgccctgcttgtcgaggaacgcctggacctcggcctcgctcatcgcattggcgttgaagaactggccgtccgagatgatgtcgccgggattgaagtcgtattgctgcgtcagctgcagctggcgggcctcggcctcctgcacgtcgcgacgccactggacgacccgcacagtgcccacgaccagcgcgaccacgcatgcggccgccaccacggtgaccagcacagccgcgacgcgctgcgccaacccggcccgcttccaccagcgcgccgggctgagcggatacctgcgattgcgcgggcgtttgcccgggcgacgtttgcgattgccgcctgacacgccccgccccgcgacaatcacgttcgccctgccgcgcggattggccggcttgcgccgttgcgtcgtcgccatcgctacgccagtgccttcttgatgcgctgcaggctcaccggcttggcggtgccgagttcctgcgcccacagggacacgtagaattcctcgagcatccagcgggcggcggtcgcctgcttcatcagcgtctcgtggcgggggccggccggctccgccttggccttggccatcgccttgtcgaccagcgtgcgggcctcgtcggcct

SEQ ID NO: 2935 - DNA, 10061 bp, Unknown
  R19_24m  MAG No. k141_3763
cgggagctgtcgaacgaagcgagactgagggtggtttatattcaatgtttgaccaccctcagtcagccttcggctgccagctcccgccagcgggagccaaggtaatgtcagctcgttaacgagctggccgttatcagttttgcggggaggctactactactcgggcggcgcggattacgcggtcgccgatacggtagccggcttccaccacggtgtcgacggtttccttgtcggcatcggcatccggcttgtgcaggattgcctcatgcttggtggggtcgaagtcctcgcccttttcgccgaacttctcgacgccgaacttctcgaaagccttgtcgatcttggcggcaacggccttgaacgagtcgtccatctcgctgtgttcgcgaatgcggtcgatgtcgtcgagggcgggcagcagcgcggtcagcacgtcgatgatgccgtgctggcggaagcgctcctgctccttctgcgtgcgattgcggtagttgatgaactccgcacgttcgcgttgcagggcttcgaggtagtctgcggcttccttcttggccttgccgaggggggtgagggtgtcttcggaatcggactggccttcgccggtcttctctccggcatccgacttctctccctcagctgcggcaggagccgcgtcggctccttcattggaaggagcctgggcagccgaatcctgcgcagagtcggactcggcggaggcgtcagcccctgaagaggcctgagcggcctggccggcagcctcagcatctgagggatccggcaggtcgttcaggtagtcgtccttgttgaactcggacatcacttgttgtccttgtcgtcatcgtcgtccacgacctcggcctcgacggtgtcgtcgtcggaaccggaggcggagccagcggaagcgccggcaccgtcagcgccagccgcaccggcaccagccgcggcaccctcagcaccctgctgggcgtagaggacctggccgatcttctgggcggcggtcatcagctcagtctgggcagtcttgaccttctcggtgtcgtcacccttcagggcttccttcagagcgttgaccttgtcggtgacttccttgacgatgtcgtcggagagcttgtccttgttgtcgttgacgagcttctcggtggagtaggcgaaggcctcagcctggttgcgggtctcggcatcttccttgcgctgcttatcctcagcctcgtgagcctcggcttccttgaccatgcggtcgatctcgtccttcggcaggccggaaccaccggtgatggtcatggactgctccttgccggtgcccttgtccttagcggacacgtgcacgatgccgttggcgtcgatgtcgaaggtgacctcgatctgcgggacgccacgcggagccggagcgatgccggtcagctcgaaggtgcccagcggcttgttgtcgcgagcgaactcacgttcaccctggtagacctgaatcagcacggacggctggttgtcttcagcggtggagaagacctcggagcgcttggtcgggatggcggtgttgcgatcgatgagcttggtcatgatgccacccttggtctcgataccgagggacagaggggtcacgtcgataagcaggacgtccttacggtcgcccttgatgacgccggactgcacggcggcaccgacagccacaacctcatccgggttcacggactggttcgcttccttaccaccggtgagttccttgaccaggtccttgacggcgggcatacgagtggaaccaccgacgagcaccacgtggtcgatgtcgctcacggagatgccggcgtcgtgcagcacgttgttgaacggcgtgcggcagcggcccagcaggtcggaggtcatttcctcgaagtgcgcgcgggtcagggtctcatccaggtgcaccggggtgccgtcaggagtcatggccaggtactgcatggaaatgctggtggaggtggaggaggagagctccttcttcgcctgctcagcggcttccttcagacgctgcagcgcaatcttgtccttggacaggtcgacgccgtacttgtttttgacttcggagaccagccaatcgatgatcttctgatcccagtcatcgccaccgaggtggttgtcgccgttggtggcctggacctggatggtggagaagccgtcgtcatccttgccgatctccagcagggagacatcgaaggtgccgccgccgaggtcgaagaccaggatgcgctcgtcttccttgcccttctcaaggccgtaggccagagcggctgcggtcggctcgttgatgatacgcaggacgttcaggccggcgatcttgccggcgtccttggtggcctgacgctgggcatcgttgaagtatgccgggcaggtgatgacggcgtcggtgacgggctcgccgaggtatgcctcggcgtccctcttcagcttcatcaggatctgcgcggaaatctcctgcggggtccacttcttgccgtcgatgtcgacggtccagtcggtgcccatgtggcgcttgacggaggagatggtgcggtcaacgttggtcacggcctgacgcttggccacttcgccgacgaggatctcgccggacttggagaaggccaccacggacggcgtggtgcgggcgccttcggcgttgacgatgacggtgggctcgccaccttcgagagtcgcgatgcaggaattggtcgtaccaagatcgatgccaactgcgcgtgccataatgtgtgctccttaatttttcgtttgttcttacgttcttcgcccaagttccgtttggccgtctcttgaaccttccaaaatttgagcctacatcactcaacttccatttggcaagttctattcccaaattccccacaaaaagttgagcgtgtctggctcaagttttttggagaggcgattgagggtgatggattggtgcgtttgaggccaaacccgcctatgcagaaaactgcaaggggtgactgggacagggcggaacggctactgtatggagtcatgtcggacgcgactcaatcagtacatgaaccaccagcggctttccgcataggcattctggataacgacgcctgcgcgctggattgcatcgctcggctggtgtcttcgacccctatccatggccgcatcgttgatgtatggagcactacttctccggcggtggcgattatggaatgtcagtccgtcagccaccataccgacgtactgctcatcgacatggcacttgacggcgttaccgggccacagattgctaccgaaatccaccggcgagcgcccggcattgcgctgatcgggctcacgtcataccgtcttgagacgtaccggcaggccgctgcagatgccggaatcgtcacgctgctggacaaggcgaatctcaccgaaacgcttgcaccggccttacgagaggcggcccaccacgccgagtcgccgcgtcaatcgagctccacagcgtctttgccatctgactcgccatcggcctcgtcatcagacctatcatcggcagtacccgatccagatacgcctgcactaagcgacatcgaacgcaatatcatcgccctgagcatggagttcctcagcaccaagcaaatcggcgcgcgtatgggcatcacggccaatacagtgtcgtcgcacaggcgcaatatcaagcgcaaactgcacgtcggcacatggctggaggcgttggagtattgccggcgcaatcatctgttgtcgccagatgcaggagagcgcgatgttctgtagccgtgttccccacccgtatctgtcgtgcgtggcggcggcgttcgcactgctcaaccttgcggaggggctgtatatattgcatatcgcaggagtcaccgcactgggattggccttgtttgcattgcgcacagcgttggcgctctggttcaccgcgcgccccgagcaaggcgcttatgggctgctcgcgctactggccgccgaaatgtttgcgccgatttccacgccgtttacgtcgtatattctggcgcttgtagccatcgcttcaatcagctacttccgtgcaatagccggcatggtctgcggcacattatttgcattgtgcgctattggctacggtgttattgcaccgtatggtgtgatgggacaaggcggttcgctgaccttttctggcctggatattgccgcgatttgcatcggcatctgcatacgttcagcggcgcacaacagccttaacgagcatgaacggcgcgcacggcagcgcaatgttcgcattgcgcgagacttgcacgaccacaccaccaacgacatcaccgacatgatgctgctgattgaccggtaccgcttagcgcctggctcagtatcggccgctgagctaaaggccctacgcacgattgccgatgatgcgctgcagcacacccgacaggccatcgccacgcttgaggaagaaccgccgcaagttccaaagtcggctcttgacgtgactgtggcatctcggcgacacctatctgacgacatcgcgaagcatcgcgctcgattgcagcgtatgggttacgccggtgacgtcatcatcaccggagctatcgatacgctgaacaactcagttacagtgtttattgccgattttcttcgggaattgttcggcaatatcgccaagtatgccgactcaacgcagcgctacgtaatgctgattgccgtttctcaggaccgcgtcaccattgacataacggatcatccacgccaagacggagtatccctcgaagggaggcattccggactcgcatattatcgggaacgcgtgcagaacatgcacggagattggaacgtgcgggaagaacgcggacagtgggtactgcacgcttcagtgccggtcaataccattggctaatcaataacgccggctaaccgataccgcaccaccagcggaaatacggcgggcacaccgtgttgccggcctgcaactgctccccatacgacaacggcgacacctctgtcagtccatcgtcaaacgtgacgctcacatagccttggcgcagccgctccgtcaactgttcctcggtctggacacccaacgaacgagatacacgggtgttaccaaccaagacatagcccgcaacggcatcagtgctccaataatctgcggtccactgtggcagcatcccaagcaacagaaatgcaaccagcactactgtctcgcatacgccaaacgtcttcttcaccgagcctccaataacaaacgagcctgacgatagaatcgtcaagctcatcataggacagcaatatttgctagtaaatcgtcacctgcgtaatagaagctgcagtgttccagttacctatcgtatacggccccagtacaccggtagagtatgtggagccaccgagacttacgcggaatcgggtgaaccatttcccgttgtcgcttttcttcacaccgctccatgctcctgcacgcacaccagaaccgtagaatccacgattggagccgttcacgaacgtcaagcacacatcgttcgaccgacaaggaactctcgtactattacgcggctgaatagtctattcattgtttagtggctcaacctcaattggttgggcatattgattaaaggtcacgctcacatagccttggcgcagccgctccgtcaactgttcttcggtctggacacccaacgaacgagatacacgggtgttaccaatcaagacgtagccagcggtatctgtttcatcggcgttggctgtcattggattcaccagcatagacgcaattatggcgatgacaactatgaaacttcgtatttgccgtcccactgtatgcataggagacccctttcatcgtgtatgggtgacgatactttcggcacccatactgaaggtatcgtctatgcaacaggtgcagccaatcattacagaaaactgcaatcgacacagcaaaatggccgcactccgcatcgatgtgcggaatgcggccaactcacggcagcagacgagcagactattcacagccgcccgctgactgctctcgagactcagcgacgttcgcgagcgaacttgatggtcagaccagcggcaatcagagcaatcgccatcatcactacaccaagcacagcggtaccggttttgccgatgccctcgttcttcttatcctgctggacctggccctcagcgacaacaccatcaggggtcttgtcgccagagccctgagccggtccctggaaatcgagaggcacagtcttgccagactggcgaccggtaacggtcagcgtgtagctgccaccctcagctaccttatccagcgcaatagcggtggtttcaccggtggcaaccctcacgccggaaacaggcgtggaggaattagacgcatcaagcaccttgccggactggtccttcagctcgtaggagaccaccgcgtcaccattaaaaccggtgaggtcggcgacaaacttgccgttctcattcttcaccgcaaccttagcgtccgaagacagcgcctgctgatcggcggtttcagatgcgaggcccagcgcgtgggcaatggtgaagaagttatcggtctgatcggtcaaaccatcaacgcgggatgcgccggggccggaagccgcaatgcgcagctgggtgcccgtgtggctcatgttgccctgagccttgctcgaatccgccgtgccttcggtgtcattgccatcggagtacaggttgctcgcagacgtgccgtaggagaccaccatattgctgccgtccttggtcttgagcacggtgctcagcgcgtaagccggctgggattccacaatctggctggtgtgagcatggtcagcggtcacgatgaccagcgtgtcattcaggttaatcttctcgagtgcagcggagatagccttgtcgaggtcatcggtctcgccaatctgaccgcaagcgttaccgttgtggtcctgcttgtcgatggacgcaccctcaacctgcaagaagaaaccgttctggctcttcgggttggcctgaagcagatccagtgccttcgaagtcatgtcggccaaagaagccgaattgccggcagcggtcttgttgcccaaccactttgcattggtagtgcactccaccgggttctcatccttggcgggatcccgcttggtcgcaacggacgggttgtactgcgtcggcaggttgccatcacccagcagagccagcaccggctggttctcctggtaccgcaacgcggagaaagcgtccacatcgttctcgacggtctggaagccgcgttccttggcctgctcccacagggtcttgcccgcataatcgccaccctgtgcggtctgccggaagtacttggagccaccgccgatggtcacatcagcgcgggtgtcgagcagctgctcggagatggagccgatgccgccgttctccttgagctgttcggcgcggcactgcttatccgcgttattggacgagccgtcggtcttgccctgcggtccgtagcacgagcgctcggtagaatgcgactcgagcaccgctggcgtggcatcctgaatttcagaagtagtcacgttaccggtggcaagacccttggccttggcgagctcgataaggttcagctgaggattgccgttgatgtcgatgtcgaccgcgttgttgtaggtcttggtgccggtagcccaagcggagccagaagccgaggagtcggtcacgggagtgacgacgccagcgttctcgttaattccgcctgccttcggatacttgccatcgctggagctggagcccaacgagaaagtggtgtactggccggtgccggcttccgcagtgttcagattcggctggccaatcctgtcaaggccatcgaacgaaccattggcaccatgcaggtaattacgggcaaccgtgatttcagaatcacccatgccgtcgccgatgaagagaataacgtttttcgccgtggcgttaccgtacacacccgcaatgcgctgggcgccaccgtgctgggacaatgcgtcaacacccttgccgtcctgcgcaagggccataccggggagcgccgccaccatggcaagcgcagcaactgccgcaccgactgccttcaactgattcttcactattcttcctttcgcttcaggaacaatcgatgaggccttcgaggccgaatccttcacgcgagtgcaggattccgatcgcctttacgatatggccgcaaaacatttgacagcagtaatccagcgaacgcgcaaaggaacttcagatgaacaataaacaaatcggcaagcccagcctacaggagaactactggacgtgccgacgccgaaggcaatgtcttcatcagagagcacgttgcacttgacgccgctaggctgctcggcctcggcgagccggccgtgggcgacgggcagctgacgctctccccgcagtcgttcgccgtgctcggataacccgctaattgcccaactcaccgaatgtattgcaatcgttgtcaatatgagttacggtaaagatagaacagctcgaacattggtctgtcagattgccggaacctcaacgcagagcggccctcgaacagcaatgcaaacgactagcagtacccgatttgcaagcaaggagtcatcatgactgacgcgcacggcaacgacgcagcgaccagcaccggcaccatcgcagacaccaccaacgacgccgcttccggtgccccgcagcgcgcggaaagcgcggaacgactcgcccgtccgctggtcaagctggccaaagcatgcgggctttccacctcgttcatcgaccagctcggcacctacaccgaaatcagcgacgaggccttggtcgccgtgctcaaggccctcgatgtggacgcctccagcgacgaggccataaaacgttccatgacccaacttgaggtggaaaacagcaaacgtttgctcccctccaccatcgtcgccaccaccggcaaaccgaccggcatcaccctgaactgttcgtcggacgcggacatcaccgtctccatcgaactggaggacggcaccgcgtttggccactttgccctgctgccgaacctcaattccggcaagccggacttgaccatcgcccccgatctgccgatgggctaccacacactgaccgtcacggtggacgggcgcgagggcaaggcggccatcatcgccgcccccgcgcgcattcccgtgccggaggcggtcgccgagcaccagcggtggggctggatgacgcagatgtattccgtgcggtctcgcgaatcgtggggcatcggcgattacggcgatctgaagctgctgctggcggacgcggccgacaagtccaaggccgacttcatgctcatcaacccgattcacgccggcgcgccgattccgccgcttgagccatcgccgtatctaccggaatcgcgccgattcctcaacgtgacgtacatccgcccgcaggacatccccgaatacggcacgctgccggccgatatccgagcgcaggtggatgcgctgcatgattcggtggccgcgcgcaacgacgaatcgaccccgatggacatcaacgcggcgtgggcggccaaacgcccggcgctgcgcctgatcttcgacgcgggccgcaacaacaagcgcgagctcgaattcgagtatttcaagaccaccgccggcccagacctcgattccttcgccacctggtgcctgtgcttcgaggtatggggcgcgccgtggggcgagaaccgttggttcttcgagaagaccatcgacgacccggccgtgcgccagctcgtcgaggagcaccacgacctgttcgagttcaaccgctggctgcagtggattgccgccgagcaggtgaacgccgcgcagcaggaggcgctggaccacggcatgacactgggtctgatgcaagacatggccgtgggcgtgcacgggctcggcgcggatgcctgggccaatccggaacgcttcgcctccggcggcgtcacggtcggctgcccgccggacttctataaccagcagggccaggattggggccaaccgccgttcagcccacgctatctggaggccaccggctaccaggtgtaccgcgagatggtgcattcgatgtacgagcacgcgggcgcggtgcgcatcgaccatgtgctgggcctgttccgcctgtggtggattccgcaggggctcggc

SEQ ID NO: 2936 - DNA, 9087 bp, Unknown
  R19_24m  MAG No. k141_4136
cagcggtttccgcattggccagggacaggccgtggctgccttcggggaacaggtgtgcttcgatgctcacgccggcggcccggcaggcctggatgagcattagcgtattctccacgggctcggcttcgcggtcggaggtcatggcgtagccgccaccaggcaaaatcaggatggccgggcgtatgcggtccggttccatctcctcgctgttgtcggccacatagccaaagaatcgcgcctcgttgccgtcaatgccagcgatggtttgttggattattgcatgccatacatcatacgcgcagagaatagttctcgataagaaccactcaccatatgcggtcttgcccgtatctccaaaccgaataacgcttacagcgaatcgtgaagaacgtatgccgcactaccgttacagagcattcgacagctcgacatataacttaagaatcgtgagaatcaaagcaattcataacctaggaatagtgagttttacggcattatataacttaggaatcgtgatataatagctcataaatccttgaaaatactaggaatatgagcttaacatgtataagagaaaagtatacgaccatctacggcgatggaaagcagcgagcaagggtactactgcgttaatgattgaaggagcccgccgcgtcggcaaaagcaccgtcgccgaggaattcgcgaagaacgaataccgctcatacatccttatcgactggcagaaggctccgcaggcggtacgagactcgttccgcaacaatctggatcatttggacacgctgttcatggacctttccgtctattacggcgtacgcctgcatgagcgtgacaccctctttattttcgacgaagtacagctcttcccctttgcccgcagcgcggttaaacaactcgttgcggatggtcgatatgacttcatggagactggcgccctgatctccattaagaagaatgtcgaaaacatcttgattccctccgaggaagaatcggtgagcatgtttcccatggattttgaggaatttctatgggccagaggagaagaactactcgccgatgcgatacggcaatcttttgcggacaggcgagcaatgtctccgctgctggacaacaaggcggaacgcctgttccgtgaatacatgctggtgggaggtatgccgcaggccgtagagcgttatctgggaacatccgatatgggcaatgtcgatcgagtgaaacgccaaattttgcacctgtacgctcaggacatagagaaatacggcggagattcgaaagaacgggtcaaacgtatcttcgatgaaattccaaggcaactttccaagcatgaaaagaagttcacactgtcgtctttaggcgaaaacgcacgcgaacgtgaatatggcgatgctttcttctggttggatgaatcgttcctgatcaaccgctgcatgaatgccacggatccgcatgtgggcctgcgcctacaccaagaggactccacgatgaaatgctatatgggagacaccggcttgttagtaacgcaagtgtttgccgaccgctcatacacgtcgaatgagttgtaccgcgatatcctgttcggcaagctggaagtgaatgaaggcatgctggtggagaatgtcgttgcgcagcagctccgggcctcaggccatcgcctgttcttctattcccgatattcccgtcaggcgaaggaccgcatggaaattgattttctccttatcggggagtattcaaatgccgccatgaaggccagggtctgccccgtggaggtcaaatcgacaaagagatacaaaacctcatcgctcgataagttcaagaataaattcgacagccgggtcggcatgcaatatgtgctgcatcctagaccaatgcgcgttgaaggagaccgcctatatctgccgttgtatatggcgcattgcttgtgatgattctagaacgtatcgcagagaatgattctcaataagaaaagcgtgaggattacgatgcctcaatcgcacatgcagagcgtcatatcagtgagatcccgccgttgcggaccatgtttgattgtgcggaaaagttcggatgcctcacacttttcttgacgggaattatttactgtgaggcattgcgcaggttggcggccatggcgcggtcgcgcaagcctttggtgagcttgagaccgagggttacggcgatcaggactatcgtgcaggcgatccacagcgttcgaccgccgaagttgctgatggtccagccaccaatcagcggcgccagcgcaatcgataccgaccacactacgttgtagacgccctggtacgtgccgcgtgccgacgcgggtgccatggcggcaaccgtagtggtggcgatagggaatgtgcccagctcacccagcgtccacagcactacggcaagcgcgaatccgccccaggaatgggccgcggcctgcaccgcatagccgatgacggttacggcgaggcccatcaccagcacgcgtgaattgcccatgcgcgagaacagtttcatcgcgggaatctgcagcaggcacaacataccgccattgatggtgagcagcaccgaatactcgcccagccctagaccaaggtccgtcatggcaatgggcaggccggaggtgctttggaagtacacaaggaagtagccgaacatcagcagggagaagccgaggaatggcgtatcagtgagcacgcgccgccaattgcgagacatggagcccttggcactggcagccggtgcggcatccgagtgattcggcccctcgacgccggcgaattccgcatgcgtaacactgcgttcgtcttcatggcgcaccgcacttggcaccgatacagtaatccccaaatgccgcacctcgcggaagaacgcaatcagcaatatcgtgacggctatcatcaccgccgcttcaacgtagaacatcagcgaatacgagatcttgaccagctggttggccacaatcggcccaatcgcgtacccaaaattaatcgcccacgattgcagtacgtacgcacgttgctgacgttcggcgggcaccacatccgcgatatacgcggcgatgaccgggctgggcagtgaggcgaacgcaccatagacaaacagggccgcgcctaaagccacggggtcagtgagcacggaaacgaccagcagggcagccgctgcgccgatttcgccgatgataatcatggattggcggccgaatctgtcggacaaggtaccgccgaacaggcagccgatgattgcgccgaagccgtacatggccacgactgtgcccaccacaccctcatcgaggcgcagcgcggaaaccaaatatatcgacaagaatgaggtcacgaagcgacccatccacagaatcagaatcgccaaccataatccccaatacagcagggacagtccgaatatcatgcgctgcttcttcactctcaataccttaccggctaccgacggcggaatagccgcgttttggcgcggggtgctgggacaatagcacctatggctatcaaaaaaggaccgaccaaggggtcgggtggcaagcatcgcaacaaactgaagggttacggccccactcccaaagccgaggaccgcgtctatcacaaggcgtataaggccaagaaagcggccgaacgtcggcagatggccgacccgcgtctggcagcccgccgtcgagtggacaagttcgcttcggcggatacttcggatctggtgtacggccgtaattccgtgctggaagcactgcgcgtaggcgtaccttcttccacgctgtacatcatgtctcgtattgaacatgacgatcgtactcgcgaaatcgtgaaaatcgctggtatgaacggcctgcacatgctggaggccgatcgtctggagatggatcgtatcgcccgctccggcaaccatcagggcgtgattctgaaggtcgatccgttccagtactcctcgctgaacgagctggccgatcgtgctgagaagaaggccaaggcaatggaggccgcgaattcggcggccgcccgtattgctgcgcgaccgctgttcattgcattggacggcgtgaccgatccgcagaacctgggtgccgtgattcgttcggcggccgcattcggtgccaatggtgtgattctgccggaacgccgttccgcttcagtgaacgccgccgcttggaaggtgtctgccggtgcggccgcgcatatgccggtggcgcgcgtggtgaacctgactaaggcacttgagggcttgaaggagcgtggatactacgttgtcggccttgacggtggcggcgataagctcgtcggcgagactggctttgaatccgatccgctcgttgtagtgctcggttcggaaggcagcggtttgggccgactggtgcgcgaaacctgcgacgcgattgccggcatcccgatcagctcgtctgttgagtcgctgaacgcttcagtggcggcgggtatcagcctgtacgcagtgtccaacgcacggcgcaaggctgcggcggagtgattgtcgcttgaggccgtaataggttgtacacacaaagaagcccctctatttgaggggcttctttgtgtgatgggctcacctacagacagtccaccggattgtccgcttaatgactccacactgccgcatccggatcgtcatcggggttgtagccgtcgtcgtccgggtcgctgtaggtggattcgtcgtcaatgacgccggaatcggcctcttcgttaagttcggcgagtgccttggaatcaaggttgtagctcggcagaacgttgtcgatgtagctggtcacggcctcgcccatcggcacgtcgtggccggccttctccgccaggaaccagcgatggtcaagcacctcatggaagaactgagcaggctcgatctgggagcgatattcgcgcggaatcatacgcacggtcggctcgaacacctcgcgcatccaatcggtggccacgatttccagatcctcgccctcacgccacgtggaggcacggtaggcgtcaaggtcgttgagcagacgacgggcctggttctcctgcacgtcaaggccggtgaggcgcagcagcttgcggttggcgtagccggcgtccaccacgcgcgggcggaccagcacacgcttgccgtcctcggcggtcttcatttccagctcgtccacgtcgaagcccagctcgttgagcttgttgacgcgctgctcgatcttccacatttcgtccgggttgaacttgtcggtgtcggtcagagcgctccacagcgagtggtagcggtcgactaggcggttgcccacctcgatctcatccacgtcgccgggcagtagcttgccggacgccaaatccataagttcgccgatgatgttggtgcgggccaagtcgatatcgtattcgcgctggccgtcggtgagctggacttgcaggtcaccggtctcggcgtccaccaggaaggcggagaaagcgtcggcgtcgcgcaggaacaggacgttcgacagggacacatcgccccagtagaagccggccaggtgcaggcgcaccagcagcacggcgagggcgtcgatcagtcgttcggcggtgtccgggcgcaggttgcgggcgaacagcgcacggtacggcagtgagaacttcaagtgccgggtgaccagaatcgcctccagcggctccccttcacgggtgtgacggccggtgaccacggcgatcggggtcacagttggcagttcgagcttctgcagtcgacgcaggatctcgtactctcgctcggccacctggcgcgtgatctccttcatggcgtacacctcgtcgcccacgtgcacgaatcgcacgacgtgacgggagatgcctcgcggcaggttggccagcaggtcctcaggccaggtggccaagggcttgtgccagggcagcgtgaacatctttgggttcgagctggcggcggtgattttcagtgcttgcggttccgctgaatcggcgtgttcgtcttcggctttgacagacgtggccttcagcgcacgcggatccatctggggcaattcgttcaactccatgtgttcgattttacgtgtcgttcgcgatgtgtgctccttggccacgacttcggcgcgttatgtttacgggaaaacaccgtttggtctctccctcagaccgtctagaaggcaaaaagaaaagccccgcagctatgcagggcctttccaacgaggccataagagaggaagagaataacctcgtttaatggttgacgaagcgattagacctcgccaagtatctattagttcagacgcagctcagtcgacggagcgaacaggtgcatcttggccgggtcgatcttgatcttgacggtcgcgccaaccttcggcagcgcacgcggattcacacgaatcgtggtgagcttgttctggtcggacatgacctgggaggcctcagcggcggagccatcggtgacgatgttgccgtagatgtagccatcggagcccagatcctcgacgttcacaaccttcagggagaaggcgttcgggtcgtcagccggggccaggccagcgtcctcaggacggaagccgaccacgatctggccgttgtcttcggcggtgagcttgttgacggcctcagccggcaggtccacggtgtcctcaccgatcttcgccttgccgttgaccaccgggtgggtgttcaggttcatcgacggggagccgatgaagccggcgacgaagacgttggccggacgatcatacagctcggtcggagcaccgacctgctgcaggataccgagcttgatgacggcgatgcgatcgcccatcgtcagagcctcggtctgatcgtgggtcacgtacagggtggtgacacccagctggcgctgcagagcagcaatctgggtacgggtctggacacggagcttggcgtccaagttggacagcggctcatccatgaggaagaccttcggctcacggacgattgcacgacccatggccacacgctgacgctgaccaccggacagagccttcggcttacgatcgaggtactcggtcaggtcgaggatctcagcggccttctcgacgcgcttgcggatctcttccttcggagtgccggcgatcttcagagcgaagcccatattgtcggccacggtcatgtgcgggtacagggcgtagttctggaacaccattgcgatgtcgcggtccttcggctgcatcgtggtgacatccttgccaccaatgaggatgcggcccttgttgacctcttccaggccggcgagcatacgaagggtcgtagacttaccgcagccagaggggccgacgaggacgaggaactcgccatccttgatatcaagattcagatcatccacggagggcttatcgttgcccgggtagatacgagtgacgtggtcgaaaacgacttctgccataattactaatcctttcagaggcaggtacgtgcctcacgatccgttgtaaagggatttgttctttactgcgcttccgccctcgccaccgacgtacaactttgctttcggaaactgcaagcttcagcgtttacttttttccggttcagtgaaggttctcttcgttgagccgagaactactatacacggaccgtggaccaaggcaagtggcgtgtctgaaaatgtagttaactttatgggcgtttctgggggtgttgtgtggttcggcccatgacacacctgtttctcgaacgtgcgaaccggcacgcccggcgtagagcaggcctgctcttcccgaactgacggattccatcagtcgccgactaatgcaacacagactcgaaggtgacgccgttgcgggcggctttgcgctcggccttgcgctcctcggcgttttcgatgcgctggatgcgcagctggcgccagtcctcgcgcatgtcgcggaaacggtcggccagcgttacgtcatcgttctcggcatcgtcatcagtaccgctgccatcggccttaccgaacgtgccatcggccaccttggtgatgcccagcttgagcagtccgagcaactcacgcaacgtttccggtacgggctcatcgccctcatcggcggactgggtcaggccctcgatgcgacgacgaagcgcgtcggcgtcctcgggatcgatcttgagtccggcgatcagcgactggcgcatggtctcgtaatcgaggttggcaaagaaattcagctgttgcagcgtcatgaagcccttgagctcggggaatcggtggacgatgtattcctcgcggtcgtcggcggcgcgggtccagtcgcgggtgagctgcggatcccagttggcggtaatcgatccctcgcgcatgcggtagtggtacagcgccttgggcagacggaccacgcgcgtggcctcgccgatcacgttgcagatacgggagagatcctcgattttgcgccccaccgggaaggagaatccggtgccctgataggtggaggcgggtgccaggaaggcccagaaatagccgtcaatctcagccttgacttgctttttgatggcctcgaccggggtcaggatctgcacctcggtgaagtcgttgtggcgatagttggacagcagcggcttgttgttctcggagatggtgtcgaactggaacatcacgaggtcggcgtcatactcgcgcatggcgttcaggcagtcctccaccaacgtgggggccacggtgtcgtcggaatcggcgaagtatatgtacgcaccggtggccccggcgatgccggtgttgcgggcgtcggacaggccgccgttgggcttgtgaatcacgcgtatgcgcgggtcgcgggcggcccaggcgtcgcacatggccgggcaattgtcgggcgagccgtcgtcgaccagcagaatctcgaggttgcgataggtctgcgcaaccacagacttcacgcattcatcaaggaatttctcgaccttatataccgggatgatgatgctgaccaacggctcctgttccatgcctccagcgtagcgccgtcgtgcgaacgcggcggcgctacgggttcgcggaccgcgaaacccttagaaatcccagtcgtcgtcatcggtttcttcggctttgcccatcacgtaggaggagccggagccggagaagaagtcgtggttttcgtcggcgttcgggctcagggcggccaggatcgcggggttcacatcgcaaatctcagccggg

SEQ ID NO: 2937 - DNA, 10497 bp, Unknown
  R19_24m  MAG No. k141_4181
acaaaccaatatatcagcaccccggtggcgatcaagaagacaggttccagaaaaagaaaaagggcctgggcatgttgcccaggcctcggttcgcggacagggcgagattcgaactcgcggagggttgcccctcaacggttttcaagaccgtctctttaggccgctcagacacctgtcctgatgcgcgttcacacgcgcaagtattcattatacagaagggagggatgttgatatcggcagtgcggtcggtcttggattcgcctgctggctattagcgatctctccctcagtcagctacgctgacagctcccccattaaagggagctaaagcacgatgagactcaggcctcccacttagtgggctcgatgacttccttgccgcccatgtaggcgcgcatggcctgcggaatctcgatggagccgtccttctgctggtggttctccatgatggcgaccagccaacgggtggtggccagcgtgccgttgagcgtggagaccggacgggtgccgccatcttccatacgctcgcggatgttcagacggcgagcctggtactcggtgcagttcgaggtggaggtgagctcgcggtagcggccctgggtcgggacccaggcctcgcagtcgaacttgcgggcggcggaggagccgaggtcgccggctgcggtgtcgatgatgcggtagggcacttcgaccttggcgagcatctcctgctccatggccagcaggtgctcgtgctccttgtaggagtcctcctgcttggcgtagacgaacatctccaccttgtcgaactggtggacgcggatgatgccggaagtgtccttgcctgcggcgccggcctcgcggcggtagcaggaggaccaaccgcagtagcgcagcgggccgttgccgaggtcgaggatctcgttctcgtgcatgccggcgagcgccacttcggaagtgccgaccaggtactggtcgtcgggctcgcgcagacggtagatctcgtcggcgtgggagttcaggaagccggtgccgcgcatgacctcggggcgcaccagcgtcggggtgatggccagcgtgaagccgtgctcctcggcctggtccacggccatggtgagcatggcgatctgcatacgggccacctggccacgcaggaagtagaagcgggagccgccgaccttgacgccgcggcgcatgtcgatgccggccacgccggtgccgagggtcaggtggtccttgggctcgaagccttcggccgcgaagtcgcgaatctggccgaccttcttgacgaccacgtagtcgtcctcgccgccttcgggagcttcgggctccacgatgttggagagcttccacatggcggtggtgtattcctcggcggcggaatcggccttggacttgtattcggagaccttctgggacagttccttggtctcggcgatgagcttggccttctcgtccgccggggcggaggcgaccttcttgccgatttccttctgctgggcgcgagcctcttcgaaggccttcagcgcctcacgacgtgcggtgtcggaggagagcacttcgtcgacgagttccacggactcgccgcgcttgcgctgggattccttgacgatatcggtgtgttcacggatgaattgaatatcaagcatgggcaccagactagccgcgtaagcagacaccgacaatggccgaatgcgcgggagtcacgcggaaatcacagggaagcccgggaaagtccgcggacgggtccacccggccaatttcgtcagatgagacgcgattgaaccataatcgcgccccacggggctgttgcgtgcaggaaatgttcacgtacggcgcaccatggccgcaaacgacctccccaccgataacaataggagccatgcctcagcctgccctcaccgtgtttctgatcatcgccgcaatcgccattgtggtggtgctcatcgccgtcatcgtcatcgccctgcgcgcgcagcgccgccgcaagctggctcagacgctggagaagcgccgggacgacgaggtgcagtacgccttcatcgtgaatccgtccaaaccgcaggccgaagcccgccggctgcatatccagaggttctgcgaggccaaggggctcaatcgcatccgcttctacgacacccagcttgacaaggacggcagggtctgcgcgcttgaggcgctggaggacggcgccgacgtggtgatcgcggtcggcggcgacggcacggtgcgcacggtggcgagcgccgtctccggcaccggccatgcgctgggcatcatccccatcggcaccggcaacctgtttgcccgcaatatgggcgttcccgtggacgatatcgacgccgcgctgaccgtggccacctcccacggctcccgcctggtggacatgggccgtctcaccctgctcgaccacccggaggacgaccacggccacgccttcctcatcatcgccggcatcggcttcgatgcggccatgatcgacgacaccaaccccgagctcaaggcgaacatcagctggctcgcctacttcgtgggcggcgtgaagaacctgttcgcgccgaagttccgcggcacgctgacagtcaccagcgccgacggctcgacccacaccatcaagaatctcgacttccgcacggtgatggccggcaactgcggccagattcccatgttctcgctgatgccggcggcatcctatgacgatggtctgctggacttcgaaatcatcgacaccaccggcggcatcctcggctgggccaatctgttcggcgacgtggtgcaccagacgatcatcggcaagcccgaacagaacccgctgtccacgaactcgaccatcgaacaggtccagggtgtcagtgccgaaatcacattggaaaagccggccaaagcgcaggtggacggtgacatgctgccggaaacccgccacatccgtttctcggtggatcaccgcgcgctgatcgtgcgcgtgcccgacgcctccgcgctggaaaagaccgcgcaggccgctgcttcaaatgccacctcgaatttcgccgaaatgaccggtacactcgagccgattcgctgattcgccaatccgctaatccgttactacgatgcgtggccggtgactcgggcgacatgcatcgccaaataagcgatttcgtcgtcgctgatatccgtgtcgaggcgcagttcgagcagggaggcgatggttcgcgcgcatcgcagcgcagcggggtaggactcacgaatcaccttcatcaccggtgccggctcgtccgtcagttgctggtgctggtggatgcgtacgaacaggtagcgcaggtgggtgatgaaccggcccacgttcacggaactgcggtccaacgtgatgccgtagctgtggtcgatgatgtcaagcagttgctggatcacgcccgtcatcgtgtacgtataggacaggtcgccggtggcgaagccggcgttgaccagatgcatggcaagcgcggtggcctcgccgtccggcagcgtgacgtcgagccgtgcattgagcgatgcgagcatcgcacgcccctgcgcgtattcctgcgggtacaggttgctcacctcgccgagcagcgggtaggtgatgtcgatgccgcgccgcacccgctccaccgcattcgccacgtggtccgacagggccatgaccagcgtggtgctgccggtctcgcgctcccccagtccggtctcctgcatggattcgacgaccacgcggatgatttcgggcggaatgtccgccagcatctgcgccagatggtcagggtcgcgcccgtccgatggcacgaaggtgcgcacaactttcgactcgtcgaccgtctgccccggcttggcctggaaccccagtccgcggccggtgagaatcacctcaccgccgtcgccgcctttggcgagcacgacgttgttgttgaacactcgcagtatttccatggcatcctttcgcaacgtcattgttccacatcgatgatcgggctgccggctgatacggttttgcagtcgccgccgttgtcgtcgctgctaccgtcgccgatcaacggcgtgaccacggtcagttcagcggcgttgaccaccgtcaccaccaccacaacgctgtgcccggccgccgcgactttgccgaaatccacggtggccagtggctctcccgccgcgatccgctcgcctttgcccacggccacgacgaatccctcgccatccatattgacggtgtcaatgccgacatgaaccagcacttcgatgccgtcatcggttttaatgccgaaggcatggccggtccgggccacggttttcagcgtgccactgaccggtgccagcacggccgtctcgccggccgtctccggcacgacgcctacaccctcccccagcgcgcgggaggcgaacaccggatcgccagtcgcttccagattcatcaaccggccggcgaccggcgacaggatggcgttggagtcaggagtccgatcggaggcaggccgcgatggggaatcttccgcagactccgcatccgacgatgtcgcgccaatccctctcaccgcatcctgcgagcgtacgttctcgcccgccgagaccatctgcgcctccgtggcgcgcggcggcgtacggtacccgaacagcaccgtcagcaccatcgccattacaaacgcaacggcgatggacagcgcgtacacccacattcggtcaaacaccggaatcgtcagcaacgaggagaaggcgaacgccgtggtcgtgacgccccggaccatctgaccggatggcagcacggacgggaacagccagccaagcaccgcgctggtcacgccgccggccgcgcagccggcgagcagccagcggtagacgcggcggtgatgcagatggatgccgtacaggctcagttccgaaacgccactcagcaatcccgcgagcaacgcccccaccgcggtctgccgcatggccgaatccttgccgcgtacggccagcacgagcacgccagcggtggcaccgaagcaggcaaagttccatacacccatcggaccttggacgaaatcgtagccgagcacctgaatgttcatcagcatcagggcattcaacggccagtgcagaccgagcggcacgagaaacgggtagagcatcgggatgatgagcgcgaataggaacggcacgtgcgcgttaagccatgctgtggccgctcccagcccaccgccgagccatattcccagaggcccgatgaccagtatggtgagcgcaaaaacgacgaccagtgagaggaatggcacgaacaccagctgtacgctgtcgggaatgacgcgcttcaacccgtggtagaccacggcgagcacggcagccatgagcaacggcacgaagacgttgccgccgtagtcgttgagttgaatcggtatgccgaacgccgacacggtgcaggtttcggcgccgaatacggcgttggccgagcattgaatcgccccggagagggcgctggatacggacgtcccggacattccggacattccggacatcacgccagtaaactgcggggtcatcagcgcggccataatcgcgccgccgagccaggggtcgacgtccagtttcttggccgcattgtaggcgatcataatcggcagaacggtgaacacaccctcccaaatcgccttgagtagtatccagccggcggaggtctcgccgtcaggcacgatgccgagtgcaacgatcacgttgacgatggcgatgaccagcgaggcaccgagcagtacacccagaatcgggcggaacgagtcagacaggtagtcgaaaaacgcggcagcccaagcgcgggcggcactgccccactcgcggacggtacgaggcgtgaagtgacgggatgtattggatgggccgcaactttgttcggcgtcggtggcagtatcgcgcgatggtgcggcatcgtcggaaaggtacggcgcggactgcgcgggttgcgtgggctgtgtggattgcgctgactgcgcgggctgcgctggctgagtgggctgcattgactgagtgggttgcgttgactgagtgggttgcgttgactgcgacgctgactgcatcactgccgatggcaattgcgctgccggcatcaatcgcgccgtccgcagccgaacgatctgctcgtacaccgaggcgaccgctccgccgatgatgacctgataacgattgccggctcgcgggaatgcaccgaggactccggggatggattcaagaccgtgctggttgacatggccggcatcggccagttcgaagtgcagtcgcgtggcgcaatgggtcaggctggtaatgttcgcggggccgccgacggcatcgacgatgcgcgccgcaatcactgcaggcgttgcgttcgatgcgttcgccacggttcctccttgctgccgtatgccactgtgttccattatcggctctgggtgccccaaaagcacggcaatgccgacaaagcatcgcgaaacggcaactatgcgctacggtgctccgcgatggtgtcccgccataatgttccgcgatgatgcttcgccacacccgttctccgtatttgccgcagcgcccattccgacatcattccaccatgcagaatcctgcaatcgttgtcaaaaatcatcgttttttgctgcctattcggagtgtcgcgactgcggaagtcgtattctatctttcacacacgttgcgtagcagggttgttactcaaaacgaggcaagacctggagcgatgtggaatttgcgtatcgtaatatgcgaattccacgttgttccaggtctttttttgttttcgggcgacttcagacaatcgaagcctgaccttgcacgcggcagaggggccacgcaacaggcgcggtccgtcaacggcgaaaggacaaggcaatgacgacgacaacggcatcacccgtatcgaaacagacggcatccgcggcgcaggaaaccagcgcaaccggtgcggcggccaccgcaatcgaaaccatcgaaaccggcgtggccggagtggcgggcgcggccacaaacgcggcagccaacgcaatcgaggacctcgaagccgccgaatcgcacggcttctccacgcgcttcccgctcaacagcgcattcatcttcaccttcggcgcgctcggcggcatgctgttcggtttcgacaccggcatcatctccggcgcctccccgcttatcgaatcggacttcggcctgagcgtctctcagaccggcttcatcacctcctcggtgctgatcggctcgtgcgcaggcgcgctgtcgatcggcgcactgtctgaccggttcggccgcaagaagctgctcatcgtctccgcgctgctgttcctgctcggctcaggcctgtgcgcctcctccaccggattcgcgatgatggtgtgcgcccgcatcatcctgggtctcgccgtcggcgcggcctccgccctgaccccggcgtacttggccgaactggcgccgaaggagcgtcgcggctcactgtccacgctgttccagctcatggtcaccttcggcattctgctggcctacgcctccaacctcggattcctgaaccacaacctcttcggcatccgcgactggcgctggatgctcggttcggcgctggtgccggccgccttgttgctgctcggcggcctgttgctgcccgaatccccgcgttatctggtgaacaagggcgacacccgcaacgccttcaaagtgcttacgctgattcgcaaggacgtggatcagacccaggtgcagattgagctggacgaaatcaaggccgtggccgcacaggacaccaagggtggtgtgcgcgaactgttccgtatcgctcgtccggcgctggtggccgccatcggtatcatgctgttccagcagctcgtgggcatcaactcggtgatctacttcctgccgcaggtgttcatcaagggcttcggcttccctgaaggcgacgcgatctgggtgtcggtgggcatcggcgtggtgaacttcgtgagcaccatcgtggccacgcttatcatggatcgtttcccgcgcaagggcatgctgatcttcggttccatcgtgatgaccgtttcgctcgcggtgctcgccgtgatgaacttcgtgggcgacgtggccgtgctggcagtgccgacgatgattctcatcgctttctatatcctcggctttgcggtctcgtggggcccgatcgcctgggtgcttatcggcgagatcttcccgctgagcgtgcgcggcatcggctcatccttcggctcggcggcgaactggctgggcaacttcatcgtctcccagttcttcctcgtgctgctcgatgcgttcggcaacaatgtgggcggcccgttcgcgattttcggcgtgttctcggccctgtccatcccgttcgtgctgcgcttggtgcccgagaccaagggcaagtcgctggaggaaatcgagaaggaaatgaccaagcgctagacaaccggcacacgattcgcacaaaagttgacaactcttaacataagagtacccaaagtggcgaaaaacgtggcagaatagggaacatggtagcaaacaatgcgggtcagcccgccaccccagcagatctgattaatgtcgatgaggttatcggcaagtactatgacctcgtccccgatcccgaagtccccgagcagcgtgtcatcttcggcacctccggtcaccgcggatcgtccctgaagacctcgttcaacgaggcccacatcatcgccatctcccaggccatcgccgaataccgcaagaaggccggcgtcaccggcccgctgtacctcggctccgacacccacgcgctgtccggcccggccaagaagaccgccatcgaggtgctcgtcgccaacggcgtgcacgtgcgcgtcgactcccgtgacgacttcgtgcccaccccggtggtctcccaggccatcctgacccacaaccgtgcggtcgacggcacccagcgcttcgagggcgagggcctcgccgacggcatcgtcgtcacgccgtcccacaacccgcccaccgacggtggctttaagtacgaccccgtcaccggcggcccggccccggccgagaccaccaacgccatcgccgctcgcgccaacgagctgctcggcgacttcaagtccatcaagcgtgtgccctacgaggaggccatcaagtccgagtacgtcgagggcttcgacttccgcgagcactacgtggacgacctggagaacgtcatcgacttcgacgtgatccgcaactccggcgtgcgtctgggcatcgatccgctcggcggcgcttccgtgaactactggccgctcatcaacgagaagtacggcctgaacatcggcgtggtgcgtcctgaggtcgacccgacctggcgcttcatgaccatcgaccacgacggcaagattcgcatggacccgtcttccccgtacgccatgaagggcctggtcgacgagctcaacgccggcgcctgggacaagtacgatctggtcggcggcaccgacccggacgccgaccgtcacggcatcgtctgcccgaactggggcgtgatgaacccgaaccactacatcgccgtgtgcgtggagtacctgttcggcggcaaccgtccgggctggcctgagggcgcagccgtgggcaagacgctggtctcctcttccctgatcgaccgcgtggccgcatcgatcaacgcgaaggtcatcgaagtgccggtgggcttcaagtggttcgtggacccgctgttcagcggcgaagtcgccttcggcggcgaggagagctccggcatgagcttcctgcgcaaggatggccgcgtgtggaccaccgataaggatggtctgatccccgacctgctggccgccgagatcactgccaagaccggcaagaacccggcccagcttcaccaggagcaggtcgagcgcttcggcgagtcttggtacaagcgcgtcgacaccccgaccacactggagcagaaggccaagttcgccaagctgaccggtgatgatgtggccgccacgcagctggctggcgaagacatcaccgccaagctgaccgaggcaccgggcaaccacgccaagatcggcggtctgaaggtcaccaccaaggacaactggttcgccgcccgcccctccggcaccgagaacatctacaaggtgtacgccgagtccttcgtctcccccgaggctctggacaaggtactcgacgaggccaccgtcgtggtcgacaaggccctgagcgagtgaaatcgctgcgttagtcgcgttcaccgcaaccaataaggctctgcattggattcatacaatccactgcagagcttttttagcgcatatgcagttcgcgaccactgaaacacgcaggtcaacggttctcctcatgcaccatgactgcattttctcaacatcactgcagggcaggacggccagatgaccgcgaaacgttcgactacctatattatgaccgagtttcccatcatcattgtggggtcacagcggccagatgaccgccgaagcgttcggtcggcttgcatcatggtcgagttttaacatcgttgtgggacgccacgacgaatttgcccattccagagctgccatcccacaaaagcgtggg

SEQ ID NO: 2938 - DNA, 11782 bp, Unknown
  R19_24m  MAG No. k141_4317
gccgatcagcttgccgagcgtgttgccggggccgaggtccacaatccacagcttggccgggtcggcggcgttgaacagcgccttgacgcgggcattccagtccacatggttgagcagcacttccgcagcgagtgcgcgggtgcgatcctggtcaaagccgcaggcgccggcccaggccacggtctgctcgacggcgtcggccatgagcggagagtggaagggcagggtgacttcaaggtattcgagggtcgggttgaacacggtgccgccgtggagcttctgctcgcgcagcttggcctggtgcttgtgctcgcgctcggcttcgagggcgaaggctgccaggtcttccgggtagccggaaagcacgtggtggttgtcggagttggtgacggcgatggagatcgggcctcgggcgttgttcacgcgcttgaccagagcctcaacctgttcgcgggtggcgcccttgacggagagcatcggactggcttcgccatacttggggttcaggcccagttcgcgcacacggcgggttccggcggcgccgatcagggcggcgacggccagaatctcgtcgagggtcttgccggcggcctcgatggagccggcggcctcgatggcgcgggccatgtgcacggcgagcacgccctgggagtggccgagcacggcgagcggcttggcctgggccacgctgtagccgaggtgttcgaggtcgagcagggcgccgagctgggtcagtgccacgccttccacggacgcggtggcgtcggctgcggcgccgaggcgggccgggttcggagtgaagccgaacaggtcgaccggacggccggtggtggtcagcaggtcggcggcgaccggggtgagcagtcggccggctgcggcgatgtggccgcgcagggcctcgtcaaggctgggatcggtggtctggtctgccagggctaccggccacggggtggactggccggcgaaggcgagcgcatggggctcggtggccaggcgattgaggaagaaggtggtcattgctttccttacttgtgtttggttgatgtcttcagaaatcagaggggctggttgccgtggtgtttggtggtgcgcctgacgcgccgcttggtggcgagcgtagccagcgattcgacgatcacctcacgggtctgttcggggtcgatcatgccgtcgatctgcccgatttccagcgacaggttcgcgttgacggtgctggtctcgtactccttgatgtacttggcccgcagcgcatcgacgtcctgcccggaggctttggccttggccaggtcgtggcggtggatgatgttcaccgcgccggccgcgccgagcaccgcgatctgggaggagggccacgcgaagttcaggtccgcgccgatggctttggagcccatcacgatgtacgcgccgccgaacgccttgcgcaacaccacggtcaccatcggcacctgtgcgttggcgtaggcgtagatcaccttggcgccgcggcggatgatgccggcatgttcctggtcggagccgggcttgtagccgggcacatccacgagggtgaccacgggcaggttgaacgcgtcgcacaggcgtacgaatcgggcgaccttctcggacgagtcgacgtccaggatgccggcgagcacgttcggctggttcgccacgatgccgaccggcttgccgtcgatgcaggcgaagccgacgagcgcggaggcgccgaacagttcctgcacctgcacgaattcgccgtaatcgacgatgcaacgaatcacttcgagcatgtcgtagggctgacgttcgttggcgggcacgatggtggcgagtcgcttggcggtctcgcgttcggcgcgggtgacggcgtaggcgtagaccggcggcttgctttcgctgttggacggcaggtaggcgagcacggtgcgcgcatagtcgatggcgtcggattcgtcctcgccgaggtagtgggccacgccggacacccggttatgcacttcgccgccaccaaggtcggccatggagatggtctcgccggtcgaggccttgaccacgtccggcccggtgacgaacatgttcgagttctcacgggtcatgatgatgaggtccgtcagggccgggcagtagacggcaccgccggcgcaggggccgagaatcaggctcagctggggcacgaagccgctggcctcgcaagtcttgcggaagatgcggccgtactgggtcagagcggccacgccctcctgtatgcgggcgccgccggagtccacgatggccacgatcggcactttgaggtcgatagccatgtccatcagtcggcagatcttctcgccttcggcggtgccgagggtgccgccctttacggagaagtcctgggcgtagacggccactttgcggccgtagacctggccgaagccggtgatgacagctgcaccggcgttgccgccggcgatgttgccgccctggaagcggccgatctcctcgaacgtgccggtgtcgaagagcaggtcgaggcgttcgcgcgcggttttcttgcctttagcgtgctgcttgtcgcgggcgcgctcttcggcggcgcgggccagttcggcggccttgaccacggcggtgcgcagcggctggtgggccgagggctgggcggcgttggcggccgaggccgcagccgcggccttcacggccggcgaatccatgatgtcagtcattgccgccctccttcttggcgtcggcggccttggccttgccggcgttcacgtccagcgtgaccagcgtgtcgccggcctccacgccatcggccgggccaacgaaaatcttcttcacttcgccggcggccggcgcgtacacgtagttctccatcttcatggattcgagcaccaccagaaggtcgcccttggccacttgctggccttcggacacgttgatgcgcgtgaccacggcctgcatcggggaggcgatgacgccggatttggcaccgtcgttggccgtggcggcaccggaggccacgttgtgcaagcctgcgccgcgcaacggctgggtggggcgcttggcaccgcgggcgcgggccgagccggtgatgttctccacgatgtcgagtggcacggtgagcttgacgcggcggttgttcatctcgatgacgaacgtctccgacttggacttgtcgggcgcggccggggcagcggcacccggggcggtggccaaggaggccggctggccggaggcggcggaagccggtgtgcggttcaggtacgtgcgctccagccacttggtggacacggcgaacggatggccatgctcggcggtgaagtcgtcgttgcggaagatctccttgaacagcggaatcggcgtgggcacgccttcgatcacgagctcgtcgagcacgcggcgcacacgggccacggcatcgagacggttctgggcagtgacgatgaccttgcccatcatcgaatcgaacttcggggagatggtgtcgccctgttccacaccggtatcgatgcgcacgccggggccggccggccactggatcttctccaaggtgccggagccgggggtcaggttggtggccgggtcttcgctggtgatgcgcagttcgaagctgtggccgcgcggttcgggggcgcgggtgagctcgccaccggcggcgatattgagctgttcgcgcaccaggtcgaggccgctgacctcttcggagacggtgtgctccacctgcagacgcgggttgacttccaggaagtacactttgccgttcggtgtcaccatgaattcgcaggtcccgaggcccacgtagccgaccgtggtgaacaggcggcgggagtattcctccagcgtgctgacgatttcctcggacaggaagggcgcgggcgcctcttccacgagtttctggttgcggcgctgcagcgagcagtcacgggtggagtacacggtgaagttgccgtgcgagtcgcgcccggactgggtctcgacgtggcgtgccttgtccacgaacttctcgatgaagtattccttcagatcgccgccttgcagcgcgtcgtggttcatgtagaagcggcgcagctcctcgtcgtcatgcaccacggtgatgccgtggccgccaccgccatcagtgcgcttcatcatgatcgggtagccgtgggtgtgtgcgaagtcgagcagcgttcgcacgtcggtcaccggttcggacaggccaggcaccggcggcactttggcgcgcaaggccactcggcgggcggtgatcttgtcgcccaaatccaccagcgcggtgtgatgcggacccacccagatggcaccggcatcctcgaccttctgcgcgaagctcggcacttcggaaaggaatccgtagccggggtgcacggcgtccgcaccggtcttgcgcaggatgtcgatcagcagatcctcgttgaggtacgtgtccttgtaggtgtcgccggagagcaggtatgcctcgtcggccatgtccacatagcggctattgcggtcctgttcggagtagacggccacggtggagatacccatctccttggccgtgcgcaccacgcgcagagcgatctcacctcggttcgcaatcagcagttttttgacagtatgagccatagtgtcaaattgtgctctccatatagaggagagggcaagccgcgttcgcacaaaagctttcacgcccttttgtaggctacgaacaaacgcgcgcgtaggttccggcaacgtaaccgttggcgccggctatcaaaaacgttgcaaatccgccgattgcacatccttgcgcgccggttcaagaagttgacgttacggttgcgttcgtcaacttgtgacaaatcgaaatcgacaattttgtaagttggtacgaaaccgcacgaaatcgaacacctctacgatggcaaccgtaagttcgggggaaggctcatctgcgggcgaacggaaggcgaccggaccggcatcggtccatcgccgcacgattcgcccgcacagggccggattcatttgggaccgtccaccatatggacggttcgggctgtcggggataccgcacggcccgccggaacctcccctcatccatcgcataccgcccgccgttcacggcgatatcacacaacataggggttattgatatgcagacttcacacaccaccgcatccgcagcggccaccacgccgctcgcccgtcgtatcgtcgccgcatcctggaagccggtgctgttcgccgtgctgatgtggctgtccgcggccgccggcgagattccgattccgggcacgccggtgccgatcacgctgcagacgttcgtggtgatgctcgccggtctcatgctgccgtggcgtcaggccggtgccgccgtcgccacctatctggcggccggtgcggtcggcctgccggtgttcgccggcggcacctccacgctggccctggtcggcccgagcgccggcttcctcttcggcttcctgccgggtgtggtggtcatcgccctgctgcgcggcaagtccgacacttcgtccttcgcggccgccgcgcgcaccgcgggccgctacctgctggccgcgctggtcggcggcgtcgtggtggtgtacgccttcggcttcatcatccagtccgcgttgaccggtgcgccgctcgccgccgtggccctggcctccatgggcttcgtcgtcggcgacgccatcaaggccgtggtggcctctctggccgccgccggcctgtccaagctcggtcgctgacctgagctactagctagctactggccggctattacagcactcccacatcggcggtgcggaccgtatggtccgtgccgtcttgtgttctcaggatcagtgaggcgtcttcgttgaggccgatggcttcgccggtcagcgtggtgccgtccgtgaaatgcgcctcgacctgacggccgcgcgcccagcacaccgccttcatttccttgcgcaacgactcggcctggcccttcgggtcggcgatgaacttcgccagtcgttcacggaagccctcgacctgacgttcggccaccgcatcgcgcatctcgccaaacgacggcaagcccgtgacatgcagctgcagcgaagtcgactgcggcgtgggcagccaacaggcacccagcgccagattcaggcctacgccgaacacgatgacgacgtcgtcatcggcatcagcatcagtaccggacgacggcggaatcaccagttccgagagcagcccgcccagcttgagcccgtggcagaacacgtcattcggccatttgagttccagcaagcagtccggctggttcggcgcggcaccgtattcctcgatcatgccgttcagggcgtccagcgtgaccagtccggcgatcatctgcagccagccattgacggattcgtcggtggcgatcgcgcgcggaatgcgcacggcataggacatcgtcgagcaacggccgggctgactgatccacttgtgaccattgcggccacggccggcggtctgccggtcggcggccaccacggccaccgccagttcgccatcctggtggtcgggcagcgtcaacgacccgtcgccgatcatctgcgcggccagcgcgttggtcgaatcggtttcgtccacggcgaccacatgatccgcgacggctgtagttctgggtagctgcggcgttgcagctttcaatgcaatcatcatggacactacgttacctcggttgcgccgttttttgcccgcgatattccacggaaaagcgcacaaaatcaaccattttgggccggacagcccgtgttagcgttcacaacttcggaaattccgcattcgccgagcccacgcatgcacccggccgtcgtattggcttgcgaacaatggcgatgcccggcagacatcgaatatcaaccgttgacctgtgcggctaccatatattgtcatgacgtcaccagccaccgcgaagcttgccgccgtatccagccgccagtcccacccgcatcttgcgcgcgtgggcgctgccgcgcgctggacactggccgtgctggcctgcctgtggcttgcactgtgctcggcggtcggcccgctgtaccgggacgaggagaacggcaccctcgcccattggaactgggccaataccgcaatattcgtcgtgtcgttcctgatatatctcggaatcatcacgctgatggcgcgattcgcagcaggccagcgcatactgccgaagaccatcggcaagcgcctacgccaccatcagcagaatagcgaaacatcacggcccgccgccgatcagcaggccagccaaccagccaagacccgtcgtaccgttcgcgctatcgtcacgtccaccgtcactgttctggaccgctggatcacacgcggcacgaaccggttctggaagcttatgctggtgttttttgtcggctggctctgggtgccgaccactctgctggccgcattcggcgcggacctccgctcacagatccgcgaattcagctgggcctggaaccagtggaccggcctgaaacagccctatatcggcttcttctccttcgtgccgatggacatctaccccaccgcgcactacatgtggccgtccgatcccacgtatctgaccgaccagcacaatgtggtactcactgtgttctatggcgcgatagtcacgtttgcgaggcatctgaccggctcaaacgatgccggcatcgtgacgttggctgccctgcagacgctgttcgccgtgttctgctgcgctgccgccgccaatcgattcctgaaccggccttggataggaaaaacggcaacggattccgccgtccccccacaggccggaggattggccagattcctgattctgctgttcttcatggtctgcccgctggccgtgttttccactatctccatcaccaaatcgccgctgttcgcgttctcgttcgtctggtggttcagcgtctggtatgaactcgtccagacctggcaccccgccggcacccgcaaacatcctcagacccctgccatcgccacgcccgtccacttgccgtgccacagcttcatcgccttcatcctggccacgtcggtgatgctgatttccgcgaaatatgcgtggtacatcatcgctctgcaaatcgtgctggctctgatcgccgaccgcaaacgctgggcgacttacgtcgtggcgctgctcatccccaccgtactgattcacggcggcatctccttcgccatctcctctggtgcgatcatcggcggcgatccaatcgaaagccgcggcgtacagctgcaaatgatcgcccgcgtggctcagcgcaatccggacggtatttcagacgaagccaaaaagaacctcgcgcccgtcttcaatctcgatcagatggccgacgcttactcccagcaggatgccgacccggtgaaatcctccggtattcaggccaagaaggtcagctacaagtggcgcacggtgacgcccgaggatatgaccaatttcaacaaggcatggttcgaaatcgtcaaggacaatccgatcatcgcgttggatgcgctgctgtccaaatgcttcggatacttcaatgtgaacgatcagccgtacgtatcgatggattattacgtgaccagcgattacgtgcagaaaaactccacatggatcaaggattacaaccatgactggcgtgagcgcatcgccggcttcactcgcgtatggggcagcattcccgtactcggctggcccacgcatggcaatttctacgtggtgatgacattgctgatcggcgcggccgaggtgattcgccgacgttggctcaccctcatgacccatattccgctgctactgctgatgggcgtgatgattaccgcgccggccaataatttcgagcggcacatgttgccggttgcgtttgtattcggattcgtggtgctgacgtattggcgagagtctttggctgaaaggcaacgccaatcagcgacgctacactagtgactatgtcagattttctcgaacttctcgctgccgacgttgccgattcgtccggtgcatccggtacgcccagtgcgcccgattcatccggttcgaccgcacccggcatcgccgcgaccaaccgcgtacgcaccgtgctgttcgagtgcctgttcaatcatctggccgacgaacgagtggagtccctgttcaccatcctcggcttcgagcatgactttgattgttacgccatcgccggataccctgcccggtccgccgcacgtacggccaaggaaatcgagaaaatcgtggccgatttcggcggtgtgtgtctgaccgccaagcgcccgatcggcaacagcaccgccgtagtggcgttgattcgtccggtcggtgcggccacgccggaaatcatctgcaataccatcgccccgtcgttcgccgccgatcggccaatcgccttgggtccacagcgcaccggtgccgatggcgcgatgcgttcgattcaggccacgctctactgtcttcaggccgcgccggccctggccgccaccgtgcagccattgccgcgcccgttacgcaccgacgacgccctgcccgaacgtgcgttgatcggcgacgcggacgcccgtgacgaactggtccgcgtggtctacggaagcctgacagcagcaggcccggatgatccgacgctgctcaccgtctccacattcctgaagttcggcggttcgctcgagaccacggccaaggagctcaacgtacatcccaatacgatccgctaccgtttgaagcgcgccgccgaatccaccggctgggatgccaccgacccgcgcgaggcgtacgtgctgatcaccgccatcgcgttgggccgtgtggccgaagcgtaacggaccgcagcgtagtcgggcagaagcataaccagcagaaccgtagccggcaaaggccatagctgaccggacataaccgtccagcccgacagcctagcgggccgaatcaggctgcctgaatttcgcgtacgccatcgcgcagtaacgcggccaaggattcttgagtggctaacacttcgtccacgaatccaccggcggacaggctggcgatcacgcgaccggactcgttgtccacaatcggtacaccgacggcaccgacacccaacgtcacatcctcatccgacagtgcatatccacgttcgcgagtcaagcgaatatcctcgcgcaactgttccacactgaccagcgtgttctcgttatatgccggaaacggcactcctgcaagatagcgttcgacatcggcatcctcgaaatacgccaaggccacgcggccggccgcgccagcatgcagaggcagcacgcggcccgggcgcaggatcagcgaatcgatggcatgaccttgcgcacattccacgcataccaattcagtgccggagaccacactgaggaatgaggtcatgccggtttgcgcggtgatggcatgcatgaccgcaatcgcaggctgccattcggtacgagacgtgcgagcggcatcagccaatcgcagccagtccagtgataatgagtagttaccatccgtatccgttacggcccaccccacatcgaccagtccatccagcacgcggtatacggaggatcgcgggatatcacaggcgtcggcgatatctgccggcgacaggccattctccgccgccaatgcgtccatcacacgactcgccttgtctaaagcgcgggtcggttcacgtttgtcttccgccatcgtcgacgttccttcccctgacttatccctgactcatcatattcaactgttcaggccaagatgatcaccactgtatccaaggcctcgcgacacctcacggccggcagtccgcaccaatcgcaccatgtcttgagccgatgccgttgccggttgcccatctaccagacaggccagctcaggttccaaggagcgggaaaggccactcagggcgattgccgcttgaatctctccggcgtgattgaataccggtacgctgatagtcacggagccggccatggtctggccgacgtcataggtgaagccgcattcgcgtatatgacgagcctgtcccattgctgtggcacgcatcgtggagaatgtgccgccgagctcgttggtataggcatagtgttccaacagctgctcgtagcgagccgggggaagccaggccgtcagtacatgagagggagcgctcatgctcagaggcaagctattgcccaccagctgtgcatagctttgcaatgtctcacgggtgcgtgtctcgatgcacaccgtgcgcaatcgcctccgaacgaacagaccccagatgccgaactggccgtgatgggcgcggaaggtacggcgagcgatctgctgaatgtccagtctgctttcgatttggccgccgatacgtacgcaatcgatgccaagccgatactcgccacgattgatgccccgttccacccaaccgactgcgacgagattatccagcaaacgatacgttgagcttacgggttcaccagtacgttcgcttatggtttttgcggtgcttggtcccagttccgccaatacatcaagtactgccttggatttcaccaatgcatctacgctacggtcatcacggcttggcgccaccatgcgcgtcacctcctgacctgtttgttgatacctcagacatcttaccgggtattcagcgggttgccgcccaaaacgcactgggccccgacgggatactcctgccggggcccaaggacgcgagatacacccccccccacgcgcaagtgtcctgatatgcgggaagccccggtacctttgaggggtatcggggcttcctgtacgtgtggtgcggcggcgtgctactctcccacaccctgtcgggtgcagtaccatcgccgtgccaggccttagcttccgggttcggaatgggaccgggcgtctctcctgggccatggccgccgc

SEQ ID NO: 2939 - DNA, 18039 bp, Unknown
  R19_24m  MAG No. k141_4351
cctcagctggcacagacagcgtggattgtgtggacaatgccattttcccggctgtctcggaaccccagacggcaatgtcgacggtggtcggcttggtggagggattcgagacgatgagctgctgtgtggtaccggtcgtgccgccggagagcaggaacgactggctgagcgaggtcgatacgcaggatgccgccgatacgcctctcacatcgccgtcatcggcccatgatgcgatggtgccgacggtgccggtgccggatgcggcctgcagcatacgggtattgatcaggcgagctccctgatcaatcttctgagcaccggttttcaccgaggaatcgtcggtcggatcggcgtctttcaaagtcacgtcatctgaactggacttttgcccgatcgccgagacagtggcgctgtagacggagccgaacgccgcatagcgcgcctgcgtactcagattgccgacagtggcctggaaggcgctgtcgccgtacgtgccggtatcggccaatcctacaggtgccgggcagtaggtttcggactgggtcggactaactgtctggtcgatggcattatcggaagcggccaccttgtccacccagatattggggatgggggccatgacgagaacgacgaacagcgcaatcaacaccagcatggtgatcacaccgagcacgatgccgatcgcacgtttgaaaccagaagttgtgttgctcatgcctgctcctccaatccgtaggacggtcgtctgcgaggcatggcgaccaagcagtacaacgccgtgatcacacctaggcatatcagccaggcgtgcctccagacactatgctgtgcacgttgctgccatgaggtatccacctgctgtgaggtgctgctacgcagcgtcagacgatagtagctgccgctatccgtggagaccagggactgggtgccgttcgatgcggcgatattcgcgctcaactgttcatacggcatgtcgttcgaggaatcgccggtctcgggaaccacgtagatgccgccgaatccaagcgcgctgatggccgcgatggcctcttcgtcgggattggacagcagcgaggcacaggcctgggccagttgttcgtcaaccgcatcatgcttgccggacaacaggcgcgcccgctggaccggggaactgtcgatcagatcgccgcgcggggtgcgcatcaccgcatagttgacgatgttgcgggtctccgcgctcacggcaagcacacgatgatcggcactggcctccagataatcggtggtgaccatgggcaggccgttttcggacacgcccagtcccgcatccttatgacgttcgatgccatacatgcattggatgccaatgcagcacaccagtatcagagcaagcaccacacggccagacacgatgagcacatgcagacggtcccttttcggtgcgggatcgctgccggacgcatgcaacggttggaatcgcttcaccgccccaccggcgacgagacacacgcaggcaaggaagcccaatatcatcatcgcgatgccaggctgcgcggaaccggccacgacaccatcggcatccacggctatggccacacggctggaaatcagggcgagcgcgcctccacaaacgattaccacccacatcagccgcgaggtccgcaacgcgaacggcagcaccagcgaagcaagagcgagcagcgtgatgacgccgaacagcacagtgaccgccaaatcggcataatcggtcgatcccattcgccatcccagcgcacgctgtacggcctcaagcaggctcagcgacgccggcgacccgttggcggatgacgttggcactgtgatgtcgccgaacagttgacgccacatgcccaaatcggcgtaacgcaccgcattgacgagcgtaggggccaccgcaaaggcggcaggaaccggaataagcaacagcatggcgcgcttgcggcgcacgaacagcaggaacatcaggaacacgacgatcagcgcgaacagcagctgcggttcggcggccaccacagggatgaagcacagtgcggcgatggccgcggcctgaacggatgtgcgcggcttgagcgggtcttcggtatggtacatgcccacggcacggaacacgaatgcgaacgcggccggcaggaacaccattacggtgagcatcggcatattggcctgcgcataccagccgaacataatgccggtggatgcccacaacagtcctcccagcacacgaaccacgtccgagcgggtgaatacgcccgccagcgcccagaacgacaatgcgctcagcggcgcggccacaaacagtatcatcgccagagcggcggtcacatggccgagcgtgaccagcgaggccagcatcagcaccagcagccacggcgtgggcggcgcaggaatgccggtgccgctgccaaacacccatggcgtggtggtggactgcaccagttgagtgaagctggcaccggtggaaagcaacacatcggaatacaacgatccaccggagaatatcgaacggaacaccggccaatacatcaccacgatggccgcaaagcacaccagcgccatcaccacggctgcgctccagcgatatatggtgcgtgtccgcagatgggcacgttccagcggactgagcagcactctgccctgctgggattggaatgcatcccgacgatcatggaactgcttgatctgccgactgtcggcgaacaaaacctgcagggacgatgcggcgaccttcgactgtctggccaccagcctgcgcgatttcatgtttcccgcgatatcggccaaagccaaccatggcaggcacaattgcacccatgcttcatacggcttcttgccgaacatcatggctatggccatgccaaaactgcgaatcagcctccacagccagacgataatccaggacgacatggccaggtcagtgtacagatagcgctgttgggagcgatgcaccgtcatcgcatgattgaccgtgtgatcttccttaagcggctccccgcctcgcgtacgaatgccctcataccgtgcgcgacgatgtgatatctccgcttgcgggactaccaccacgcgtccgccgctcaggcagacacggcggcagaaatcgaccgattcgctgtaggtggtcagccaggcattgatgccccgcagtcgcgtgaattgcgacatggacaccagcgcgcccgccagcgacaccgcgaacacatcctgtcgcccgtcatactgctcctgatcgggttctccatcgaccaccagggaatgcacggcgtgtcggcctgcatacataccgacatcatgcaggtgggatccttcccaatcacactgtttgcacccgagcacgctggcccccggcgtattgcgccacgcctcaagcaatcgttcaaggcatgaggcatccgaggggcgggaatcatcatggagcaaccacaatgcgcggggagcgtcatccaaatcggcccgatccaacgcccggctgaccgcatcgccgaaggaacgcgcgcccttggccgaaacgatgtgaatggtcacatgcttggactgcggcacctccactaccggccccgatggcgagggaatgacctcgaacgaagtggttatcctcgaaccggcgcgcccggtcgcgtcggcgatgatgacgactcccggaagaacattctgcgtcaataccgaacgcaatgtagaccggaggaaacgcatatcttcctcaacggtgatcacagccgtaatgccggtatccacatcctgcctatgcgtatacggtcgagaagacatggcgtcggccaacgcctcatgaatatcgctattacctgtcggactcataaactcccagtgtacgcaccagacttgaagggggtgtgtgtggaactacgcctgctcccggtgctctcgcttatatcgacggcgttcgcgctcgctcatgccgccccaaataccgaatcgctcatcatggtcgatggcccatttcaggcattgttcacgcacttcgcatttggcgcacacacgcttggcatcacgggtcgagcctcccttttccgggaagaacgcctccggatcggtttgcgcgcacaacgccttgtgctgccaagatacatcgccatcaggtcggaatagtccccacaattcatgccatggctcttcggctgaatcgtcgaccacaccccacatgcgattctccttgcctattgagcttttcatacggactaaattacacacatgcaatttcgtttttgtcaaattctttctcgtgtcattacatcatttttatggaactgtgtgctatggcgcggacacgatgccctgatgccgttgcacatgatattgtgccgttcctgcgcaggaacaccatagcgcaggaacacccggcggatgctgtgtcaaagtgtcattcagacaatcgacagtttcaggaggggttatgacgcaggaatcaggtggggcggatccgcatatcaacccgccaagcttcattcctgcgggaaatcgacgcacccgaccttccgggcaggtgccacgctccttcgcccctgcccgcgcctcacgtcagtcaggtcaggctccatcggcccgtccgtccgtcacgggaaatgacatcgaagagcctcaaccgaacgccaacgccacggcaagcgccaacgtcacggacaacggcaggcggactccgcccagtttttctccgaaaaccggacgtgccacccgcagcacggctccggatgccgccgcaccgcgcagcattccgccgtcgcgagcgcggatgtcttccggctcatcccgcaacgccgtgcgcaatccgtcggatatgtcggtttcccggccctcatcgccagcagcaaacgtgtccacgaagttcagccatcttggccggccggcggcggcaacggcgaaaacggtaacggcacaccggccgcgcgccttgcgcatcatcttatgcgcgattgcggtactggtggcggcgttgattctttctgttttcggtgcctggcaatgggtggacagcaaactgaaccggagcgactggctgaccgacacccccaacacgccggcctcgacctggctgattcttggctccgacgagcgagacggttccaccgattacggcggcgtggacaatatctcaggcttcagaaccgatacgattctggtgctgatcaagcctaaaagcgggccgagttcgctgatttccattccccgcgattcgcttatgaacgtcgatgaccagtacatgaaaatcaatgcggtggcgcagattgccggcaagaaagccttggtaagcaacgtcgagcagattaccggccagaaaatcgaccatgtggcgcagatcaagttcggcggtctgcagaacgtggtgaacgccttgggcggtatcgaactgtgctatgacgaggatgttcaggattcctattccggactgaactggaaggcgggatgccatacgacggatggttccactgcattgtccttctctcgtatgcgatacgccgacgcgcgaggagacttcggacgcaacgaacgccagcggcaggtcatctcggccatcgtcaaaaaggcttccagcagtgggaccctgaccaatccgtccaaagtcgtggcagtgtccaatgccgcgatgagcgcactcaccgtggatgaaaaaaccaacccttacacgttgctcaccatggcgttggcgttcaaaagcgccaccggctcgaatggcatctccggcagcgtgtactggtccgaccctgattattacgttgatggcgttggctcctcggtgctgcttgacgacgccaagaacaccgaactgttcaatcaacttgccgacggcacgcataaggccggcaccgtgggcaatctggcggaaggctgaccgacgctttcccggagcccatcggcttcatcgtcggcgcatgatcgccaccattgcctacaccgccaatcatgcacgggcaaaatgtcatgtggataactcggcaagctagaaccacataccttgattcggcttgcgctttcggcatgcgctcccccacgctggaagcatgacatcacagcagaacgattcgaagcgacattccgcccatacggcatccgccgtatcccgggcgaagcaccgtttgggcgcgccgccattgcgcgcccgcctgaccatgcttgccgcggcgtgcccgatgatcgcgcaggcactgatgatggtcatactgctgttgcacgggcaatggctgttcgccgccatgatcgcaccgggcatattcgcctgtctcgtgtccctgctgctggcgctccccccacctccgggcccggagaagacccccgccccgcaacaggcaacgatcgatatcggtatcacggacgatgccgatgcccgcgccgcagacctccgtcatgcgccgtcgcagccgatagaatcgctgctgcacttcgcacgcctgccatggcgcaccattgtgggccattggcttgaaccccttgaccttgcggtgccgatcggcatgaccggaagcgagccgctgaggctcgatctgaaccgtcaggggccgcatgctctggtggccggcaccactggttccggcaaatccgtgttgctgcaaagctggtgtctggcgctcgcttcgatgaacgggcctgagcatctgaatttcgtgtttttggatttcaaaggcggttccgcgttccgcaaactcgaacggttgccgcataccgtgggcagcgtatgcgatctggatctggcgcatgccgtacgcgcgttgcgtgcgctggaagccgaactgacacgccgtgaacagctgtccgccgctgtccatgcttccgatatccgtgatatggtcaatccgccaccgcgcctgatcgtggtcattgacgaattccatgccctgaaggaccagctcccggattatgtgaatcgtctggtgcgtattgcctcgctcggcaggtcactgggcatgtatctgatcgcctgtacgcagaatccgatgggtcaggtcagtgccgatatgaaggcgaatatgtccgtcagcatttgtttacgggttcgggaccgtctgcaatcatgcgagctgcttggtgatggtcgtgccgccgacctcagtccggcaatgcccggtgcggcgttctgcaacgattccgaacaggtgacggcattccgctgtgcaacggcgcgcgatatcgatgcggtatgccgccagatcgcgttcgcatcgcggttcgtcgggagcccgccgcagccgtccctgtttaccgcgccacttccccggcacgtaaaagaccggactgtggccaatcacgcaccgcaacgcattcgatttggacttgccgacgatggcatcaacctgcgagaagcgacggtatccctcaccggtggcaatatcggtgtcatcggcccgcaggggcgcggcaaaaccacgttgctgaaaacattggctcgacacgccagcatggctgatggcttggcggtacgtgtcagttccccgcatcgccgggtatggggatcgcaatggcttcgcaacggccgctgcacgccgtatgccagctcggatgcaccaccgcctccgcatatcgtgtggttcgtcgacgacgccgatgagttgttcgacccattccgcaccgacgagcaggcgctgtctttcacacatgcgttggccgatgagtccgtcagcgtggtattcgccgtcagcacgattcgcccgatacgtataccagagcattgcaataccagaatcgtgttcccgtgcggggaacgaacgtctgaccttatggccggagtccccgctcgcctattggatacgatgagtcatatcgatgccgacaacgcgggccgggccgtgctcatcgagggcacatcggcatgtctggtgcagtgcgcttcgtgaaaacttcggttttttctcggcgaaacctcttgaaaatcaccacggttcgtggttaccttggtactggacttaaggaacaacaccagccacggggcttttaagggaggcaagcaatgagcagcgcttttgattggcgagccaaggccgcatgtcgtgacaaggatccggaactcttcttcccggtgggcaacaccggtgcagcctatcagcagattgaggaggccaaggccgtgtgccgcacctgcaaggtgattgatgcatgcctgaagtgcgctctggacaccaatcaggattacggcgtgtggggcggcttgagcgaagatgagcgtcgtgcgctgaagcgccgcgccatgcgcgcccgccgttctcaggccatgcagatgcaaatctgatgttttgattatcgcttcgtcatactaggaaaccctcccacttgggagggtttccttatttttgggcttcgcatcactcatcctgagcggccctgagcttcatatcaagcaccacgcgggtgccgccttcgcggcgcggctcccaatgcacggaaccaccgaaatcattggtcacaaaggtgttgatgatctgcgtgcccaaaccagaaccggaagaacgagccaatcctccctgttcttcggagccgagaccggaaccgtcatcctcgaccaccacattgaggttcgggccggagcggcccacggaaatcgtgatatggccatccttgcggccttcgaacccatgctccaccgaattggtgatgagctcggtcagcacgagggacagcggcgtggcatcctgagcgggcatcatgccgaacttgcccatgtagttgatatcgatgtgctggtctttcatcgtggctaggtccacggccatgcgcagcaggttggcaatcaccttgtcgaagtcgacgacctcgtcggcggtctggctcaatccctcatgcaccatggcaatggtctgcacgcggcgttgcgcctcctgcaattccttcttgacctcatccgacttggtcttacgagcctgaagcctcagcaatgcggagacggcctgcaggttgttcttgacacgatggtgaatctcggaaatcgtagcgtccttggtctgcagctcctgctcacgacggcgcagctcggtgacgtcacggcatagcagaatcgctccgatacgaccgttgttgtcatataagggcagcgagcgtatcgagacggcggaacggttggcgttgagttcggagtcgaccgcggctttgcccgccagcaccaacggcagggtttccggaacggggtcgttctccttcaacagctgtgtgccgagttcgctgaggtaatggccaggcatggtggtcagcaggccgagacgcctaaagcagctgatggcgttcggggctgcgtatcgaaccacgccgtccatggtcaggatgatgaagccgtccgccacgcgagcgatatggcgctggctcatcaccgaatccttgtaggggaactggcctcgcggaatcatctcgtacagctgtttgcccgcgttaatgctttccgactcatatcgaccgttggattctcgtgtggccatattggtctcacgcacgaccaagcccaaggtcttgccattgtgccgaaccggcgcgtacacgttgcagacggtcgccttgcccacggttctcaataccgtggagcggaacaccacgctggagagcatggcggcgtccaattcgccgaccatgtcatccggcatgacgtttcccaccacgtcttccgcccgtagcgtcatcacggtggatgggcggcattgttcggccaccacgtatttgccgtcaccgtcctgtaccagcagcagcaggtcggcaaagctcagatcggcgatcacctgccaatcggcaacgagatgatgcagccactcgcggtcctcgtcgtcgaagtcggggcgcgttgcaaggatgtgtgaaaaatcagccatgcccctatcatacgcagacacgtcgccgccattgcggcaagccacacgggcaagtatgacgactattacgacatcgcatcttcaataccgcaccaatcgcgttgcacggctgcccgccgttcaggcggtcatcgcctcatacacctgagaggacaatgcggcgatctgctgctgcgcggttcccgagaccactcccgaggtcataaccaccatcacataatcccgttctgttccgtccgcggccttgccccacaccacggcggcatcattttccacgccggccagttcaccggttttattggccacctgaatgccagacggtactccggcgggtattttggcgcgtcgcgtctgcccgagcaatacgtcaagcatggagcggctggcttcggcggaaaccagtttgcctcggtacaatgcagcgaggaatctgccgcaatcggaagccgacgtccagttctcggtgccggtcccgtctgtgccggcatcggacaacacccgcaactgcttggatgagctgaagccgtatcgggcggccgtaccagtcacccgttgcatgcctgtggccatgtcgccatcgccgaccatcaataccagctgattggtggcagcgttcgagctgacggtgatcatctggttgatcagcgaggtggtatcttgcccgcccgcggccaaggtgccggcatgttgcttatcgtacacggcaagcatcacgtacagtttgatatccgaagccgccaccatgggctggccgccgacgctcacggttttgcccgtggccagatcctcgacatacaccgaccaggtgcctccattgccggccacagctgccgtgaccgccgaggacacatctgacatccgcttctcttccgccaccgtggtcaggtcgggagcaggtgccgccttgcgctccaaggtgtcatgcacagggcgttgttcgtgtttcgatgacgccgttgacgacgatgccgacgctgttgccggtgagtccgatgccgaggcgacgggcgatgttttggcgtgcgatgcgccgagaccgttatgcgcgtacatccatccaccgacgccgattaccaaagcggcgatcagggcggcgatcaggatcaatcccacgacgctgcctgttgcacgcgtgtcgctactatgcttggtatgccgagccaccgtcactgccccaatgtcttgtcaacactggccagcacccggctcatcaggtccgcggccaccgactgcccctgatattgggtgacaacggccacggcggccttatgaccattggcttcgacgatggcgaagtaattccaggtgtcctggatgccttggcctcggtgggcatgcacgatcatgtcggacggaatggttacgccttcggaagcaatgtccacgttcatcaatgacgcgcctcccttggcgtccactgcggcgagcatgcgggccgcatcgcgggaggaaccgtaattctcataaccggcattgctggccgccacatcgccgaaatcgcggttgaacgaggtgcccttatacccatgcgaagatgcccacgaattgacgccgctccagccacctaccgccgcggccgccatattgccggcattgttgtccatggaacccatcatcgcgtttgcctgcgctttggcgttgtcatcgccattgtcctgggccgcaagatagaccggcagatagagaccggcagccacgaattgcttgccggactgcgacgtggtcgcgatggtggcgtcctctgaggaatcggcgtatgttccatcgatgaccatggcggagacggccacatcggaggacgagtatgaatccgcgatgtcagacaactggctggatgtgatcaccggagtggaaggcttcgacttctccgtcgagcttttcttggacgaatcgtcgctgttcttgtctttggcgctatcagacgtgttcttcttggccttggacttggcgtcagaggaatccgtcgtgccatcatcggcggaatccgacgcatcggacccggtcgactgtaccgatgtttgcgcctgcggctgagctccccacaatcccatgctatgggtgacgaacaagccgatgaccaacgccacgacgcaaatcagcgcgatgagcacaatcaccaccgctttggtgtgatcgccgccaggacgcccggcgggaggttcaggagaagcaggtgccgcagggccagcggtcatgggtcccggtgccataggccccggcaccgcggaacccggcgccgttggcgtcgcgacggcgggcaacggcgccgccggctgcttcaccagcgtcagcgcgttatcgtcataggcaggggccgccggattggcctcgggctgctccaatgggcttccgcactgcgaacagaaggcatttccttgctcgttggcaaacccacactccgtgcaatacaccatcaccgaaccccttattgctgtgacgttctcatcttcggattccatagtatcgccaccattgggtgatagtgttcgtgtgagtcggtattgacaagcataaaagttacgctaacgtaggttacggcagcgtaagaagcgtatcgtcaactcgtgaaacgggggcatcaccatggcatcaacaaccgacgacgcggaaaagacgatgcatcacgacgctcataacagcgcgacgattgcagaggatgccaccatcgcatccaagcgtcaggcggctatcgaggcgcgcgaacaggcgttgcaggccaaggctgatgccgtacgggccaaggcccagttcaaggccgaggccattcgagccaaagccgaggagaaggcccggcacaagctcgccaaagcggagcaccgtgcgctgaaaatcgagggcattgcccctgcggaagtggaacgcaagattcgtctcgacgtgcacggacgaccaaagccgttgatgcgcggctggattcacgcgattgccgctcccctgtcattggcggcaggcatcgtgcttatatgcctggcacatggcgcgagtctgaagtgggcgtgtgccgtgttcatgacagcgtcgctgattctgttcaccaattcggcctgctaccatctgggcgattggagcccgcgcgtcaccgatgtgctgcggcgtatcgatcatgtcaacatcttcctgctcattgctggcacgtataccccggtttcgtttgcgctggaaccgttctggcgcaatgtgatcatcatatcgatgtgggcgtgcacggccatcgccatcgtgattcatgtgatctggatcaatgcaccacgctggctgtatacggtggtgtacatcatcttcggcatctacggcctggcttatatggtgatgttctggaattcgccgtatgcggggccagccgtggtggtgctgctgtgcgccggcggtgcctgctacatcctcggcgccatcgtctacgccttgcgcaagcccgacccttggcctcgcgtcttcggcttccatgagattttccactgcggaacggtggccggatatgcctgccatatggtggccatctacatggtgatcgtctcgctgtggcaataaacgctacgacatataagtatgcccccgcctacgggggcatactagtcacttataactcaggccagcggcttggcggccttgaccgtcacggacagctcgcggccgttcggtgcggtgtaggaaacgacgtcgcccaccttggcaccttcgatggccttgccaatcggggaatccggggtcatgatgtcgtagtcggtgccggccacgatgtcacggctgccgagcacgtaggtcatctcgttgccgttgagctcgatggtcaccacagagccctcgcccacggtgccttccggggcattctcgatgatcttggaatcgcgcagcttgacggtgagctcggtgatgcggccctcgttcttgctctgcgcctcacgggcggcctggtagccgccgttctcggacaagtcgccctcggcacgcgccacggcgatcttgtgcgcgatttcctcacgcagctcgccttcacgatgggcgagctcttccttcatcttgttgtatgcttcctgcgtcagcaggtagaccttgtcctcagccatatcgtcctcctgaaccgttgtcgatgctgaaacaattttcgttatttatgacaaaacgccggctatgaccccggcgttcgtcatgtgctgacctatggtcagcgggtggaaatgatgtcgatgacgaacaccagcgtgtcctcgccgccgatgccggcctgcgggatgccgcgggaaccgtagccgtattccggcggaatggaaaccaccaaacgcgagcccacgttatggcccggcacggtctggtcccagcccttgatgacctgtcccacgccgatgccgaagctggcgggctgatgacggtcgaagctggagtcgaatggggtatccttaccccacaccacgccgtggtagttcacggtgacggtgtcgccgcgacgcacgatcgggccgtcgccctcggtcagctccacaaccttgaggcccttcggggcttcgggcgccgggaactcgataacgggcgtggtgccgaattcggcgttcacctgaggcatctgatctgccattagtcctccttcaaagacacaatgcgccctaccttagcaccatcggcgaatcggcggtagtccttcatccctgtgcgatacgacacgctggccgtatacgtcgattccggtcatcatgctggtgaataccagacatgtcaatcagcattcgacgacattgacggcaagcccgcccttggaggtctccttgtatttggccatcatgtcttcaccggtctgcttcatggtttcgatggcctgatcgagggtcacgatgtgtgagccgtcgccgagcatggccatacgcacggcgttgatggcggtgttggcggccatggcgttgcgttcgatgcatggaatctgcaccagtccgcccaccggatcgcaagtcaggcccaagttgtgttcgatgccgatctcagcagcattctccacctgttctggcgtgccgcccatgactgcggcaagtccggccgccgccatcgaacaggccgagccgacttcgccctggcaaccgacttccgcaccggaaattgaggcgttgcgtttgaacaggtatccgatggcaccggcggtcagcagaaacgtgaccacgccctgttcattggcgttgtccacgaaatgccagtaatagtgaagcacggcgggaatgatgccggcggaaccgttggtcggagcggttacgatgcgcccgcctccggcattctcctcagagacggccaaggcgaagagatccacccatgcggcgtcggaagactcgagcacggcgtctttgcgccggctgtcgcggcgcagcacatcggaattcgaagcgagacgccgatacatcttcggcgcgcggcggggtacgtcaaggccaccgggcaatgtgggctccgccgaggtgcatccgtggtccacgcaggcgcgcataacacgccagatggcatcaatatcggatcggacctggatgcctgagcgtgaagcagtttcgttggcccatacaagttcggcgatgctgagatgatgttcccggcacaacgacaccagttcggcgcatgatgagaacgggtagggtgcctcgacgccgaaatcagtggatgatgattcgtccgcgtcggcaaaggaggtgccttccggaggacgttcatgaatgccgatcatcgggtcttcgggagcgcctttgcgcacgaatccgccgccgatggaataccagacctgttcgtcgaccaagcttgcggcggcgtcgaaagcctggaatcgcatgccattggggtgcgcggccatgcgcttccattgttcgaacaccacgtcgcggtcgtagtcgaaatggatgcgtttgaggccggcgaggttcagagtatcgtccaacgcgcaggtctcgcggatgcgcatcatgtggtcggtatccacggtggccggcagattgccttcgagcccggccatcgcagcacgatcggtgccgtggccgagaccggtcagcgccagagaaccgtaaagcgtgattttgacacgtgcggtgcgatcgaccaaatggtcggccagcaacgaggaggcaaaggcatgtgccgcgaccatcgggcctacggtgtgcgaggatgaaggtccgacgccgatggtgaacatgtcaagcacactgaacatttggctccttctcccctgctggttcggcatgccggtgtcaccaggcgtcatgccatcacgatatcgtattccagcctagcgcccggaatctttcgctttgcgcgatgatggccgcgcgcgtcgtgccggcgagcgataagtcagtcagtgagatagtgcggagaacatcataaccagtacgatgataccgatgatggccaatacgatctgcaccaccatcagcccgatggtcagtcccttcttggtggcgattttgggcgcgtacgcctgtgccaacaggaaggcgatgaagccgaacaccgcgtagttgacggtcagggccatcacatcgctgttcgacaacaccacgccgttcagcggctggttcagcgtgttcatcatcgtgctcatcacgaacatgccccacacgccgtagccgattaatccgacgacgccgtacagccatggcttgagtttgtcgttggcacgcagggtcagggcttcggcacaccacaacagggcgaagccgacgatgtaggtgaacgccacggcgatcagtatcacgatagtcgcccacggcaggagtgcggccacattgccgatcatggacagatagaatcccgagcaggcgatggcaccaacggtgagtgcagtgcccgcaatgacggcttgggcaagcatggtgggcagggcgccttgttcgactcgttcgacatcggtccagcgtgaagccatgtggattcctcgtttcatcaggtacatcgtcacaacgccacatagcctaacggccttttgtttcggccttataagctctccacatagtaagctgcgagcccctctgacgaggggagctgtcggcgaagccgactgggggagagaccgcggcacagccgcaaaaaacggcatcgaccacaggccgatttcaaggtgcctccggtgggactcgaacccacaagccgaagcgatcgattttaagtcgactgcgtataccatttcgccacggaggccaacttttctattataagctatctcctgccctgagcattgcttgcgggttgctgcgcttcgtgcagccgtcgcggcatagccgctcccttcgcctacaaacagcccagtgggctgtttgtagcagccggtagcgatagcgtcgccggcgtcgcatataacgcaaacagcccaccgggctgtttgcttaacggctcagcccgctggaggcacttaccacttatgctattgagccagcaaccggcgaccataatcgagcacaatgccgtccagcagcccgtgttcgctggcgacgaacgaatcgatggcttcaccatgatcggccttggcggcttcgctgacacgcgccagcacacggctccagaccacagcgccgccgccgaccacatcgatacggccggggtggatggtcttgtattcgcggcgctcggcgcgcgtcatcctaaggaacttgtcgtccacggcataggcgtcttcaaggctcaaccgatgcccgtcgaccacggtgtgatcgtattctttcaatcccatagccaaggcggtcatcgtggtcaccgtgccggacacaccgatgatggtacgggccttgcctgcgtccacggtgcggaaggcctcatcgatatgctcgtcgatgtccgcaacggcctcatcgatctgcgcctgggtcggcggatcgttggtcagatgacgttcggtcatgcgcacggaaccgatgttcatggagaatgcgccctgaacctgggtggtgggcgcactgacgccgtcgccaccgatgaccaactcggtggacccgccgccgagatcaaccaccagatagggggcgggcaggtcatcgcgattgaccacggaagtggcgccgaggaagctcaggtcggcttcttcagtgccgggaatgacttcggggcgcacgccgaggatacgttcgatctcatcctcgaactcctcgcggttttccgcgtcacgagtggcggaggtggcaacgaaacgcaggccgtcgatgggatgctcggcaatcacaccggcgaattcccgagcagccgcataggcgcgttccaacgcttcgtcggcaaaacgatgggtcttgtccacatcctgacc
